United States Patent Application Publication US 2011/0014706 A2 - sequence listing, part 15

SEQ ID NO: 29764 - DNA, 2966 bp, Arabidopsis thaliana landsberg
caggtcgactctagaggatcccctgctttgattctgtaaggctgaaccaatcaggttttgggtctaaaccaaaccgaagtttgttaaatgtacagaaattattataaaaataaaccaaaattacaaacaaaaaatcgatatttaacccagtaaaccgaaattatcaaagaatattgaccgaacaaaattgttaaaacggttcaatccggaacaatttcctttaacccgaacaaactgaagttccggacagaacctaactgaactgtgaaacttccgattgtccacatattaaaaaaggataatagataattcattcaccacaggcatgaacacttattccccactccaactcataccgacgcctattcatctcaaatcctcacgcgccgcctcaccgtcatcattacgcgtcgcttctccgttaattatacgcgccgcctcctcagacgactcacagtcagtcgaaaaccaaactctagaagtcctcgaatggcgtgccctctgcaatcagctctctccgttcgcttccacaaccatgggcctttccgccaccaaaaacgccgaaattccggtgggaaactcgccggaagaaagcaggaatctccttaacgagacctcagctgcattagctgctatggagatgatgaaatcgcgaggattaggtctttctgaaatccaagacttgtctgatatcgttgagcgtgctgtgtccggtcaattgcttaccgttagagaactctgtaccgttcgaagcacgttaacggctgctacatcaacgtttcagaaactccgaaaagcagccattagtgataacaggtttgtgttctgcttctaatgtagacattttgaaattttttagtcttcttgaattgtttataagatgattgaaccgtggtacgctaccgaatcagttatagttattagatgttcttattgctattgagatgcttatggttctagcttttgcttctgttattttgtagggttactccacttgtagatatactacagggttgtgatttcaaggatacattacagcagaagattagtttttgtatagactgcaacatgactatgattcttgatagagctagtgaagatttagagattataagatctgaacggaggagaaacatggagaatttggattctcttttgaagaaaatatcaactaagatttttctagctggggggattaacaagcctttgataacgcagaggagatcaaggatgtgtgtagctattagagctacacacaaaagtttacttccaggtggtgttgttttaagtgttagtagctctagggcaacatgctttatagaaccgaaagaggcagtggagcttaataatatggaagtgagacatgcgaactccgagaaagctgaggaaatggcgattttgagcattttgacatctgaggtggtgatggcgcagagagagatattgcatttgttggatagaatattagaacttgacattgcttttgcaagagcatcacatgcaaactggattaatggtgtctatcccaacgtaacttcagaacacacaaaaacaccgggcttagctgtagacattgattctgcgcagcacccgctacttcttggttcagtattaggcagcccaaatggtggagacattttccctgtgccagtagacattaaagttgaaagcagtgccaaagtagtcgtcatctcgggtccaaacacaggaggaaagaccgctttgttaaagacattgggattattgtctcttatgtccaagtccgggatgtatttgcctgctaagaactgcccaaggttgctcttggtttgatcttattctggctgacattggagatcctcaggtattaccttatgaattccttgcaagataatagagctactaacgtcttgattatcttcttatcgaggtttacatttgcgagaattttcttttataaacttcttatttgcagtctttggagcaaagtctttcaacctttagtggccacatctcacggatacgacagatacttgacattgcttcagaaaattcacttgtcttactagacgaaatatgtagtggaactgatccttcagaaggggttgcacttgctactagcatcctacagtatattaaaaaccgtgttaatgtggcagttgtatcaacacattacggtgacttaagtcgcttgaaggataatgaacctcgattccaaaatgctgcaatggagttctccatggaaactttgcagcctacatttcgagtactctggggaagtactggtctatcaaatgcattgagagtagctaagtccattggtttcaataaaagaatattagagaatgcgcataagtggacggagaaattgaatcccgagcaggatgtagagcggaaaggctcactctttcagtcccttatggaagaaagaaataaactaaagcttcaggcaactaagactgcagcttttcatagagacttaatgaacctttaccacgaggtatttaagaatgttgttttattgatattattaatctcttgtaatgtatgtttctgttcttgatttttcctgaagcttgagcatgagtcgcatgatcttgataaacgtgagagggctcttctgaaaaaagaaacgcaaaaggtgcaagaagatctaaactctgctaagtcaaagatggagagactggtggctgaatttgaaagtcaactagaaatcactcaagctgatcaatacaattccttaatcctgaaaaccgaagaggcagttgcagagattattgaagcttgctgtcctatggatcctgattccttagaagaagaatacagtgactactcaccacaagctggtgaaaaagttcttgtaactggactgggagataagttaggtactgtggttgaagaacctggagatgatgatgatacagttctagtccagcatggtaagataagagtacgcataaagaaaaaggacataaagccccttcctc

SEQ ID NO: 29765 - DNA, 650 bp, Arabidopsis thaliana landsberg
agaaaatataattaaaatttagagtaacaagttaggcaatatgccttatcattacaagaggcatgcattctagaaagctagtaaaaaggaaacaaatcacttagcatatcaatctcatcttgaaaatgagaaaaagcgggccattcctccggtgttttcactatcgaaaatagttctatattatatgtatcaaacatatgacaattaatacatgttggaaagatcattttcatagcccagaaggagtttccatgcagggccgaccctgaaaataattgtgttagagcaaaacaaaaatgggggccaaaattttccattgtcataccatacaagaagtacaaaaccaattaaaaaataggtttgtttattaattaagcagcccatataaaaatcagcccatacaaaaatctattagactttgggtttatgtttctttcttatgaaactctttatatgaattatacatataaaaaaatttgttccttaatgggccacttaaattttgggccacagcaaatatttcactttgatgtgcttagggctagccctacttccatttccacatgaagagaggaggggtctgtgccattttctccgagtaaaaatgtaagaccgtctcttcaaaaatagtggattcttcatcttcagta

SEQ ID NO: 29766 - DNA, 1655 bp, Arabidopsis thaliana landsberg
gatattgggtgatgagagctttgggaagcgctgtttcgaagattacatttcactccttaaagagcaatcatataggatcaggcagagcaagaaggtaatatttgtgtctgtgaaacagtgtgctccagtctaccatttaatagttttggtggcactttcataattctgcgtctcgtatgtcaatttatattctataggagttattgtagactgtagatgcgcttaatcagtattgagagtctctgtcggacgcagatgctagcatatttacacactagcatacttcaacttgtggttatagatgattcaactattacgtactgatggcatgtccgcaagctcacagaatgttatattactacaggtacccgaggatgtgagagaggaacatgacaaggggagagataaatacggaagagagaaggacagagtgcgagaaagagacagtgacgatcatcataagaaaggtgcagctggtaaatacaaccatgatatgaatgaaccccatggaaaagaacgtaggagatcaggaagagatagccataacagacatagagaaagacatactagtgtgaaggaaaatgacacagaccatttcaaagaatcccataaagctggcggtgggcataagaaatcaagacatcaggtatactaaattccttttcttaagggattatagcataaagtaatatttgtgtttaggttttaagtcgagaaaaccatagagtagactgtgttatagtattattcgatccatgacaatgaattcagtatttggatttggttgcagaaatgctgcttctactgaaaagagtcttcactcagttaggtccaaaaccatttgatgtgttgatatcttttactgttaacacattgtcgatctctagcctagttctagacacacaagtggtttagctccatatggtttatgtcaagctttttaatctcggagctttctaaaattgcagcgaggctgggtctccgaagcagaggttgagggcaaggaaaagcggcgtagaaaagaagaagcgagggagcacacaaaggaagaggagcttgaagatggagaatgtggtcggtattgaaaatctttacacccggttaatgtctcactcccgtgtttggagatgtttaggcttcgaattttcttggattgagttttgttgaaaccggtctcatcataaacactattttgttacgaccattatcatgagctccagctttaacgcaatgagaaatggctggttaggtatttcacctattttaccaatttttgttgaatacaggtagtttcacctattttaaaatttatagaatttttataaaaacacaaattatgcgatgcagtgaagccggccctgagattagaagggctagagcaaaatccaaaatgagggccaaaaattttcattaccatactaaacaaaaagtacaaaaccaatgttaagcctcgtggagttggatttattggggagaaaaattaggttttatgagatttagttaaagctttaggctttatgttttttttatgaaactcaaagcttaaaatgggccacttttttatttttattcgaattatacatataaattttttttgttttaaaatgggccattcaaattttgggccacagcaaatgtttcactttgctgtgctc

SEQ ID NO: 29767 - DNA, 1526 bp, Arabidopsis thaliana landsberg
  unsure (1)..(1526): unsure at all n locations
cgttctagaacccatgatagaattgaaccggtcatgatgttattttcagtacacacagcactacgaatacggggcttgccaaacaaatgtcattttgtagtctaaggttaatgatttacttgtctagcgaatgaaatagttgaagcttggtggtgtaagttaatttctttcatgaattgatattcgtaggaaaggaaagaaaaccgaaaaaaaaaagattatttataacgagaaaaacacaaattagttttatatctctctgagacacgcataggcctggccacacacacacacaaataaggagtgttgacgagatttgtttcttttttgcgtaaannnnnnnnnnnnnnnnnnnnnnaaaattacaaaaacactgataagtaaatgtctatctaacgacttattttcttgtcatttgctaggtcaactctatagtgacagagtctatagatatttcaaatgcgaacaagaagaccaagaaaaccaagaaaagacagccgaaaatgaaatatcatcaacaataatatacagagtaatcgtgtaaataacggcacacatcaacaataatatgaatctccgaagataaaaattctcaaattctcataaaattccctcaagaagaaagaaaacagaacacgagaaagtgtcctagagagagatgagaagtgtaccaaactaccaccattctttcttcattttcctcattttaattctgtttcttgctttctctgtttctgcaagcaacttttcagccacagaatctctcactatctcaagcaacaaaaccattatatctcctagtcaaatcttcgagctcggtttcttcaatcccgcatcaagttcgcgttggtatctcggcatatggtacaagataatccctataagaacctacgtatgggttgcaaacagagacaatcctctctctagctccaacggaactctcaaaatatccggcaataacctcgtcattttcgatcagtccgataggcctgtttggtcgacgaatataaccggaggagatgtgagatcaccagtggctgcagagcttcttgataacggtaatttcttgctcagagactccaataacagacttctatggcagagtttcgattttccgacagatactttacttgcggagatgaaattgggatgggatcagaaaaccggattcaacaggatcttgagatcctggaaaacaacagatgatccatcaagcggtgagttttcgacaaaactcgaaaccagcgagttccctgagttttacatatgcagcaaggagtcgatactataccgcagcggtccatggaatggaatgcgttttagcagcgtaccagggataaatcaagttgattacatggtttacaatttcacagcaagtaaggaggaagtgacttactcataccgaatcaacaaaacgaacttatactcgagattataccccaactctgcgggtttattacaacgatagactaagtttgagacaacacagagttggaagcaactatggtactcaccggaggtccaat

SEQ ID NO: 29768 - DNA, 2411 bp, Arabidopsis thaliana landsberg
  unsure (1)..(2411): unsure at all n locations
gttttctatttcgtcctctgtggtttggtctgcaactgtagttatgttcatcgttcttaacagcggataagtaaagactaaagagttcttattaggctattctcctgtcctgttcttatcagtgaaatatccannnnnnnnnnnnnnnnnnntattgacacaacaacatctatatattttgctgtgtaggtaatttgttacaagctgcattttggtacgggcttgttgtgcatttcagggtctatcctattatctatgccttgccaaccatcctggttcttgatacccaggtatttagatctggtcaaaagccggctcttttgtattggaataccggtcaggccaagacacctgccagtaacatggagagaaaaacattcctcttcaatctcttgaccaccttgaaaagtttattttccagggagagaatcatgtttgctttgatatccgggggagtttttctagcttgcaatgctgtttccttctatttttatggacaagagttcctgcatgaggctctcttatatcaccttactcgaacagatccaaggcacaacttctccatctacttctatcacatatatcttcactatgagcgccagttttcagctgtggagaagcttatctcgtttttaccccagtttacagtacagtttgctctagtcttctgcttctcccaggatctagtgttctgcatctttctccaaaccgttgcatttgtcactttcaataaggtatataatgcatcactctattctcatactgtccaaaaaagtcttcaattgttcattttcatatacattccccagtgagctaaaactttctggtttttgcaaatgttgatcgcctcatttgtctctaggtgataactgcgcagtactttgtgtggttttattgcctgctacccctgattctaccatggagccatatgaagctgaaatgggaaggcttgttatgcatcattatgtggatcggagctcagacacattggctcttatggggatacatgctcgagttcaagggcgttaatgtctttctcccgctatggatcgcgagtttgctgtttctggctgcaaacaccttcgtccttgtcagaatcatacaacgccatcgattctctcctctcttcagacggtatgaatcgtcctcttcttcaaacaatgttaccaaagaagactgagactagccaaaagttatttgctttgttgagtcattaccatctactgagactttcaagtttacggcttttgtatatgattcatgatctgcaaattttgttggtgtctgctttttgtttgatatgtattctaaaggttcgttaggatttttctcaagaaaagttcattgatgaatatgaaacatttgtagaccttgcttgtcctcagattccttgtacaagagagactgcaaatagctgtataaaaacaacaggtcataaaagcatcatcacacaaagcgtagattgctctttacatttgttttaatgtgagagtatacaaactttgatacgtatatcattaattatgaaattccgggcttttgccacataatctccccataacatgatccatattccatactatggatctttgataaaaaaaaaaagtgatatctgaatttgtttttaatagataactaagtacacagctgatattttgcaaaatataattacaaggtcccaaacattcacccaaatttacaaaatagtatttggacagctttgagttgagttgagtaataaagttttgtttcaccttactgtattttctttataattttctaaaacatgttctaaaaattcaaattgattacgatgatatataaataagaagcaaagaatcatcgctttctaattcgtgtggatacgtgtgggaattttctgaaagcgtcagactcgctgagacctaactatggagaacacacggccaaacgaagaagaaggaagaataagtgaaccaaattggagcgaacgagtggaggatctcgtggtagccggcgacgtcacggcggcgatctcctttctcgagtctttggagaccaatcttcaatcgcggttaggttcttcctcctccggcgagagaacggagtttgggcttcaattatccgccgctcttacgcagttggcggatctctactcttctgagggactttcccttaaatccgatgagcttcgaactcgctcttccctcattaagcaacgagcgttggattgtgatcttgcctcttcaaggtacactactgatttttgttgatcggaaaaactaggagagatatgagaaatgtggtttagggaaattgaaagctggaaaattatatgctttcatcgattttagggttcatatacggtttatgattgcagaagttccggcaatgtagagaatcaatctgttgcttccagtggactcaagtct

SEQ ID NO: 29769 - DNA, 2466 bp, Arabidopsis thaliana landsberg
gttggtccaataactatcatgtaaacctttttttccctttcgtatctagctcttctatgtctctgttatttcagctactctttctctccgaaaatgtagttgattcccagaaactctaataaacttgtttgtttcatattcatatattaagcaatatatatatgacatcttttggtatcaagtttttgtctccacttaatcgataaattttggagtaagcatataaattagaagtaggtgaggaagatatgttgatagatattatctatattctcatcattgttgatagacaaagttgatagctatcaaagctaactataaccacatttttttttttcttttaaaagaagattgaagcctcttaccaaaccaactttgtctttttccattctacatctagtcttattctaagtggactccatatacttgtatgttatcatgatatttgcttatttttgtatcttttgcttctttttattattgggttccacaagtttattaactatattctcatcattgtgcaaagatacatctcctatagaaacaaaaccctctttattgccttttttcataagaaaatagtaacaatattgcatgttttttgaggagtcaatttgttctttgtggtggtccaaatgcaatgaatctctttctccatgagacattttggttttacatttaaagtagaattataagacttatacatcaaatctttgtcaatgattacattgtaataacgcctataagtgagtgaatatcatcttctctaacgcaaagaaattacttttaggataagcaaacacaacaccacatagctacaataacttataattatacaaaaacaaaaaaagcttataattaaacatattgttgatgtatgcatgtatatgtactagatagatatttaccgaaaatatcataatagtaacataaccaaagttactattaaccacaagctgaaaaaactcagctctagttaaagacaaaagctaacgctagaaagccaaacattaccgactacactgttcttcttcctgctttgctttcagaatccagctttggacggttcacaaacgcggacgcagccaccaccaccgcggtagtagttaaacgccgttctttagactcactacaaagagcttctaaaacgagaatctcgggctttcaccttccatggtggatatcacccgtttgttagtgaagagattacagtgagagataagagtgttctcattggcattctgcgtttacaaatgcagctatctcatccataacggtatggaagtgattgttgttaggcaataagtagaagccaatagtgttttgcttcaagtaaagaagcttcacctcttgacccggtttcgggagcccttccgcgtacttcaattgccaatcttgaatcaaatctaaacccgctacaacgacaagactcttagggaaactcaacccttctaaactcttgcttctcgggccaaacgggctacacgctggatgctctctgtcttcaccctcaggaagaaacgctctccaataccaatctcggtctctaaccgtaacaaagtacttcccatccaaacgtttctcagattccgttctttcggtccctccaaacatagggttaagcaaaatgttccccaaaacatcgatccttgactcaaccgctcttaccgcgacattatgcacaatgttacccccagagctatcacccgccaagaaaatacgaacctttgagtctttcttgcttctaagccaagaactcgagttgacccatttcaaaacagcccatccatcatcataagcacaagggtatcgattctctggtgcacgacgataattcacagagacaacaacagcaccacacaaaccaacaagcctaccacaaagagtatcataaatagcactgtttgcagaagaatgtgcaaagcttccaccatgaaagaagacaataacaggcactatttcaccatcaacaggattctgtagatcagtaatacttggtgaagtgccagcatcagctggtctgtaaactctgctaagcaaattagtttggcgatcgatgatcacatcaaaagagaagaccccattaacagggttggcatttgcagggactttccggtctagaaactctgcgagatgacggttaaaagttccgtcagggcgacgcaggagattgtaagctagcttaaagttggatattagaacccatgtattgagaggaaccactgtctgcaacaaaaaacacaagacagaccaataaatcagagaactttcaaacacaaaaccataaggagatagccataaagatatcaaagatgagatttttgagagctttcacttgtaaaacaggggaactatacacaaacacaacagaaccttataagagatatgattacaacacttgacagtagaaacagttcatggaataacacaatcaaaatcagtcacaagggtcagagaaaaaaaaac

SEQ ID NO: 29770 - DNA, 1659 bp, Arabidopsis thaliana landsberg
tttccatatacttatcacacagttcctggattgctgcttttacattgtgatttccaaataaagagatacaaagggtacaggcaatgccacttcggatatattgactggttacactgcacaagattcattaaattttttaaatcacagatagggaagacaaaggtgtttcttagggcaggtcagatggcagaactggatgctcaccgagcggaagttcttgggcattcagcaaggattatacagaggaaagtcattacgtatctgtctcgcaaaaaatatctgctgttgcagtccgcttcaactgaaatccaagccttttgtagaggtaatacatgttctatgcgattgctcgtcgggtagattattggcgtcaaatatagtttcatgtctaacaaggcttctcccaactcatttcaggacatattgcatgcgttcagtttaaggccacgagaagagaagctgcttctgtgagaattcagaagcaggcacggacatatatatgtcagacagcatttaaaaagttgtgtgcttcagctatttccattcagtctgggttgcgtgcaatggctgctcgagttgaatttcaatacaggacgaagagaaaagcagcgattattattcaagcaagtttaaaacctcatattgatgataaagatctctcctttttcgtatcttaaagatatcaaatacttgaatttgtttgtgtatcaataacatgtgtgttactgattccacagagtcaaatcagaagatgtttgtgtcgacggcggtatttgagaacgaagaaagcagcgattaccactcaatgtggctggagagtgaaagttgcacaccgagaattgcggaagcttaaaatggtgactttctctcttagctaacaataaaagctctttctttctctaaacctaatttatacgatccaccctaccatgagatgtacgtgaatattcagcatgattgtcatcaagatgttgaaaaattgtatacttgtggattggaagtttctctcagtattttttgaatcttttaaggttctcttttgagagctcaagttgatgatctatagtcaattttatgtacaaattcacagattcgaatgtatcctgagatttcctaagatatttttttgtcttccaggctgctaaggaaacaggtgccctccaagacgctaagactaagctagaaaaggaagtggaagaactcacttcatgcttagagcttgagaaacaaatgagggtacacatctcagaacttgcaatagtagatcttttgttgatgtttcccttttctatgtgaggcatctgatctgcctactgatgcagatggagcttgagcaagtcaaaactcaagaagtcgaagatttgcggtcagctttaaatgatatgaaacttcagctaggggaaactcaagtaaccaaaagtgaggagattttgaagttgcagtctgctttacaagatatgcaactagaatttgaagaacttgctaaggagttggagatgacaaatgatcttgctgccgaaaatgaacagctcaaggtaaggtcataaagattttgaaaatatgatcgtggtttatctgtaacattacctttccttctaacttctaaggatttgagtgagctcgttgcaaaggaaaatgtgatgaatccgatagcaaata

SEQ ID NO: 29771 - DNA, 2013 bp, Arabidopsis thaliana landsberg
ctccatttttggcgtgttctgttgctgctgatgtcctggtgagccctttgaaggcctatataatgacttcgtcttgtaaagagaaaggaactcttgcatccctagagtctatgcttctcgaggtctcttctcctttccctcttgtccaagtctttgtcactcccttgtcccgccccttcattggttctcgtgttttaggttgctagggtacgccttcatgggttctcagagcgtgaaatatctgttgttcgggctctcatgatgtccgagattgaatctgcttatctggaacgcgatcaggtccaatcaactagcttgcgggatgaatatatacaggtatatatgtgatgaactttaatatccagctttttgtcttccccctctaccaaaatcttgtttatatatgtgtttcatcttgcagcatttccttcacaaggaacctgttattgggattgaatacgaagcacaacttcagaagactcttctaccccgtgagaacatgcatacgcttcttataatgtagtcgagttccattttcactattaaactcgtataaattatattgggttctctctgatgcagaaatatcggcgtcagatgtgtccagatactctgatatgttaagaacatcatgcggctgtgtgataaaatcaatggaacctaaatctgctgctactattgatcatatgagaaatgttgtctcaaaggttaatagtctggaagaagaaaagatgattgctccatgggatgaggaaaacattccagaagaaattgtcagtgagaagccaactccagggtaagccccgaactgtaactataggttcactgacaagcaaaggccaaggtcacccactcttaatagcctcattacttttagatattggttctattgactttaggtttcagagattgtctggggctctgggccgagtatagatcttcaaaagtaaatacctttgttttattatctatttcttatagaaactgactagttaggaagtcttttagtgaactaaaatggctctttttaaaaactaaaagtaggcagagctcaactgacgtgcgtatgtttttacatttcttatttctcatctgttactaatgttcaatgaagggatattacgcaccagcttgaatatccagaagttggagttacagaattgacattatcaaatggaatgcaagtttgctacaagtccacagacttcttggacgatcaggtgcaatattaactgagagctacaataatttgatatgcttgtgtataagcttctatatagggcaatggattaaagctcgtcacttcatgattgtcctttttctctgacaggttctttttaccgggttctcatatggaggactatctgaactccccgagagtgattacatttcatgttcaatgggatcaacaattgctggtgaaattggtatgtttggttataagccatcagtacttatggatatgcttgctggtaagagagtcgaagttagtgcaagacttggaccttatatgagaacgttttcttgtgattgttcacccacagaccttgaaactgctttgcaggttcgccttcttcctactgcaattacacgttcatttcctaagttcttctaggttgatctcgggctttttctgacatatatagctgaaacctagcagtagacttcattaatcataacctctctggtttgttcttcagtacatttcattaaccatagtgtatttggctgaaaccaagcagtagacttcattaacgtatttgctaacatcttaatgatggagattgaatgtattgacaaacattccgtgtgcatccataaactgttttgcattttttctccttttcatctaataatgttttgactctctttagatggaactttcattatcttgtccttataactgaaccttattatacgttctttccagcttgtatatcaacttttcactacaaacgtgatgccacaagaagaagaagttggaatagtgatgcaaatggcagaagaatcagt

SEQ ID NO: 29772 - DNA, 878 bp, Arabidopsis thaliana landsberg
gatgaggccgtgtcgttgtgtgaagaggaacgtgtttgagttggtgtgatatttggatttgggcttgtgtggattgggatttggtttgtagaggaaggttgacttgggcttttgtttgggcttggagttgatgttgttgggcccttgttgaatgaggcccgttctgaatttggaggagatgagaattgtggcgcaggtggagacgtcgacgacgagctgtgtggtgatgaggacggagtgattggcgacaatgacggtgatgcgttattgggtgacactgatgatggttgagctggcgacggagggtgaagaaccgagcacggaggcagagaagaatgagctatttgagtgggcacgaatggcaccggaggttgaccaggcgagattggcgattcagcaacaacggtggatgacggcaacaccggcgagctaaaaggaaaactcgtttcaataaattgcacatgtctagaagtgtagagccgaccactctgtatttccaagcacaagtaggcactttgcgttagtgaatacccgacgaacacacacggcgtggatcgctcttgcaacttgttagcccggtacggttgcagccatggaaaacatacacatccaaaaacccgaagcttcaagtaatttggagattgcttaaatagtttggcataaggagacaccccttttatgacctcggttggcattcgattgattaaatacaccgcagtagcgaacgcatatggccaatatgactttggtacaaaggcatgagtaaggagagtgagtcccgtctcaacgatatgacgatgcttcctctcagcaataccattattttccggtgtatgtggtggtgtggtgatatgagaaatgccatgtgccgccaaata

SEQ ID NO: 29773 - DNA, 1707 bp, Arabidopsis thaliana landsberg
catttaattgtttaaattaaaatatttttattagaggttccatttaataaattttcttacatttacattataagtactatatttagaaatcctattaaaaaccaatcacattgttcctacttttctgacacttattcgttttcttataatttagtcatgaatcttttgcccttcaatattcatttatttcacaatctattgaaatttaatcatagattgcaatatgcatataatttgattgataattaactaaattttctttttattaattgcaaatctttgcccaatctgtttccttaattacgtctataaatgcatcattacaaaaacccaccgaaaataacatcaaaagaagtaagcaaaagcaaaagtcctaatttctcctgtcatggacaccttacctcatcatctcctcgacgagattctcttcagaatagaccacagatctctggccatgatacaatgcacaaatagatctcttcaatctcatatatccaaaaaccctaactttgcatccgaatacttttctcgggtcagatcaagtttgctatacatagcattcaatggctcccctttgctctgctaccacctttacggtgattctaggtcaccgcgaacagtagaagccttgacggagtgtcacattttaggctattgctctggccttcttctactcttcctcaataaaaatctctgcgtcgcaaatcctctcacaaagaagtttcgttttttaaatcactctaggtcaaagtttttcccttgggttactactctacgacgaggtcgtcaacaagtcatcgggttctctgtagatcagattgatcgaacaaccaatagtttgaaaatcgtcatcataaacgaggtgagaaacagcaatgagacaacatatgagtttgagattaacgtaggctattcatggaaactatcggaaacgacgttaacttgctgcacaagtaatcttgatgaccgtatgaaaaaacctgtttatatgaagggaggtcttcactggctaagaaatgacggatctatcgtagctttcaaccctgaaacagagaaagcacgactgatctccatcagattccccaaagaactttgttctaaaacgttgttcacagccgtagattacattttaatcttgatatcggcgacggaagaagtcttttacgtttatgcagtagagaacattcttactgatcccaagtgggtcgtcttgaagcaaatccggaacggggtactggacgagaagatgctatatagttggtactcggaggcttacgatggaaagtgtttagtgctgagggagatattgaagaaggaccattacaagcaagtgcttcatgggtacgacctgagagctaataagtgggaagtcataggttcgattccagggtggtacacttcagctctagacttttatcagtttacaccgtctttgtcttcggtaataggacttgatgccaaggaggaggaagaaatattggcttgtgatcataaaaaaatctcctctataaactcaattattagaatgcttgatggaatctcatcctagaaaaatggaatagcagcttatgaaaagattggttgaagaagaaacaaaactaatgttgttgaagaagatgaagcttttcgtccaaggctatttttgtatcgttcatgccaaaaaaagagtagagactgtgagtagcatccgtaccatttttggacatg

SEQ ID NO: 29774 - DNA, 1283 bp, Arabidopsis thaliana landsberg
ttactttcttaacatgatttattctaatttctaacgaatagatagaaagaaacaaaaataggtcaaagaaatctagaaggctagaagaagcaagaggagtaagtagcaaactagaggtttagttaaatccattaatcaactagagtatgagaatgcaacgacaataacaacaacaacaactccactccatgatctcatcatcctccgcgcttcctatataaacaaacccattagccttagaaaataaacacaaacctaaaaccaaaacaaaaagaaagaacaatggccaaagctcttagccttacaatctttctctttctcttgatagcttccaatgtccaatccgctcgacttctcgatgaggttcaaactcagccacagttagtcccccaggtaccggaagaggaagatgatagtccacaagccgtaacaacaactccaacaccaattcctctcccaggacccgccacgggaggacccgagccaatcctagagttctttatgcatgacgtgctaggcgggtcacacccatcagcacgtgtggttacagggatagtagcacaaacagaggtgaatggaataccgttttctaaatccagcaacaacattttcccagtagataacgcagtgccgcttgtgaacgcaaacagcatcaacaacttaatcaatccaaacacagctccactcctaacaggacttagtggctctcaagccaacaccgtaatccaaaacagtaacggtaactctcaaggatcccttagctccaacaaccttccctttgtgaccacgggtcagctccctcccattttctgtttccaacagcttatgtttggctctagcaccggggttgacgatgagctcaccgagggccatgagttgggctctgcgatcattgggagagcccaagggttttatctcgctagctctttggatggaactagccagaccctttcgttgacagtgttactccacgaagatcatgatcatcatgacacccttgatgatgccatcagcttctttggggttcaccgaaccgcttctcatgcgtcgcatatcgctgttgtgggtggaactgggagattcgagcatgctaaagggtatgctgtcgtggagactctacacaaccaggaagaccaacatgttactgatggtcatgataccattctcatttcagtgtttatcttacatactacatagcttgaagagttatggcatttgttgaaagaaaattcctctgtttcgttcgtatgttctttcttataagtataatgtgtggtctatat

SEQ ID NO: 29775 - DNA, 1801 bp, Arabidopsis thaliana landsberg
acgtacaggcttctggtagtagtggaaaagagaaggtccgagaaacttcttccgtttctgtaaaacctcatcggcggaaggacctttatacggccgtggctggtgaacgaacggcggaatgtgcggcggagcatcagcaatcgaaggagaagtagagaaatcagtacggaggagagagatcgcacggcggtgatagatatcggaagtagctctcttcaggagttgcctttgtaacgccatttattagatagagataatgatgacaagttgggcaaatcacactagtactatatatatatagtgtgattaagactagagtttagtgagggattgattagtgctacttaagtaggaggaatcaaaagatttttaagaaatgatgacgtgtcaaatatgattcttaagaaaaagattcctacatgtattaagattccatttgaatgagattgctgattaagcaaccgacagtgacactgtaacaaatctcttccgattatcgtctgctaattatatgacgtgtcactgactagaggcggagtatccaaggtttggactttggagtattaatcctccaaatctttttttttaattttaattttgcatgtgcaccatgattagttgttaagttagaagattgtattattttagtaattagacttagttagtggacctaactccgagctaattaacattgtatataaaatatgaaatagtactatataggtttcaagattatcacaattttcacatttggtcttagacgtgtacatgactatcacttgacgaaggatcatcaagtcatgctaattaattatgctaatagagctgtcgtccataacaaccaacgcatttacattaagatctttattaattttgtcttttactggtcaccgactcatacaacgagcccactaatgcaagagcaaaaggtttagtagtttaattccaatattcaccatactaactattatgaatttatgattaaagaaaaatctctggatcaacaacattatcgcaaacaaactttattactttcatattgtattcatcgaatataaaggttcatactagtacatcacaagttcgatgatatataattgaaaacaaagtcaaatccaaatttcaatatcctgaagggaaccctcctttccttggatcactaaccgccacaagcttactaattccaccggattttccatcggattcttcaactatgagctgagaaatcgtccctccggcgatcggcgttaggacttgacctttcttctccaacacaatttttattttttcaggaatctcgaaatggtcactatacactgtcgtccaattctcatacgaagctttgttcggtatcagctacaaatgaggttacaaaagtaaaattagcaaagaacaagaaagtttctatcttgggtacaaggacaaaaaatagcaaaaacctggtggtagattcttggagcaacaacggaagagagaggatccatgttgaggaagaaatgatttaagtaaacttctgttgtaccggcgatgatgtacattcctccactcgcacccaatgctgctttcactttaccgtcctgtgtaaaccaacacagaagtaaccatcgtttagaacctaaagtactcagagttacttgtagcacaagagctagggttttttcttttttcttgccttgagtacaatgggggcgagtcatataggacaatcgtgcgttcccctgacagatgaatttagctggtgctggtagcgtcacatcattgccacctactgaattactggggatcgagaaatcgtccattt

SEQ ID NO: 29776 - DNA, 3041 bp, Arabidopsis thaliana landsberg
  unsure (1)..(3041): unsure at all n locations
atttgtatggtctgacagatttatgattgcttggtcaatagaagaagaagattaatattgagtctgcattggttttgttagttagtgtatatctctgaagtcagtctcttatgccttgtctttggcagcctttacttgaagcaaagatcaaggaacctcagaagcttcaagtccttgattccaaagatgtttccagaagaaacactatgctgtatctagctgctggatttcttggagggatcaacattctcaatagtgaagccgcagaagctcgagtagggagaaaggagaacagaaagaaagcattggagaagctgagggccaaagctgaagagtcagagcccaacaacaagtcaggtaaccaaaagatagagaaagagttagagaaagaagaagtgtttcctctacttcctccacctcttgtcgttgaagcaaacttgctacaataagctctctctctcttttagctacacaaatgtcagaatcaatacctttcatttcaacactacatgctgttctgtgctaggtttcctactacaaaacgtgtaagatgatgaaaaacaaaagtagagaagagctaagtgatcttcttgtccatgtttgtgatgagcttcttcatctgaaatctccagaaacagaagtaagcgaagccaaatccaatcaacacatacaaccaaatcttatcttcaccaccttccttctccgaccaaacctcttctataccaaaccattccctcgctccttcttctttgtaactacttcccattatcccctccatcactctcccatacaacacatatatcctatcccgtcccgcaaccgtcaccgcggtcggaaagccctcgatgtcgaggtcaatttcgtcgtaaacaactccttcgctccagctatcttggcttttgagtaaccaaagcttcttctgtgacaccaccatgactgtgccgtctctacgtctcctcgtcatcccgtccgccgcaatcagatcaccgtttaacaacaccagcctcgcattcccgctatcttcgtcaactttgaataccttccctgtgttgctctgcaccaccaggagatagcctttgctgatgtacacgatcccgttcaagccgcaatcgcggaaacttgcgtccgcgtctgccgccacaggctgcgaattgaacaacggcgatttggagaagatcgaagctgcgccgtcgcgatcgactttccagatgaagtttttggctgagttggtgacgtaagcgtttcctttgaaatcaaccgccacgtcattggcgacatcacgagcgatgtcttcgtcgtctccgggaagagacgggagaggagagaggaatacacgacggcctccgctgcggagatcgtaggaggctagggcactgaagggagggagaggcggcaaactctggatacaggcaaggagacggcgattagtagagtcaacggcgagaccgaggatagtggagttctccggtagatcgagatcggagattagggtttcgatgactccagcgtcggagacggaatgaattgtgcggctgtggagagaaccgactagaaaatgctggtcccttggatcccaggttagtccctccgggtagagtcccggcgatcggaagttgataacgtggcggttatcggcggaggagggaatcagaagtcccaggaacaagacggcgaagagaattgggaagacgaagaaggatctgtatcgagtggaagnnnnnnnnnnnnnnnnnnnnntcatctgtgatttcgatttaggaaaataatgaatggctcatttttagaaaaaataaaactttgatgtataaaaagatatgaccaagcccatttatgtaataaacgggccacattttgcgtgtagtatataaaatagggcccataaagtttattggccttccttcatttgctgtgttgatgtcaaaaagagaagagtagtgcattgctgttttattggcagctactaatgatttggttttgctgatgggctcttaatagacgtctctccactataccctatacttagactatcagggcgaatcatggatatctttgttactgtaatattcttaaatataggcccacctttcaaatcttgaatcaatcggtcggctttttaggcccaaataaacctttttattactagacctcgtaagtgaccaaaatggaaaaaatgtcaaaaaaatcataaatttttaaatttgaagcggaaaaacataaattttcgaaatgttattaaaatcctaaagtttagtttgactttattataaattagttaaatttgattgattggatcattttaggcatattgataaatttccattaataaaaagatgacatagttaacttttcgtagttaacttttcgtaacgtttggaaaataaatcaattttatacatacatatgaggtatcgttaaaaagaaaaactagtacaatgtatggtgaaaaagcttgtaaagtatctttctaaatacatataaggtattgttataaacccaaacgtaacggaaaattaacaaagtaagtgatttagcctcctagaaaaatacagtacatgatggaacacatcatgctttgaggtggtacgagagccattgataccgcgaccaagcccggtcatgacctagaggcgaagcccatcaaagtgctttaggcagcaaatatatttaagttttaagaagctaagcacgaaattttgaaaaaatcatataatacaatggttattttttcaccttttaacattttttgtatttgtttttaaaaaaccaataattttttggaccggtcctcatcgcgaccaatcaaataagcttattctgataatgtgttctagaaacgactaaatcttgcaatgaacctatgagcgagatacattattatgcagaagattgaatatagtcaatctattcaccccataaggtgatgagtgatgacccggtaacaaacccagtaaaaagtaaatactaagattaagccttttatacctcaaaaatgtgagactagtataatctaatctcaaggaaagtaatattctaaggctaca

SEQ ID NO: 29777 - DNA, 1863 bp, Arabidopsis thaliana landsberg
aaaagtcaattaaaagataaacaaaataatatttaaggtgatacaaaaaaattatagtgttgcctttttttgttttaactctgaccaaacgtatctgttgactattgactagaatttaagctattgatggcattttctttccatatttggcctccgcgcaaaaaatgagattttcccaagagttaatatgcagatgtaaacggaggttaatatcttctttttttctgaaaacaaatatggtaaaactttcccaaaaataaattatagtcaagatacttttttgttaatgaaataaatataccaagaccataaaaagtatatattattggaaaacattaatcatcactaaaaataagtgatgctttagttctgcaatgaagcttctactactgctgcctcttgctttctgctgtctttctctatcaagttattctccatcttattctttgattttactatagctatactcttgtcgttatctaaaatgtcctatatgattattattttttctctcgcatttcatgtttttcaaaggaaaccccttttgaattttttattacgtagttatcaatgggaaaaaaagagtttctccaatatttttctatgaaaatgtttgcagggtgtgaagaaattctcgtcccttatgactactcggcaacaatagaggcaagcaatgctctgttcattcagacatgttcgttggaaactttgttctgattctctttttgtcttggtgcagtgtctagagattccttataaaccacagtacaatggagggatcatcgtgaatcctgatatgcaaaatggttcccaaggctggtcacagttcgaaaatgcaaaagtcgatttcagagaatttggaggcaataagtttgttgttgccacacagagaaatcaatcttctgacagcgtctcacagaaggtttacttggaaaaaggaattctctacacattctctggtaaaaataattccgtgtttttgtttcttggagcacactctctaaaactatcatctgatgtattttatgttatacttgtagcttggttacaagtaagcacaggaaaagctcctgtgagtgccgttttcaagaagaatggtgaatataagcatgccggttcggttgttgctgaatccaaatgttggtccatgctgaaaggtggcctcactgttgatgaatctggtcctgctgaactcttcgtcgaggtatatctatacacaaacatacgcattttctccattgtttgtctacatgtctgcattttgcaagctgctctttctcaacatatatatgatgattcatatttcattgttcatgtgtagagcgaggacacaacagttgagatttgggttgatagtgtctctttgcaaccattcacacaagacgaatggaacgctcaccaggagcagagcattgacaattcaagaaaaggtcctgtcagaatcagagtcgtcaataacaaaggcgagaagataccaaacgcatccattaccatagaacagaagcgactcggattcccattcgggagcgctgtagcacagaacatacttgggaatcaagcataccaaaactggttcactcaaagattcaccgtgactacattcgaaaacgagatgaaatggtacagcacagaatctgtaagaggcatagagaattacacagtcgcggacgcaatgttgagattcttcaaccagcatggcattgctgtacgtggacacaatgttgtatgggaccacctaagtatcaatctaaatgggttacttctctgtcacgtaacgatctatacaatgcagtaaaacgaagggttttctcggtggtctcgcgatacaaaggccagcttgccggttgggatgttgtgaatgag

SEQ ID NO: 29778 - DNA, 1910 bp, Arabidopsis thaliana landsberg
  unsure (1)..(1910): unsure at all n locations
agtttccaggtgggaacgattctatacgacgttatacttgctttttctttttatctttctcgaaagaatcctctgacgttgacgcaaaagtcaaatttgtgtaatgagctggcaaattctaattggcgcaaatcggcatccccaccgatacgcagcttctacttttcttccacctatatgaccgttaaattcagactcaatttaataccattcccatttttccactgcaataattgaccccaattgtgttagtggttaggacaattacattaatttttcttttactttttaaaatttattttgggttttcatttaaagaattgattgcacatgaaacacaggcaggacatataaaattcaacactttccatcactaagtttggtttatataaatcacataaaccagaagtaattaatcagataaagaccgaaaaaaaaccaccatggcagattctgaacatgtacggccgctagctccggcgaccatacttccggtgagcgatgaatccgcctccaacatcaagaacactcaccgtagtagaaacagaatcaaatgctcaatctgcgtcactgcaacatctctaattctaaccacgatcgtgttgactttagttttcacggtgttcagagtcaaagacccgatcataaaaatgaacggcgtaatggtcaacggcctagattcagtcacggggactaatcaagtccaactgttggggacaaacatctcgatgatcgttgacgtatcggtcaagaatccgaatacggcgtcgtttaagtactccaacaccacgacggatatatactacaaaggaacgttggtgggtgaagcgcatgggctaccggggaaggcgagaccgcatcggacttcgaggatgaacgtgacggttgatattatgcttgatcggatattatcggatccgggtttgggtcgagaaataagtaggtcgggtcttgtgaacgtgtggagttacactagggttggtggtaaggtgaagattatggggatcgtgaagaagcacgtgaccgttaagatgaattgcacgatggctgtgaacattacgggccaggcgattcaagatgttgactgcaagaaaaaaatcgatctttgaggtatacgtcatacgatcgatcgattaacgttttttttttttttagacaacgtgagatatgcggattagaaactttcgtgacaaaaccaacaaaaaacactatctacttgttctagttgttttttaaaatttttgggtcatttgattatcagcacgatgcaatagatgtgtttctttatgttttcttcttcttgcaaaatttgtttttgtacagttgatcagattttgaatggagtgaacataaagtctacgttaaataattaatatcaacgttccaaaaattgaccgatgactaatccattaacgtattaaaatctttggatcatatgtactaaaccgactcgttgtagattagttagtacgcgttggctaactggtcgatttaacaattgcattcatacaattttgctagtttaaccataacccattgtttgctttagttgtaattttgtatgatctagatacaagaaatacatcgttttcctacgatcttcgtgattagtttacatactcattaatcgtgaccattatcagtttttcaaacctcgggtccttagttagtacgaaccccgagccaagagtgtttagtaaattgtagtgggaagccttgaattactcaaatgtaaccaaaacgaatatcaacgaaacatgacaacgaataagtgtaaaatattttcaaagaggacccatcaaacgaatattgttaaacagtcnacgttacatggctcgaacacatttttatacaataacaaaaaaaatttcaaagtaaaacaagagaatatattattcattggggttggg

SEQ ID NO: 29779 - DNA, 1920 bp, Arabidopsis thaliana landsberg
  unsure (1)..(1920): unsure at all n locations
cttgatctgaattggtgttgtaagtacgaggcttgtggcttagatcaatgcctttactttcaggaccacgtaagtagacaaaaacacctctcccattttcttcaatcagtctcattgcaatcgctaactgttttccaccagagctatttccgaatatatcatctgtgatacactccgcgtgtactctcacgagaatatccttcccatctccgatttctccctgtattttaatcataatatggtttataagaaacggaagtctctcatggtttcaaatagggtttattcttaccttgaccattgcaatgtgctcaactccatcaagtaatgacttaaagcaatgtgctttgaatggtccccacattgtcggtataggcgcaaccgcagtaaactcaaccagtctctctcttttccttcggtatctaccagaaatcaagaggaaaacatcagtaacagagggagttgagtgttcttaatccaaacaccagtagctgatcttgaattgaatgtattgtacctgattaaatcagcgattgaaattaatttcaagttgttctcttgagcgaattggcggagtcttggtaatctagccatggaaccatcatcatctacaatctcacataaaacagatactggttctaaaccggccaacacagtcaagtcaacagaggcttctgtatgccctgctcttttaagaacaccaccttctctgtatctcaaaggaaaaatatgaccaggacgattgaaatcttcaggttttgaatcttttgatgcaagggttaatattgtttgcgccctatcacgagctgagacacctgtggatgttcccttttttgcgtcctggcaaatattttcaacattcttttcatcacacaccactaagagtcttgtggttttctcaacaccaaagaaaaacatacttttactcaccactgaaaccgtgaaggccgtgcggagtttttcctcgttatccttacgcgttaccattaaaggaagctctaacctctccaagtcttcgcctttcatgctcacacacacgattccagtcccatgctttacaacaaaagccatagcttcaggtgtagccaaagatgccgccattatcaaatctccttcgttttctctatcttcatcatctacaacaactaccatcnnnnnnnnnnnnnnnnnnnnnnnncacttaagaccttccccttctaataagacagtaagcagacacgatgctactattacaaaccttgccatgtcgaatatcttcaatagcttgaggaatagacgcaaatccatcagtaggtcgatctaaatcaaactcttcatcctcaacttcaggagaatccattgttgtaggaatcatttcagctgctaatgttccaaacgaaaccaaatctggctgtaactcaatccccattgatgatccattactcttagaagaagagaacacatctccttcctcaggtatcactctcattctaacattaaacttcttcgatatgatcctaggatacaccaagctcgttccaaatggttttgttcccttgacaacatcactgaaaaacccatgaagacaacataaccatcaaaacctaaatacatagatatgtgttccaattgaatccaaaatcgaatcataagcaaacgtaatttcaaattccgaatgataaacagatctaatcaaaaactatcaattcaaattcagtgaaaccgagagaaatacaattcaatttgattaccgggaaggcaaaagatgcgtcgaatcgcaccggagagtaagcgacgccattttcaccggagttttgaagagagagacgacgagcttttaaatagactgaacccccgccgtaaaatattactggcgcgggttttttcgccccgattttttttttggtgtcctcccctcgcagtccggtccattgccccccc

SEQ ID NO: 29780 - DNA, 1874 bp, Arabidopsis thaliana landsberg
  unsure (1)..(1874): unsure at all n locations
gtagttctgagccatctagtttctatttgaatcattgcatccttgcagatcaaaacctaaactttcattatgtcacttatgttgtactgggcgaaaagataaaaacattatcccacgcgctctaaatttctcatcaaggcgcgtgaagtgtatttaagagcccagattttctgtttgtttcccgggaaaattgaactcacgagaagttagaaccgtcgaaggcagagatctaacgccatagctctaagattctatcagttataggactaaagggacgagcttaatcttatgaaatgcttatcctaccaaaaagttcgtctccttctccgacattgcgctcaccgttcgtttctccgtcccggcaaggaattgcacgccgttttaaccacttctggattgaagaaagctcccaggtcgtatcttagcaatgcgctatttcagttttatgcttcctctggtgaaatggttactgcccagaaactgttcgacgaaattcctctgtcagaaaaagacaatgtggattggaccactttgttatcctctttttctcggtatggattgttggttaattcgatgaagctcttcgtggaaatgagaaggaaaagagtagagattgatgatgtttctgtagtctgtttgtttggcgtgtgtgccaagttggaagatttgggtttcggtgaacaaggacatggggttgctgtaaagatggggtttttgactagtgtaaaggtttgtaatgccttaatggatatgtatgggaaatgtgggcttgtgagtgaagtcaaacgtatttttgaggtgttagaggagaagagcgttgtttcatggacggtggttttggacacggttgtgaaatgggaggggttagagagaggaagaaaggtttttcacgaaatgcctgagagaaatgctgttgcttggacggttatggttgctgggtatttgggagctggttttacaagggaagtattgcagcttctggcagaaatggtgtttagatgtgggcatggtttgaattttgtcactctttgctcgatgctatcggcttgtgctcaatcgggaaatctggtagttggaagatgggttcatgtgtatgcattaaagaaggcaatgatgatgggggaggaagcaacttatgatgatgtgatggtgggaacggcattggttgatatgtatgccaaatgcggaaacatagattcttccatgaaagtcttcagattgatgcgtaagaggaatgtggtgacatggaatgctttgttcagcgggttagcaatgcacgggaaaggtagaatggtgattgacatgttcccagagatggtaagagaggtgaagccagatgacttaaccttcactgctgtcttaagtgcttgcagccactcggggatagtagatgaagggtggcgatgtttccacagcctccggttctatggtttggaacctaaggttgaccattatgcatgtatggtagatcttttgggccgagctggtcgtattgaaaaagcaaagatcttgatgagggaaatgctcagngggcnccgnccccntttttttccgaagaagttgtccttggttcgcttctaggctcgtgcagtgtccatggaaaggtggagatagccgaacgaattaaaagagagcttattcagatgagtccaggcaacacagagtatcaaatacttatgtccaacatgtatgttgcagaaggaaggagtgacattgctgatgggttaaggggaagtctgagaaagcgaggcatcagaaaaatacctggtttgagttccatttatgttaatgactcagtacatcggtttagttcaggagatagatcacatccgagaacgaaagagatctacttgaagttgaatgaagtgattgaa

SEQ ID NO: 29781 - DNA, 3015 bp, Arabidopsis thaliana landsberg
ttttatcatcataatttggctttgtactttatataaattacatatgtgtaaacaactatattagtaccacagtagctacgttttaaaagtgtataaatcatgtgatccgtacaaaaaaagttccactttgtccacacacacaccattgcactagaaaccttttttagcatctctttctaacatttttctttcttttgttctttttctctcaacacatagtctctttctggtcctacttcttattcttacagcttcttttgttggtgttcttgtgtcggtgccttaatattcaactttcctttttttgttttcacatcgaacatttcccctaaaagtaatctctctatctgttggagggttttacggcttttttgcttgtagtctaagcaactaaaacttttttccataaaccagattcatctcatctaattcctctttaaatcatactttaagcttctcttctgtaatcttattgctaatcatttcttgatattattatgcggatttgatctttcgtacagttgtctacaaacacacgtgtctgatccaaatatgggtttcgctttcttcccttttcttctggaaaatttaatgttcccaagttggcttaaatggttccttcattgataaagtcagaggacttctcgtgaagtcagaggatttgataaagaagaagacatgggttatggtaactcaagatctgtgaggcaattaggacttgttgacctctgttgtaatattcctcgtcttttatcaaacatataaccaaaattttatgttatacatttcaaaaagatcaagaagttgttcatggaggagaatctggagttaagctaaagttcaaaatcaatggaactcaaataaataatgtgaagatgatgagtaaaggaaagttcttgaaagccaaagtactctcaagagtgttctctgaggatcttgagagagtaaaaaccaaaatactcgatcctcgtggacaaacgatacgaagatggaacaagatttttctcatagcatgtttggtttctctattcgtcgaccctttgttttttttcttaccggtcatgagaaatgaagcgtgtatcactattggagttagacttgaagtggttcttacacttataagatctttggctgatgctttttacatcgctcagattcttatacgttttagaacagcttatatcgcgcctccttctcgtgtatttggtagaggtgagcttgtgattgattcaagaaagattgcttggagatatcttcataaaagcttttggattcatcttgttgctgctttacctttacctcaggtatatatatcttcagcttcagtgattcatatatgtgattctccaactctctaagaatcttggtttgttatgttttcaggttctgatttggatcataatcccaaatctaagaggctcaccaatgacaaacaccaagaatgttcttagattcatcatcattttccagtatgttccacggatgttcttaatattcccgctatctcgccagatcattaaagccaccggtgttgtaaccgagaccgcgtgggcaggagctgcctacaaccttatgctatatatgctagcaagccatgtaagttactcaactcttagctatagggtctactgtatctatcgtaagactaaatgtagcagattaggtctgttctgttttttcttgaaaagaaactgaaaatggagataactgtttccaggttttaggagcttgttggtatttgctagcagtagagaggcaagaagcttgttggagacatgcttgcaacatcgagaaacagatttgtcaatacagattctttgagtgtagaagattggaagatccacagaggaactcttggtttgaatggagcaatataacaacaatatgcaaaccagcaagcaagttttacgagtttggtatattcggagatgcagtaacatcaactgttacttcatcaaagtttataaacaagtacttttactgtctatggtggggcttgaagaacctcaggtgaattaaacagttctttgcagatttaactccattaggttatccataacatgtttttatatattctttagctctttgggacaaaacctcgccacgagcacttacgctggcgaaatccttttcgccatcatcatagcaactctcgggcttgttctgtttgcattgcttattggaaatatgcagacttatttacagtcaacaacaatgagacttgaagagtggaggataagaaggacagatacagaacaatggatgcatcatagacaacttccaccagagctaagacaagccgttagaaaatatgatcaatacaagtggctagctacacgaggagtcgatgaagaagctttattgataagtcttcctcttgatcttcgaagagacataaaacgacatctctgtttcgatcttgttcgccgagtaagcctctcttttgtgtttttatcaattcttgatatacctacttgatgaaatcttttactaagagttctttgaaataggtaccattgttcgatcaaatggacgaaagaatgcttgacgcgatctgcgagagactaaaaccggcattatgcacggaaggaacgtttcttgtaagagaaggcgacccggttaacgaaatgctcttcatcattagaggccatttagattcctacacaaccaatggaggcagaacagggttctttaactcttgtctcataggaccaggggatttctgcggggaagagttgcttacatgggcactagatcctcgtcccgttgtgatcttaccgtcttccacacgcaccgttaaagccatttgtgaagttgaagcctttgcattgaaagctgaagatttgcaatttgtggcttcacagtttagaagactacatactaagcaattgagacataagtttcggttttattcgcatcaatggaggacttgggcggcttgttttatacaagctgcttggagacggcacaggaagaggaagtacaagactgagctgagggcaaaagaagagtttc

SEQ ID NO: 29782 - DNA, 1339 bp, Arabidopsis thaliana landsberg
  unsure (1)..(1339): unsure at all n locations
gctcctccttactcaaggttttaagatctgccttcagagcttctagactttccagaaactccttcaacccatttggtttcttcgatccttttccagatgcattcaagctaacataataaatactatgttaaaaagaggttacaaaagaaagcacatcagaaaatttctagggttcaaaaaaggattacctcgctgccgccatcgtcaccttgttgggaactagggttcttcactcttctggtcaataacgtgtgagacgaagaagcctatttcgatatatatatttgtttgttattgggccacttagcctttcttatcttgggctatttataataaacacatatgacaacaaaagtccaaacttttttttttttttgtcactcaaactgaaatttgattgataaacttgatgtggaaccagggaattacacgatgcctaaacaagagaaacaaagccgacgaacgaaattaaagttctcggagacaaagccggaggaaaacgaagatatccccggaagcatagccctatgaaagggaaacaaaagaaactaaaacacaaagcagcaaaaattggaccctaaacgtaagagaacgaacccaaatacataaacagaggcaacaagactaaaaaccaaagaaaacaatagctacaagcggcaaataagacctcctcctcataagcacttgcgatgagacttacttcggctgcccacggccaccccgaaaaaaaatctgccacctcttatcataaagagagccaatctctcgaaaccagaaccaagaacttcataacccagcaagccaaccaaactggaataaactcgaacaagcctccgggtgcgacggtgacgactgaggcgtctaaatacatctaaatagaagtcttcaaaaagctatcaaaaaagatctgaagcaggacaaagagagaagcctagcctccgagaaccttcatcgtgagagaacaccacaaaggtaggagaaagctaacaaccacaacaaactacactaaggaggagagaccgactgccaacaaagaagactatcacaacaaaaacataacgaaacctctgaaaagaaatggggcaatccaaatgggaattgatggctgaagcaaggagacaagagacggagggaaaggcaaggttcgggaaaagatcaacagatctaaccgctcctaccgcaacctcaacgaaacaaaagtcatcccttgaaacaaaccgaaaaattccccaaaaaagggccaatagatctgcagaatcaaccaagcacttactcagatctatccaaaactaactgaatcaaggacgagatctctactactacaagacanagcataaac

SEQ ID NO: 29783 - DNA, 1525 bp, Arabidopsis thaliana landsberg
  unsure (1)..(1525): unsure at all n locations
ctgccaaaatagtcattaactacaaaacattcgataaagtcggcaattaaattccatggaagttcggtaattttgtaaaccaaattaatttctattttgaaaactaatttgaagacaaaacagaaaactgtgaaaaaaactatactatattattcaccgtgggtagttattatataaaatcaagatgtataacattttattttattcaccgtaggtagttatttttttgtcaaaccgctggtagatcaattgatgtatataattagttggtcatgtaaattaaaagaagaaaatgtcacggacaccttagcatatagaaatcatttattcgcaattattatttacaatatgaaacacatgttattatacaagccaatcttttgacctttcgagtcttggaatcccaaatagaaaattcactaaggactctcagaatcctcaaccagcgactcttcagtcgtgacgttcttcgaaattccgaccggacggcttgctatatactgttgcaccaccaacactgatgccaccgtcgaaacactttcgctttccgttaacaaattcccgatcggtccaagctcaggcgtgtcgcttcttacgtttatccctgacgctacagaaccttccggtgacttccccaccaagaaaaggttgcttttagaatactctttaataacttcgataacttcctcgtaacatttcacgattttctcttcgtaaatgatttgagattcagaatccgaattagaacgagaactttcttgttcttttatctttgctttaagttcggttatagcttcaatatcaatcaatctagttgcccctgaaccgatcagatcttcggttatctcgatcttcacgttttccggtttaaattcatcgctaggaataaaccgaacaacggttaagcttatcnnnnnnnnnnnnnnnnnnnnnnnnnnnnnnnnnnnngcctcacgatcatcattccctccaaaaaacaaaaccgttatagtcaacgagaaatcactagatgctacacgtgtcgttccaccaagcccacgatcaaccaaaatcgcaacagaacatggagattcctccataaccttcttgttgatccaacggtagtcattcctagtcgtctcccatgttctgtccagcctaacgtgcttatgaaacggaagaatcaccatagcggtttttttgcgttccgcgctttggcaaatatcctcatgtatagtcgccatcggtgagatcgctgtcatgggacgcactgagacacggctgagtcttcggaaagcctcgaatgcgaccacaaccatgtcggaagaagaactattgttctcagatttgtctttgttccagaaaggaagaccgtttctcctgaccttgtgtgccataagtatagccgatgatctctctgaaagctccatgagatgcatcgcgtagactgatagattttctttacggtttatgcctcgggatgcttctatgaggttaacgatagtagtggatgttcattatgctctggaaacagaacatgaggcat

SEQ ID NO: 29784 - DNA, 2202 bp, Arabidopsis thaliana landsberg
cgcccttgaaaattgtagtagagaggttgtaaaggcacttcttgagcttggagcttctgatgtgaactatcccgcgggtccgacagggggaaccgctcttcacattgcggctgaaatggtgtctccggacatggtggctgttttactcgaccaccacgccgacccaaacgtccagacagtggatggaatcactcctctcgacatccttcgaaccctaacgtcagattttttgttcaagggggcaattcctggattgactcacattgagcccaataagcttaggctttgtctcgagctggtccagtccgcggcattggttatatcacgcgaagaaggaaacaataacagtaacgataacaacacaatgatctaccctaggatgaaagacgaacacacgagcggaagtagtttggattcaagattggtttatctgaatcttggtgctacaaatcgtgatattggagatgacaatagcaatcaaagggaaggaatgaatctgcatcatcatcatcatgacccatcaacgatgtatcatcaccaccaccaccatttctaggtctttttgtagtccctatcatccttttttgataaccatcatcctttaattaagataaacatattcaatatctaattaaattgttgttatggtattctttttttctctatgtatatggccatgcgaacaaatttaaacgttaactccatggagtcatggagagtggaagggaacacaaacaaaagggtcatttatatatagatggataaagatcttgagttatatcttgacatgtataagcttgattaatattaggtcgttggatttacattattcaattttcttataatcaaacaatgcattacagtgatcttgatcgtagcatttcctttccttttgggtaaagtgaggctaaaaaaaacaataatagcaaagaaaaaaagccaacatttatggaagtgtcaatgtcatcaccactacaatatgtacattagtgtattcaaagacaaacaacaaatggtcggagcttgtaactttgtagccatatgaaaaatacaaatcctgcaataatataataacattacttctgctccgaaggaaaaaaatagtttggtgaaacttgaaaattgaagaagctttgtggctaaaataagattttctcaaaactagaggactactctacaaaattttgaagcactgtataggttttgcaacctagtcctttagaagagaggaaatctctttgacttggtcagtcataagtgtctacagtgttactcatggtcatggattagattcgcctgagcgtctccgtcttccgacgccgagctctctccgtcaataatgtccttttccggcgaatcaagttgcacgctttccggagtctccggaatttcactttcgttttggctatcttccggctctgaattcatcctcaaattctctcctctaacgagattcaacacaaatccattgtgtgttcttcccgtctgaagataatcgccttccgtgacagtgatgctatgagaagacgacgaagcagctacaatcgaatcgttctccgaagctctaatctgttccggatcaacggcgtcgagattctggacgtagtcagtgaacatctgagcagaattggtcctcatcaatggtccgccagatctagtccaatcttcagcttctggagaatcacattcgcttcctgcgtcataggtatggcttaagttactggttcgattactattcctcccagatccaaccacgatatgctggtacaaccgtgaagcttcagctaggacatcatcatcgacggatccggaggagttctgacgagctatacaattccaggaagggattcttttggaggcgttgaatctattggttccggccaaaagatgtttagatggtggagaggaagagatggcggagaaagcagcggctctttctgcgctgcgtttaaggcggcgcatgtggttaagaacggtgacgcactcgtcgagtgctagttcgatcccgaagtttgctttgattactgctagtttttcccaggtgcgtctccttccttgatttgctgccttttgaatctctacattgcttggattttgtatgatcttcaagtactgaacccggaaacatatagaacctctatacattaataattggattaagagtgaggaagttttctagttgggaatcattatttagtttac

SEQ ID NO: 29785 - DNA, 2703 bp, Arabidopsis thaliana landsberg
  unsure (1)..(2703): unsure at all n locations
tggatactcaacatacttgcaaaatacgaacagttttcttatcaatgatctttggcatttctttttttttttaacagataccttcatcttgactgcaagcaaggaactatcccaaacagtgtgtaggttatggcaccacaagtgtgaaatatgcatctaggaaaaacgtgggtgtccgcatatctgatgatgctctctgccaagctattctgcagcagatggatgccccattgatttgcacaaggtttatttcttctttaaaatctcgtcactagctacagagagactgtggactcttcgaccaagttgtgtaatgtatggtaaataatgacagtgtgaaagggcctaaagaaaatgaatggatgatcgacccaaccgcaataggtgacatatatggaccagaggtatttatagctctcactctttctcagcgactaaagaacatctttggttgctctattctctgtttcggtttccttttacagggtctggattttgtggtagacggaggtatannnnnnnnnnnnnnnnnnnnnnnnnnnnnnatgacaggaccatatcccaaggtcataagggaagggaaggtaatatattatctaaacattctgtgcttcatccatccaaggaccttaacttgaccgtgtggttggtttgtatagggacctatattgccgtggatggtggttgaggacgacgagtcttccctgcgccaagatcttatggcgtctggcacttaaaacagagacagacacagattaggtctttgtttgacatctacacacaaagacaccttgtagctggagaatatgaataatgtgaatacaattattacaaatgcgaattcaaaatccatacacaacaccggacacaaaaaatcgttacataaccaaatacacatgtatggggaagtggaagaccaagccaaagaataagatgatgaacacaatcatatatataggtatgaaactcaaagaacccagcttcttttcttggtgggatattttcgtaatatggtatcttaaaatcagttgcgggttttgccgtagagatttgtgtaaaccggcttcgtacgttgcacaaggatcatactcaaggcggccgcaatgaggcagaatccagacattatgagtgacgtcaagaagtaacagatggaacctcggcatctcaggacatcgtcaggattgaacaaggatccttgtgcttgcctctctgcttcgcggtcataaatggaacttgcgatcagccccgaaaagactaaggatcccgctgggttggccagcgtcaggaaattgtataaagctccaaacttctttagaccaaagagctcagaggcagtggctgggacgatggcccagtgagcaccatagccaagtccaatcaatagtgtgccgatgtgcatagctccaggccatccgtatgcaaagaagatgtgtcctactgacattacaagctgagccactgctatagcaaccggtcttgggtacgcatagtccctgcaaatcatttcgaaccacaatcaattccacagccaaatgtcattgtcattcttctgggacagtatcatacctgacgatgagttcggagaaataaccgcctccaatgcgtccaaggaagttccaaatgctaatcatggacacaaagacgtgagtgttatcgtaaccgagagactgactcatctgcccaaggttatctatgaccgttagacccgaaccagatccgagcaagagggagaagaagatgagccagaaatcggctttaacgagtgcttgagttaaagtaaaatcctcgcctctgtgagggcccctccgtctcttgacccgaacagcaccctctgcagctgcttgcatcagctttgcttgcaactgagcaattctcttatgtctctccactgcaggaagcaaatctacttcttttggtttctcgtcttccacttcactaaatataagctcaggaccatggtcaggggtggtggactgtcccggatcctgaccttgctgatcgccaaggagaggttcttcgagcgtgtcacaggggtcggttgatgctgtgaagcaactcgttgcgattggtatgaagatgggtacaagaagaatggcaaacaagacaacggtgaaagcaatgatgattgaatggctaagatcaatgaaatcttcaacaagcatcactgccatgagataggcagcaagtagaatgcagacggcatagatgacggtgaagctggtggcatcagaagaacggatctgtctgtgaccaccgacgggtctgatgaagaacatgagaggaacaacaacaactgaaggggcaacagcaaccatgaagatgagggatgcacggtcagaggagtggatcattgtgtatacctgggagaggatggcaccgccgaggccagcaaaccccttgaggataccgacgacaggaccacggctcttgggaaagttctgaacaccagaaactaatgcagcggtgttgaagtaggtctccccgttgttcccaacaaaaatgaggatacacatctgaaagatgacaaagagattcagattaagttgatgaattgcttgtaaaaggaacgtcgagcaaagaccaaaaaggatcccaggagatattccaattgcactttcacaatcttgaccagaaagattaatagtcaactggttttcttatagaaacagtgaaggaattcaatttccaagctacagaaggatc

SEQ ID NO: 29786 - DNA, 3238 bp, Arabidopsis thaliana landsberg
gtagtgctcgatattatatttacataagcaataattgaaaccgtcttgaattgaagtatacgactcatacacacgcgggattatatgcgtataacaccaagcatttaatacatgtttttgctatcgcacatgcacaaatcaaagtacaatgtagaacaatattttttgaaaatcataagttcgaatatatagtacaatttttttcattgcaatcaataaatttgttcgtcaaatcacttaagatggccaattatgtaataagtaagaatcttattactataagtcatagactagttactatttttctagctagggagaatcatcattggagtggaattcattgttttcttttttggtgcaactataatagatgggttttaagccaataaaattcttacatacccatatagtacactagtcataggtttcattcactgagcttaggcgatcccatatccatatccaatgaactactactacatatgtttttcattaaatagagaagctaatactgaattatcatcagtggttattatgactgtggtcataatacattacgtacaagacgaccacaatacatatattattttcttttaaaaaattgagtattatttctgaactaaactataggtcttgcgtgggaaaactacgtaatcgtaggggcatcaaactaataattaaatcataggttaaactacgataatatacccattcatcttcaaaggagatgctctgtactaatatatccaagaatgaatcaaaagatgccaaaatatatgtttataaacataaatctctgtttatatctctatcaatgcgtttcttgattctttcataattaataagagatatgttattgttatataaacaaaaataatagaacaagcagataactgaaccaaataaaattttggtaaaataaaacgctattctgcctaacttaagaacatatcagaaaacgctatgggcctattattgggcttgggcctaggatctttctgggaaagaaaacgctcatctttctcaacacaagtgaaatttctccagtgcttgcttgaattctgcaaatttggcggtctccagcgagagagagctattcagtcttcaaattctctccgttgagaaaaaagaggtacacttgtgtttcatttttctcggaaagtacgattttatttctattttttttggttctcttcacgaatctgaagactgatttttccgtctctgtcaacagctgctattttattcgtgtcgatgatggagcctccgaattcaaacagtgtctgtgatcgctttgtgactgggaatttagaccttgataactggatttggattattgagtactttgccaaattcaaaactgagctttggatgttaaatggtaattgaatttttaattgcatcagtttctttgaaatttcaatttctgagattttgttttattattgcaagatgtctttgaattggctcctaagcttccagattatttgggtgaatatacaaatgagatggtagctttcagatgcctagcttctttgtttggatctcatgttgtttctgttactctactactactactacctcaatgatcgagtttgattcctctgagagctgtgaatatgtactccaatgtatcttagatgaggtactaatctttcatttccttttcaatgtggtttcttgatcttacttagattgcttgattcttcgttttctagataccgttatcggaactgaaaccgggtgcaccgggtttaacgaagtggaatcttcaaccttttatcaaacacaagcttctttctctaccaaaatgtgctttggaactggtattatataatttttgctttgaagttccttttagtttgagagcactataaggcttatgtttgttttgttttgatcagatgattgaaccatcatcatgtgagaatgatactcaagtgtctccttgtagtgaggaagagactctgagaagtgatggcaaagagaatgaccgagttactcctccaatggatgagccagatcttacgggaagaacagaagagggagagtcattttctcgtggggctgatgagttgctcgatagaagaaatgccggatttcgatatgaaagcgaaaatgatggtagtcatttgtcaagtcctgtagagaaaatatacagatgtgttaactgcaaagaaagtgggaagctgttgttttgctctagtgatggctgtgaagtcatggttcatcagaagtgtttggattcaccaccttcttaccatgatgctggagacttttactgctctctctgcgctttaacctgtccttcagctgaatatgttcaatttcaagatgaagtggctaaagcaaagaggaaattagtttcgtttcttagactaatgtcagaggttaacaagaagaaatctattgaaggaacctgaacattttgtaggatgtaaagccttactcatatattctaagattgtcaacaaacataagatctctctttgttacaattttccgtggtagatatacaaacataagatctctagtctctgatactttctctgtgattgtttaaacaggagtgatctggtctgtaacagaagctaaaccatgcattaacctgacaatctcagtagtgtcatccaggtaatacttggccttgctaggcttttgaccgacagtacaagcgaaaatctcagctcttggggcaatcgaagggccttcagtggaactgcagatcacctcaaacatgtcttcgtcagaccggtcatctccaatacatagaacaaactcaggaagtgttcctctttcttgcatcatcgaaagcatccttctcgctataagtcccttgctcacgccctgcatgacaacaacaagaactaagaagactctacaaatggaaacatatgccaaggttttttggggaattgaactgaggagatacagacctgtggcttgacctcaacatagttctgtcctcgtttcactgttacaggttcattggcaaggacactttcaagatgatctagaagttccttagcttgacatgagccaaaatcagggtcagcatcctcataaactccaaacaagagcagtctccttgtcttcaattgttgagccatcggttgtctcggtgtagagttccatcacaggctcggcaatttgcttccaagaacaatctactgctgccacacagttttcccactctactgccttccttagcctgtgtagtaattagatggagcttgag

SEQ ID NO: 29787 - DNA, 1075 bp, Arabidopsis thaliana landsberg
aagcacacattggatctatagtacctgcttatagtatgaaagaggagaaaccgttttcttggcagcggacaatttatcccacaaacaaaaccaaaaaataatgcacaaagacacaactaaagatggaaggaaccaaacacactcacattcagtagtatgatcctggaccaccaccagagtaactactaccacccaagccacggctggagtaaattgaagaatacgagctacctcctccctgtaaatccaatactaaaatgttacacaacttgactttccaaaataaatataaaaaaggggaaagtgtgaagccacttacatctcttctgggtaagtcgccaccatagcttgacgagtacatacctcctacatcgctgccactataagaacctgaagaaagcaacattatgaaattatagccattgaaggcagtaagtgtatctcgacgaagtattgctctctgttaagccaagttctgaatcaaacctcctccataatccattccctgacgactgctgtatgggccccgcgagtcatgatttgacatagaatttcggctgcttccatatcctagactagacctaggaatcctagaccaaacatggaagtaagaaaataatacacttggcacagaaaattgctaccaaaaataactgaagctatccataaaaagagaacataccggtccccgtaagattccccatattgagatgggccaacatcatagtccagacggggtcttgaatgacgaacatcaacatcagcataacggggaggaaggtcatcctgaataatgaacactcgttagagtaaacaatcatagtctaaagaaacaaaattaagaagacaaactggtcggagaaaacaataagtcagaccagtgcagcatatggacgctttgatccaggaagaggttcataagcacgaggtcttccctcactgtaacttggaggtctttcaaatctcggactgtaagggtcatctacgaatggcctcctaatttcagagcgagaagaacttctaggaagatctgaataacccgaaccccggggtggataatcatctctgtaagaca

SEQ ID NO: 29788 - DNA, 738 bp, Arabidopsis thaliana landsberg
cttgtacacaaacaagctgaatttaattgattatatccactttcagaataaagtcccggatgataaagctgcactcaagattagtctcgaaatccaaactaaaatacagaaaacggattttggacgtatgaaactatgaatataacctaattgaaaactttttatcaaaaaaataaataaggagaaagtgaaacttggagcctaaaattaggagccactggttttggccggcaacgagaagtccacaatgcacagtaagcaccgactcagcaaaacacgtggggcccacaaataccactccatacaggatcttattaaagactataatactcacgtatcacataaacccatacatttgctaaataaaatgtgtgatgacatcttaacgaaccatgatctgcttatctatcagcctcattgataagtcaaccttatcatctatcctttaacaaatcttaaatgtattccaaagctgacactgcgtatgcatagaacatataacctctcctctcataatatgaaaatacccccaacgtattattctgtcgacaaaatatttgcattaagataaaacttcaacatcaaataccaactttttaaaatcaaatgactattcatcttctcgaaacataaaataaattcaactccaaaactcttatataactaacacaaaaaaggccaccttaaaacaacatcacatccgaatcaactaccccaccatatctcatttttgtccct

SEQ ID NO: 29789 - DNA, 619 bp, Arabidopsis thaliana landsberg
  unsure (1)..(619): unsure at all n locations
ctatacaaagttggtatattccttatacttaaagataagttttcgcacatgtttagataacgactagacataagatgatcctacatccctgcgatttgtaaacatactgaaaaatttggcaaaactaagtcagcctttagtttaatacctaaccctaataacgtatgtttgttatagcttcataataccatgcattgaaattagaaagacaaacgaaaaaagaagtttgaaaatattttacgagtaacgttaacttatgttctagaaccttttaaaggcttaataaatgctagatatttcacgagaagaaaatagttgttttgtattataccatgtactaatttaaagaaagaaaaaaaaaatcgttaccaaataatgaatgtacgtagtgttattttcatactgcannnnnnnnnnnnnnnnnnaaattcctatgcgtatcagaaatatacattggagttggatgaacaagcttcgtagactttctatattcttttctcccaaagtgaaaagtcctcaatagcgcccactggttgttggatatttcttttagtaagataattgctaggccgacttcatacatgccgcaaattcgttgcaaggacatgtataaggaatg

SEQ ID NO: 29790 - DNA, 1630 bp, Arabidopsis thaliana landsberg
aaaaagtagactttctgtgaatatcaaccgactcatttgactgtatactgtaagggatggagggcaatatcgaatacatgcattagaactaagaatgcttatttgacttacagcagcttgatcctgctcctcccttgaaacattaaaccggtgtgctacattttctgaagtaatacccattggaagaaggcaattgtgagcttgttcaaacttcttcacctaaaacaacagaatacgttctatgagagctaatcattcaacagagccaatcaatacactccgggaaggaaggagagagacaataagagcatggtacatttgggttgactgatcctttccatccccttggattagttgtcatggactccagcccagctccaatacctgtattcaacgtaatttcagctcaattcttcatgccaagataagacaatttatgtaaccaaagatagttactatcttaccaatgtcataaaaaccagcttttatggcagcggcaacatcagcaacagcctgaagcccagatgaacactgtctgttcacggttctgatgggaacagtttcttccaacagacaaaaagagcataagcatacaacaaacgaaaaagaagaaaagattcaggattaccataatacagaagaaaatattaccggggaaaccagcatagaacgcagccatcctgcattcactggctctctgagatcctggtcccaaaacagtacccactacaatgtcaccaacttcacttgggtttacattagttttctctatcaatgcctagcaagaagaagcacacataagtgcaaattggaaaaaggggaagccaaaaaacaggaaacagaactgaacaagacatactctcaatacagaggcaagcaactcgtctggaaatgtatccttgaagctgccacgttttgccttgcagagtgcagtcctttgtgccctgtgaatcacaagaagcatagaaaaaggttcagcaagtttccataaagtcttgctcaatatcaaaagaagaaaagaaacttaacgcgacaatgacaacatcatctccatattgatatgcagcactgtctttggacaagcaagctgaggccttgtgaggtagcaacacaaacagtaagagatacattgtaattcaaaaacaattcctataccaagatattactaataattcaaaaaaaaaaaaaacatcgaacaagagccaaccgaaatcagccttgagagttatggtttcagtaataaattcgtaatcacatgcaaacaattgagagcaattagcgaggggaaattggaaacagaagattcgaaatcaaagcatcggaagagcttacagagagagaggcgtcggaagatgacgaaggttgaagatgacgaagcagtatcctttgtctctccgttgctttttccattgttttcgtttgattattttgaagcccaaactgggctaaaccgttcgttgtaaagcagataaaagacaaaggaaaaaaaaaactaaaccgcttcatcccggtttaggatgggttacatacatatacggtttcagggtttagcggaatcaatcatctggttttgatgctaaacgacgtcctatagagtaagaaggtctttttttttcttttcaaaaaaact

SEQ ID NO: 29791 - DNA, 2675 bp, Arabidopsis thaliana landsberg
  unsure (1)..(2675): unsure at all n locations
aatgtgagaaatcaaaagctaggaaattacgtgcctgttaaattcgagctgctctctgttatgacctgaaaatcaatacaccaaaagtaccattggttaatagcaatgatttctctgtaatttgcagaaactactacaaatgttcagttgatggctgtcccgtgaagaaaagggttgaacgagacagagatgatccgagctttgtgataacaacttacgagggttcccacaatcactcaagcatgaactaagactcgaactaaggctcaaggagaccatgctatattcagcacatcttattttctatggttacaaacgatacttaaaactgcttctacttctttatattcattgtaaactggttgcaggttcacaaattttgagaggtttatgacattctaaatctgtagtacttctatagcatcttattcccccacaagtgagaatcgatggacgtaaaagtccaaagaacctcatatcataccataaactagcaatcttagaatatcaatgcaaatctaagcagataattaccagaacaattcccaaaccactaatgaacacaatgggatcttgccagccattaaggtatcaataatcaagaagccattcacaaggaagatatcacattaaaatcaatatgcattacaaagaatcatatagcggccattaccatgtaacattaccttgaatttagccttgacggcttgaccctcctggagtgagatgagatgaagcagacatgtttctcctgaagatatcacattaaaggcaatatgcattgcaaagaatcatatagcggccagtaccatggaacattgccttgaatttagccttgacggcttgaccctcctggagtgagatgagatgaagcagacatgtttctcctatgaaggctcggtatctgacgtcaagtctctactcatcacagtgattcctaaaggcagtatttacactcaagacggaaaatcatattcgagtcactggagtctggaataagatcaacttttttaaaagaaaaaagcatagatgaaagacgaaggccttgaattcgcaactggagtatatttataaaaaaatatatttctcatacaccttgataaaaccgatgacatatgcatctacttttttcaagtagttaaagaggagtcagtgaagcattttccaccatgaacaggactgctttcacatcaaaatgactggttcttcagcagagtgaggaaataaagaagtataataatatgccgatggaaatgctactatcacgatctttctgttacttcatttgaaaagaccacgtctaaatttcttgtaaatggaacagaggcagtagagctactcaaatcaccttcttgatggtgcctatcagatattatactccacaatgtgtccaacctctttctagttgcttgcgcatttgatacaatgatcgcctttgactctgaagcttgacactttatggttttgtcagtaccattggcaagtaaccagcgagatccagactgttgctgtgttttcgtacaccacagatggtctacaccaggctcagttttcaaacccgctagaccaatttcagtgattctccacaactgtgtatcatatccaaatgaatccgtatttcttccttcttgagccaaactacacacagacgaatttgaggaatccaacgacctttcaacttgaatcagagcaagcatagatgcaccaacaggttcattatttaggaatggatctctaagcaacacttgaaaagcaagagtcaacttgttccttaatgtaagatcttgattggcattatgcgctgatattttatttttcatttgcttgctggtttgatctttgttatctagcattccatggtcaagccctaaccactcatccaacgttaaggaaaaactcatcaactctagagcatcagactgatccatgatttttggtgcaatgactgatggtggatcttggtatgacatgctacattgaatctttaatccttctaccgagagaaggtatataacatcaatagctaaggaagcgatatcttcaagaggcacataaccttgacacatatcggatccaaagcccccacattcttcatttgaaggaaacaaatccagctgtcctgatggtttcagaaccacggcacctttactcttgtcagaagaatcatgtccagttctgtaagtcatgaaacaaaaaaataaaacatgaaaataatatctttttaggacttcgaaagtagaaatataatgcttatcgtataaacatggtggaaagtatctgaacctctcaaattttgcggcatcgacaacttcatgaattgtcttccccataatatcttccaaaggcattaatgcattaactccagagcaaagtccttcaattccagaagctgccaaactttgtagtatttcaaggatatcagaacctaattctgatactagcaccaccgggactgaaacttgcatgatcagttgtgatgcatccttgcattctttgaacagtaaaggattcatggaccggatacaccctcccccttttgtccaaacagaaggaccaatgttatctccaagtggaagcaaatctaatcccttgtcaactggaagctctattggacttccanacccatcagagcaaacacataaagagttctcaaaactgtgtcataaaatcacact

SEQ ID NO: 29792 - DNA, 4417 bp, Arabidopsis thaliana landsberg
  unsure (1)..(4417): unsure at all n locations
cataagcagttggcttactacactacttattgcctctaaaattttatttgggccaactccatattataatccaaaattgatgttaaataacaagggattgtacttggattatgactttgatttatatcggatttaacaatcaaagtcaacaaccacttgaaagccatctctctctctcgctgccatgaaatctatatataattccattatttgataggttcttttattagtttagacaagttgaaaattttctgaccaaaaaactagtaagtagtaacagatataagaaaaactatttcccactagaaacttattatgctaatgtgtatagacaatttcatttcgtcaatgaagtttctttttttcggtggagagactaagacatgtattcacgttctcagaggactgacttggtacttgttagggtctattggttgaaatggccaaagaaattatgtgctcctcgtcgcttataaacttcatttatagttcagaacttggaggcggtgactttctgaaatttgtttggaaattaagagactatggatagtttccatgggcttttgttggttgcacttgtaactttcgctataattcactttgttcaagctcaggaaggtatgtatctacattttttttcttcgaagatgaacttctctcttttgtcattcctatgatcaacttactagaaaaaagaagaagaaacaatttaactccgatggatttagcataactgaaaacgtttctaggatcgtataggcgatgtaagggttccacgctctgaaagtaaatgttccttgaggcatgaantagccctttcacaagtatataaatagcacttagaaaataccaagaattaggtgttgttccacatgcatagtatcttgaacaagtaacgacattctgtattgtggtttatatattagctaaatcattttgttcaccctttctcaaagcttcttttagacacatatttactatcacattttgaaatttttgtatccgtcctacctgcatctttgttctttcatatgcatatattataataaaaattgttgttcgtgacatttattttgtacaaccatataaatgataggaacttttgagattgcacaatatgtatctctgcggtatgattatagatgtatagttttaccgtatctaaaactattgttcaaaactggatcaaatttaactttgatataactagccactcacctaattgtttttagcttctattgtgttaaacttccatgattctttcttttgatgaatgtggttttatctttatatagggtttatcagtttagattgcgggttatccccgaatgaacaatctccgtataccgagacttcaactggattacagtactcatcagactcaaacgttatccaaactggaaaaattggtaggattcagagaaatcttgaagattactacgcaaagccccagacgacggtcagatactttccagacggaatacgcaactgttataatattacggtgaagcaaggaaccaactatttaatcagagctagagcagtatatgggaattatgatagtcttaacatttatcctaagtttgacttgtacataggcccgaacttctgggcaacaataaacattggagatcatgtaaacggtacaagagaggagatcacttacatcccaaaatcaaacattttagacctatgtcttgttaagacatacgatagtacaccatttatatcgagtttagaaataagacctctgccaaataacagttacatcaccacatctggtccgttgaagctgttttcgaggttttatttttccaattcaaaaaacgttctaaggtgagctagtcttctttagttaaaaggatctaaagcatatttatcattcatttgtgatatatgggcatatggctaataaattaaagattgtggcaatgaataggtacccaaaggatatttatgatagaatatggagtccatacattgagccatattggaatcagatatccaccagtcttacggtgagcaccaatagtttccgtcttcctcaggatgctctcaaaaccgctgcaacaccggtgaatgcaagtgcaccgtttatagatttcgagtatcaaaattcctctagtgataaagtttacatttaccttcactttgctgaggttcaagtgttacgggccaacgagactagagagtttgcaatttctgtgaacggagaagtcattgacgactcctacatgcctttatatctacaatcagaaacggtacaaactccgtctccaattatttgccaagaccaagaatgcatcatagagctttcgaaatcagggaagtctacgcacccacctctgcttaacgccatcgaaggttttgcagctgtagaatttctacagtctgaatcagatgaaaatgatggtacgttattgaatgttatagtactgcatgttttgtatgctaattctaatatattgttcaaatttatggtagtgattgctattaaaaacattagagccgtctatggagtgaataaaatctcatggcaaggtgatccatgtgttcctacgcactttttgtgggatggtctaaattgtagtaacacggataagtctataccaccaagaattacttcattgtgagattttctaactagattacaacatacttttctgactacatgtttcactagttttaattttgtatcttaacttataaaacagagatttgtcttcaagcgggttagggggacctatagactctggaattcaaaatctaacccatctagaaaagttgtaagtatgatcatttttcccacgaagatgaaactcttattcaatgaattttgatctccaaaatatcgaaatttcagggacttgtcaaataatagtttgacgggagcaatcccagaatttctagctaatatgaaatcattgttgatcatgtaagtgttttgatacttttggtcccaatactccatgtgttcactttcaccaatgtatgaaatttttttctccttcactagaaatttgagcaagaacaattttaatgattcaattccacaagctcttctcaatagagaaaaggaaggactgaaattaatgtaagaaaacaactccactacgtacacaaatttcattttgaaaacccctttcctttcgtattcagaattctatacaattgatgcttttttttttggcagtgttgatggacatggaataaatcaatgtctacctggttcatgtgtcccaaagaagaaatttccagtgataattgttgcactggttgctacagcggtggcggttataatcatcgtggtgatgattctcgtttgtgtcttaagaaagaaaaagacatcaagtcatgtggaaggtacatccaaatacttgtgatcaaatcaacatactactatatattattaaggtatcataaatatcattcttttactaactttttctttgtacatctattacaacttcagcaataacgccacgggcgaacttcacacccactatcatgtccgagacatcaatcgagacaaaagagagaaggtttagtcatacagaggttatcgaaatgacaaacaagttcgaaagagctctaggtgaaggagggtttggcatcgtttatcatggttatttaaacggttcacagcaagtagctgtcaaagtactttctgaatcatcagtacaaggctataaagaattcaaggcagaggtatgaatattttcttagaaaatctcaagcattatgttagaccaatgtgcttcattcattgtttttttcattttgatagttaaacacttggctctaaaaaagataattaaacacttcattcattgttgttttgtaggttgaacttcttctaagggttcaccatataaatttggtaagccttgttgggtattgcgatgatcgcaatcacttggctctcgtctacgaatacatgtccaatggagacttaaaacatcatttgtcaggtaaaaacatatgtacattaacattttaatttacttttaaaagacattttaattattacaaacaattcttttgacgattgattttgaggataaattacaggaagaaacaatggttttgttttgagttggagtactcgactacaaatagctgtcgatgctgcactaggtttgtgttaactcataatgattttattaatttatttttcacattctaaacatttcctaggatcactagacatacgtacataaaaggacatttgcaaaatattaataggattggaatacttacatattggatgccgaccatcgatggtgcatagagatgtcaaaagtacgaatatactgttgggtgagcagttcacagccaagatggctgattttgggctttcaaggtctttccaaattggtgatgaaaatcatatttctacggttgttgctggaactcc

SEQ ID NO: 29793 - DNA, 2998 bp, Arabidopsis thaliana landsberg
cattaatgagaaatttttcaaaggctttgatcggtatgaccccgaaacttcagggcaagatagatcaggctatgatagatttggataaaaactgaaaagaaggtaggtgggaacttttattaggattgtaacaagttcatggatcatttctcctcatgattaatttgatttgaatatcatgcagagtgaacttggggctaatgctatacttgctgtgtcaattgcggcatgcaaggctggagctgctgagaaagaagtatgaattcttcacaatattttctcttatcctatttatttcatgcctactttagttaggaggtcctgattgaagttatatatcaggtccctctgtgcaagcacctttctgatcttagtggcagagcaaacatggtgttacctgtacctgcgttcactgttttgagtggtgggaagcatgcttcgaatacttttgccattcaggtattctacattaagttcactattaacgtttctgtttctcaaagttcttcaagaaatcttttggttttcaagtaatttcatttacatatgtaatgattgttgtgttttcatatattgtttaggaaattatgattctcccaattggagcaagtagatttgaggaggccctgcaatggggatctgagacatatcatcatttaaaggtcaattttcaaagatatatggctttctagaagtaacttctctaattgcatccgtaaatttgtgtataacgtgagaatgatctactgctgtttatggcaggctgtcatttcagaaaagaatggtggtttgggatgtaatgttggtgaagatggtggccttgctccagatatctctaggtacatataattttcctctctgatgctaatctgcttgcatctgtagattgttgaaactgagaaaaccatgttatggtttgatggcttagtgcctaatatgtgtaattgcaactgtatgcagcctcaaggaaggtttggagcttgtaaaagaagctatcaaccgaacagggtacaatgataagataaagatagccattgatattgccgccactaatttttgtttaggtaattttctgcttcttggctaactgatttattgcggcttcttgtagtcatggataggttggtttggttctgggcattgtcattcacaattgactagtgacacgaaaaagatgttaaatcatgacatgtgtaacctatcaatatcttgcttttgcaagtttcaactatgttatacgtttttgtgtattatttcttaccttgtggaactgttctttcctgaacaggtaccaagtatgatttagatatcaagtctccaaataaatctgggcaaaatttcaagtcagcggaagatatgatagatatgtacaaagaaatttgtaatggtatgtctggctcgtgtgaacaatattttttgtgtctattttagtactcttgcagtattctaacgaccggattctctgtttggtctccttgggggtttagattatccaattgtgtctatagaagacccttttgacaaggaggactgggaacacaccaagtgtttttcgagtcttggaatatgtcaggtccaactcggttaccctactattaacggttcacatggattttgtgttctttcagatcacactgtcttctgattcttttctcagagtcaaatatctaaatagagagacccttaaatcttcttgtacaatcattttccttgtctgaattctcagtgttaaactcttgtaggtggtaggtgacgatttgttgatgtcaaattcaaaacgagttgagcgtgccatacaggagtcttcttgtaatgctcttcttctcaaggtatttcgtccgtcctaattttgtttattactatgtattacctgtgcacgtattgtatgtttactgcctaagaacgacaaagacataatgtgcatcagtgcatactgtgatacaggtgaatcagattggtacagtaacagaagccattgaagtagtgaaaatggcaagggatgcccagtggggtgtggtgacatctcatagatgtggagaaacagaggactctttcatctctgacttatctgtgggtctcgcaacaggtgtgattaaagctggtgctccttgcagaggagaacgtactatgaagtataaccaggtctggatctttttccaaactaatatcctcagtaccccttatgcaattacactagaacatgataaattacgtggagtaacctgcattggaattttggagcatagaaaaagctcttacatcagcttagcttttaaattgctgagttatgttgtggtatgcgactctttagcgacctaggcttaagtttcaattctttaacttttggttagtgtaggcttagcttgttactagatacaattatttccctcagtgggtaatgattgagtttggagcagccatgtacatttagttgctagatagtgttctcatttcatgtttagtgctcattgtagaaactactttattaaaaagctgaatcacagtctaaatgttcccgcagttgctacggatagaggaagagctcggggatcaagcagtgtatgctggagaagattggaagctatctctctaaacaaaatgcacatgtgatataattgttacacttctcgtcttacttcattgttctcgagtttatttctcacgcagacagatttctctgtcttgaaagttcaaattttttgttgttttggccaaatttaagaacaaacagaagtaatgagtgttaaacaggttttttacaaattgtaaaagcatccaaaaacatcaatcaacactagttcgtgaggttgcagaagccacaaacaaacgtgctttagggattcgtttcttctttttcttcaatattgaacaaacagatgaaaaaagttataaacaagcttttccaaattgcagaaagacaaaccatcttttgaatatctagtttagcattgccttaacatagtaaatccaaaaaacaactgaatcaagacagacatcg

SEQ ID NO: 29794 - DNA, 1812 bp, Arabidopsis thaliana landsberg
tgtgtttaaaatttctttgacgtttggatcatactcttctgtgttgcaagtttcatatcttcgtaattttagtggaggtagtcaaagctattatttcatctttggatagtctttgaatggcaggagttttgaaaaactattttgaaagtcttcaatatttcttagaaagagatcgatcgaagattacttcattacacctgacattgaattgcgttacatgttatgaaatataacaaaggaaatgaaacccttttgctatgggttaaagggtctttgaagtcagtacttgactaaaactatatgaaacatctgtatccagtatcttattttactctttattaacatcctcttttctctggtgcagcttttcccccaagggcccaagattccttatttgctacttgtgtatgacgctgaagaattttgtaatcttgttgctaatggaaaatttctagaaatcatctcaagagttcaggacagatacccatcttatacggtgtgctgcctcacgaataagttaatgtcctacgtaaagaaaaggtgtgtttgataaagtgatttggtgttatattaatgtttccgtcatcaagctgaataaaaccaatcttttagggaaaaggaagagtacaaaagtccgggaaattggagacggcctcctatcgatgaggtaatacattacctagtgatcatgtatgtagaggaaagcctatttattgctgctatgtttgtggttgtaaacatactcttggggcatttgatatgtatgacacaggtgcttgcataatcaactactcactatgttgaagtacattccagacactgtgtagacgaggctgcagtggctgaacatattgctggcctaacaagcagtctggcctcttgccaattcaggtaccaaaaatctactatttttatttctcttacagaagactttatctcgattgatgttggatggaatttttgatttctttcctcaatgaatcccgttagaccaatcaaagcaataatattttgatgaaaacctgtgaagtctaaatcatatacatcttcacgcgtttaacaacttaacgaaataaagatctaacattgggagctcatcacaaaaatgggcagtaaggcttgtcttgaaataagatctgtaaagcctcttatagtctttaaatcatacaaggctgactaccgaatatctgggaggtcaacattacgtagagctgtagttgatagatgaacgtgtggctaataatgtatttctctgcatgattttgaagtgaaactaatcatggctctactatgtgatgcacaggaagaaattaactatgttatcagtaagcgctaatggtgcattagtctccaaggattcagttgacaagcatttgattaaaaagagtccatggtaaagtaaagtagaacattttgaaaataggttgtgttttagtcattttgagtctgttcaataagtaaaattagcacggtatataggttaaaagcgttagtagcaataccaaaggtacagccacgatacgctttatcagtgtgaaagagatatccctccatgaagtctcttcttaaggtttatatggatcgtaacgaatcggtaagtaaaaacatgtcagacatacttggatttgagtttcttcttagtttgttgtttttaaaccaattgtgtagtgttggttaaacgaatgaagatgttcttttgcgtctttttttttcacaggttcatgacaaggagtttctactaaaagccttgaaagtacaaggtttagtggaaggagacataaggttagctgagatttgttcaaagcggatata

SEQ ID NO: 29795 - DNA, 3462 bp, Arabidopsis thaliana landsberg
  unsure (1)..(3462): unsure at all n locations
cttgagtgatgcatcaaacttttcttttccacaaacaggctgcgatttggagatgagcaaaagcagtaaccgcttttgaggcacgcctagttctctcaaaaccaagatatttctgatcttgttaccctgtgccaaagaatgagatatcttttcatacttggaactcttatcagcttctataatgactttgatgaaatcataatatctgctgagagatttgccctctctcttccccaagattttaggaactgtggaaacaacctcagtgagctcagagcttgaagctcctctggactgcaaaaactgaagctttgaaccaagggatgtcgcatcattgtctataagcactcttgaatcactcctgatgatgctggagatctgagaatcagtgaacccataacttctgagaagatccagaacggaatcagaatttcccttgttatcgaaactgactttcatggagatcgattcagcgacttttgtagctaaacctaatgaatcaacgaggtaagaaactgtaaagttgtgaccttttcgaccatctcttgagctcacatcagcagcaatagcagaggaggagaaggtattggaaaaagctgatccattttgaaaaagattcactgaaaccctcaaatggcgccatttctgcaactggaccaactttcttccatggagaatcagagaatacattacaaagacaatgcaaataactcacagtgtgctaaatctgattcaattcgagaaattgaataaagctctaacctttagagccacgaagctttttcgcttcgcagtttcctatatcctctgtgtctgtgtgggaagaagcctcgcctccgttatacatcggtgttactgcttgccgaattcaagttctggagctgaactgcgtgtcgctcaaattcaatcaaaacaaaccggatgatcaatataattcggtttagtcgactcgttcgatttactggaagcgattataaacaacatccattgacatggtcacatgaacgcaacttccacatgggaaagtcgtcatcagatacatgaagcttcatttggatacggttcttgatttcttcaagtgtttctatgctttcaaagcaaagatcgtccgattgatcgaaaagggaaaaaacatttggaactagagaccgaacctgactggtttagttgaaatgtgaaccgttattaactatttaagctaaaaacaaattgatgaaatgtgactgcgacaagaatataagtcattcgaaactaccagtgaccgaacctgacaggtttgtatcaaaactccgactaaaacctgttattctgtcagaactcactatacctttatagtttatactgttttatgactatctatctattcacgtgaacatattatatacaacacattctgcttctgaagtagactcaatcctacacgtactggctgaatgattcattccttctggatccaccttccccgtagtcttcgttccattgtcgaagcgctgtcatgttgacagactttgatgagatgctcatactcacctgattcaacaacatcgacaacagttatacagttctctgagccagagacagatttgagaaaagaaagctcataagcaaaaatcataccagctcgagtgcgtttctgaaatcctccatttttaaaactcggagatcagaacctccacttccagctggaggaactctgccttcagccacagcagcatctcgctcctaccataatatatctcatcataagcatatttttattctatagactagttttaggcagcataaagttagttttcttggtttaacacaaagactacttacacttttttccttctccactatctctatgattcgacggcgggcagcagtaacacatatattctgcacgcaccaaaagagcatgtaacatggatatatatgagcattacttatcatttcgtcagaccatagcaaaaggttaaaaggaattactaggaattttaccttaagatcgtttccagaatatccatttgtcatactagcaacctcatcaatatcgaaatcaggggacaagtcttcttttgaaagtatcaccttcaatatctttgatctactacgagcatctggtagtcccaccatcaacctgcagaagccaataccaaaaacttgttacgacatgtcaatttgacagaaagcttagtccaacaaggaagctatatataaattacctatgaggcaaccttctaannnnnnnnnnnnnnnnnnnnnnnnnnntatttgtggctgcaagaaccagaacacgttccttttcatttgtcctcagaccgtcccaatttattatgaactcatttttcgtcttcagcctgtaccgatgtagcatgctttccacctacaagacagtaaaatattgtaagacagtcaatgctctgactacaagcaagattcgcccacgaattgaccatgaggaattacctcgtccaaaaagataatgcttggggaaattttactagccaacgaaaagacagctttgacatatttctcaccctcactaaaccactgcaatattgagaagaacacaagtttgaacaagagattccgtgtataaattggtagagtccaacttttcaaggatattctgttacccttgacattgacatgttgatgaggttagcaccagcttccgttgccactgcctttgcaagcatggtctttccagttccagaaggtccaaataagagaattccgttacaaggctgtgtagagaagtacaggagcagactgattaggaagccaccaatccataacgttaacatctaaattataggagataaattttttgaggaaagccaaattatcagctagtattactaatatcgtcattacttcacaaaacttatgaacatgtatactggtacacacaaataaaaggtccttcacagatctgtcatcaattcgaggcaggacatagtgaaacaatatgggaatttcctaaaaccaaatgccgataagagaaccacctttgttaattgccccttgcagaaaagttcaggccattgaaaaggaagcataaccagttcctttaagatatctttgactttctcaagtgccccaatgtcatcaaatgtaacatcaatgtcactgggcagaattacatcacttagaagcctcttctcaaacacattttctaccacaatgtcctgaaagccacagagaaaattaacagttcttacataataggagccattgccataatgaaaataagtaaacaacaattcaattccaaaggaaatttgctaaccttgagagacttctttgagctcgtagaaccttttagatcattctgtaagagtcctattccaaattctatgctgcaaggatccaaagttcgcactcaatacaccgagacagatatttaagagcagtaatgcacagggacaagctgccaattacctttctcagacaaagtaaccttagctggatcag

SEQ ID NO: 29796 - DNA, 3625 bp, Arabidopsis thaliana landsberg
ttttcatctatttttattttggaaaatgagttttcttgtaataataattattgttttatttttggactttactttcatgaaagaaaacgactgggtggagaaatggacaattaattcttgggggcaactatcgtatgatgtggaaagttaattattgttaatttagtgggtccattgggcctaacgggcccttcttgaatgattttatgagaattttctactgtaagatattgtaagacactgtaactttaatgaatgggggatatacgatgttttattttattttaacaatccatcgttttatacacatgtttcgaagttcacaaacttcgcagacaaactaggtttgaatttttttaactaatattccaagtttttgtttgttttattaacctttccgtctataaaagaattaagagaaaagaaccataaaattaatgaatctacttagcaatattctaagatttgctgtctttaaataatgaaacaaagcttaagaaaataagattcttaatatttaaaaaaaatactatgaaatttggacagaattgctgagttttcttatttatgtacaaacaccactaagtaatatgtatcattagcttatgtatttttaccaagtttgagaggaccatacaactaatattatcacgaattctattattgcatattgcaaagtacaaacagaattaatgcaaaaatgttctttttaaaataaatgtcaagaatcatgacgtggcataatcgtgacgataacataactttgatcagaaatactcaacggtctagattgagtcctgagtttatggttcttctttatcttccatgtctcttctccttcctcactcccctcttccctctctttatctctctcaagatttgctctgtccagagctccaaatttcaagaacataaacactacacacaaaacactgaatacgatgttgcttggaaagagacaacgaccaccgatcaacagaaccacaagtctatcggagataaagttcgatctaaaccttcccagcgagtcagagccatcaaatcaacagaagccaaccgttgcgagcccgtacggttccaacggtcaagctgtaacagcagccgttgatcaaaaccgtgggttcttagatcaacggctcttatccatggtcacaccgagaggtaacctgaggagacactcaggcgatttctccgacgctggacatttcttgagatcttgcgcactttgtgaacgccttcttgttcctggccgcgacatctatatgtataggtattatatataatcaagttttgatcatagtaaaaaaatttagaccttacgtaactttcatattttgatgatgaaccacttttttaatgatttaattgtttcttgaaagtcggatttggcttatttgaatgatttatgatagttacttaatttgtagtttgtagttggagtattattggatgattagtgatgaattttgtgtgattaaaatggcaggggagataaggctttttgtagctcagagtgcaggcaagagcaaatggcacaagatgagaggaaagagaaaggtaaatcggcggcaccggcgaaagaaccggcggtgacagctcccgcgagagcgaaacccggcaaagggagagctgcagccgccgtgtaatccccattttcatatacattttagctatatatatgtgtggtttgctatgtgtttgtatatgattatgatgggtaatacatatataaagcattaagcgttaattaaccgtgattaactgtgttaatcaccctcgtgttgtggtgaaattagatgattttcgagggttaaattttacaagttttgatctatttgaaataaaatcaaatgtattatatatatgtaagacttgtgtttgttaagtacttaatgagaaaaattaagattacgaatttgcattgaatttatgtgggtgaggtttcattttagccttttaggagattggagcaagatatttagaatcaacgataaaaacaaattaaattgtatcatatgttttataacgtcgtagattacgaagaaataaatagaagcgtaattggttaattgattataggaatagtttttcaaagtttaagtgattttttaaaaattcaaacattaaactttcgtttatgatagtggagaattcattccaatttttcaatctcaggtcaactaaagttgatgtataagtttgtactggctgtagcattaatgtacatttatacacaaatgtataccaatatacatacggttttcgtatatacctataaatttttattatcatatgtaaatttaattaaaatagacatggtacggttaattagaatacgatgctgatcgagtcaggaatctaatgcctaatcagcatgggtcccagtatccaccaatcagaaaaaataatagattctttttcttttctttgttgtctttaaagttcgttacagtttcgacagattcctaatgacaattttgtgtgtttccttccttttgttaaaataaaatattttggaaatttttcgtttttatttctaacgagatgattaacgcaacatttttacattctgtagaatggtgtatctaaggaagtcttaagtttatattagcttaaataaaataaagtccacatgtgcataagttgtattttgtagaacaaattctctagtattttgttagattttaccatgacaaaattcttcatagtatcttctactaaagtgtgaaaacagaaaattctacgtattaacaatatatgtacagtatatgatattatatcacaaatagattgctttgtgaataagttttgtagtagcaagttgatattaaacattataaacgtagtatttgagtattagaatagtataccacttggccaaaggggcatgtgtccgcatcaaatttggccaactatctgaattctaacgtctatttaatctctccaacctagcatccacgctccttaattattgttttacgaaacaaaagctgtataattatatgttttttaaaactaaaagctccaatatttaaagcacgtccaaaatataagattattggcatctttctcgatcaaataagatggtaagaaactgagaataatagcatgcttttatctagtatttatttgatagtttattgaagttaagaagaaaaaaaaacccaataatcagcacaaaagaccattattatatattccacgtatacatatttcaaattattcactttattaaagacagttcttcaatacaagttttaacgtttaacatttgtgtttctaatctaagctttctgaaggagattaacaagctaagtatgcatgttttcacaaaatgatcatatggctaaagagaagtatgagctaacaactcgaaaaaagtgttggctgacatagtaacaaatagaatagagtttgagctatatatgtgttaatgtgtatggttttttgttttttaggaggggacaaggaataagaagttgtcccgtgactctatggttctatttctaaatgtcaaaaaataaatattgtaagtgtggggatacgactattaggagactttgagtacacgtgcatatatgccatctattaatgtatttttcctaatccagttgctcaataaaat

SEQ ID NO: 29797 - DNA, 2457 bp, Arabidopsis thaliana landsberg
aattgaccatttgggttaaccacagggtctcttacgagtccaaggaaggcctgctgcagcatatgatgatcaatggttaatttttgcaattgcctttggtggctacataagaatgtttgatgcccgtatgtacgaaaaggtttgttcttgacaaaagctaccaatgatcctgttatgtctctagcagcttgatggaccacctgtgctgtattcacattttcttatttacattgaacgtttatctttttctgatttggataagttgcttttatagggtccttttgaaatattttccgttggtggtgatctttctgaggcaaacgttgtgaaatttagtaatgatggaaggctcatgctgcttacaaccatggatggttttattcatgtgcttgactcgtttcgtggaactcttgtatgccttcagcctcccttgctcttcgctagttatggttttttcatttacacacacatgaccaataaataaactgtccacacactcttgtatagttatgtgactcttttgtggtacattgcagctgtccacatttagtgtgaaaccagtagctggagaatctacattggatgcagcctttagtcctgaagggatgtttgttgtttcaggtaaccttgagttttacctgattcggatgatgcatgcacacactcacacacttccttcatgtgaaataacttgttctgtttttgtcatggtttggtaggttcaggtgatggtagtacccatgcatggggtgtaaggagcggaaaacaggttggactagcaatacagccatagtttggtgtacatagtttgtcactggaaactttgcttttgtatagttttgagtgttgattggattattgtatgtgtaggtacatagttggatgggtttagggagtgagcccccagtcattaaatggggtccaggaagtcccatgtttgtgacaggctcttccgaacttgcttttgttatacccgacttatcgaaattgccagcttatgccattcggaaataggacgactatcacgtctgtgccatgtaaatgaggcctcatttggccttttggtttcagactttgttgtgggttatgccggtaacttatcccttgcactctgattaatatatatttgggtcttgtaacatgaagataaaccccaagtctttctaatgttgtaattcgtgtaatttacaagtttgactgtttctgactgattcttccgggaagcaatcgatctgactgagagctagggtcgaagttaaaatggtgggccggcacaatatttaagtaaaagcccaataaggtccaaactctaactaatttatagcagttaagaaagttggtttagggaaactttatgccaaactaaatttattctccttggcgtcttgttgtgttaatcctcaagcaaacgacccgtttctgtcgccaagtcaacccgacccgacttcgttcccatcggttgatcggccgggacctgattgcgtttagcctcccgaaatctacgggcaaagttgatccctctgggtttgtcatttgatatcctcttttcccgtaccgcgcgtttatgattctgattacgttcttggttgtttgcgattgatccgtttaggattttctctgagtccatcgcttattgaatcgtcaaggctttttcttgtttgactttggaatatcgaatctgctcaatactccaccaaattatcaaacttggtgttctttgttgctcaatactccaccaaattatcaaaacttggatgttctttgtagctcaattaccaaattaataagttgcattcttctttgttgcttgttagccttttcatcgagtttcgtttctgcgatactattttgtttaggatagtatggctgaaaaggaagtggtttctgcctcaactttagaatctaagatcactgaggatcatcatgacatctggatccgaggagcgatggaaaagagccgctcctccaacatcagtgttctgaaggatagattcatagctgctgaggattctgctctagtttccaaggatgttgcacaaaaggatattgagattctcttgagacgagtgaaaactgctacagctttattgacttacctgaaatctaaagcgacaactgtggctgctgccgatttggccaatctttcacttgaaactgaccagctccaagatacaatagacgaacatgatgggacttatgtcactgagatgcttcagcatgtagagaccgttacaggcgtcatggagtctctggctaggcgtgcttttatcgccgaatcagaagccgctatcgagaaaggaaaggttgtgctaagccaagaggaaattcaaagaaaggttggccaaatcgagaacatgtccgtgaagttagaggacatggaaaagtttgctcttgggaccagtagtattctctgtgaaatgcggcaaagggttgattgattttgcttgaagagacctt

SEQ ID NO: 29798 - DNA, 2491 bp, Arabidopsis thaliana landsberg
gcctgagtcagatgtttcgctaaccgttcgaagctgttgtattcttttttatgacccaagcgccaatgcagggcctgggaattataaacaacacagattgttcaaatttgctcaaaagaacagaatcttaccggaacaaaagaaactacgatgcacatatgcacacacctggtgtttcggtgaacagtatcgagcatttttgcagccgctacatagtttatctcctttccatgttccacaccaagtgcaaagcggagataaagtgaaacaaacaatatcaagaattgacaattaaaagagaattctcggcattcagtcaaacccatcaatcagttcataatacctccatgacccaatggcttgtctgttccatcgtgctttggagcctcactcgagtaaaaaggattagctcgaggcaattggcaacggaaaaccttcgtacttcaggaacaaaaaaaacagtactttagtgtaacaacccacttggagaggagacaaacaatacaaagatgcaatatatagtaagaggtttctttctacctccgcatagccttctctggggcacgtttccattgttcatgttgatcacgaaggagacaagacatagatggacacatgaagagaaacaatgtccgatgaaaagctgattccttgtctgttaaaggagcataaagctgccaaatttccacaacaaatttcataaataaaccgacaaaaaacatgcaaggaacaacaaatagaaaagtatgaaacttacttgaagtacaaattgcataggttcttcacatagatcgcatagaagtgacttccctgatggtaaattaactggatccaaccatgcctatattgacaaatatcaacccaaagaatcaatacctaagaacataaagaagaaacagtttttgattgcacaaattgaaagatgttttaacttagtaccggaacaccaccagctaaattagggaacagttgacgaagatttgaccatgcgaatttaggactctcaacgaaacctaacatcacaggttcataatcttcatcatcttcctcatcatcatcatcaaattcatccatatttataggttccaccgcagtttcatcatcgtcatcatcatcaagctgagttattcggaggcctttgaaatcatccatggagtctccgttgaagctactcatcgaatcttctgtgttgaatttgatgaaatgaagactgcataacagagcaaaggaattgaattctagggttttactctgtttcataaacctctcaaaagtatttggcaagaaacaacgcacaaatcataatctgttaatgggtcttttgcaaaatactaaactcactaatttttcaagatttagagctcaatactcagctaattacaaatcccagaattggtacgaacaaatgttaaaaatgagctcactagtcagtatcaacaagaatcaaaatccaaaagaaacttacaacaccaggcgatgatggagatgttcttcagatagcctttaaaggtcgaatcttcttctatcaatttaaacagcaaaattttgtaaacatctttcacgaagacgaagacgaagacgacgacgacgacgacgacgaaaggaaaacaaacgtcactctggcccaaaaacaaaccctagaatagacgatgtcgtttaacataggcctataatagactaagcccaataaagtaatataagcccataaaggtttctaaattggttacgaataaaagtataaccttatcccggacaaccttatccttaaaatctcaccggtactccaactcccgttcaccggagctctgactctctgtaagcgaagattctctgctctttagctaatttagtcgaatctctattatgggtctgatccagtttcttacgagaatctgatttctgattttataacttgatttctcgatttcaaatttgtgttcttgcaatcgatttttttgcaggtaaagaagaagggagaaatagataatgagcagtagaaacggcaatgagagattaagaacagtgtggacacctgaaatggatcagtatttcatcgagcttatggtggaacaagttagaaaaggcaacagatttgaagatcatttgtttagtaaacgagcttggaagttcatgtcttgttccttcactgccaagttcaagtttctttatggcaaagatgttttgaaaaacaggcataagacattgaggaacttgtttaaatctgtgaataatcttttgatagaagatggttttagttgggatgatactagacagatggttgttgctgataactgcgtttgggatgagtatcttaaggtgcgttttgcgttttgtttacttgtgattttgtgtcttcttctcagggattgatttgtttttgcttttgggttattgaagattcatcctgattcgagatcttttcggataaagtctataccttgttacaaagatctgtgcttggtttactcagatggaatgtctgagcacaaag

SEQ ID NO: 29799 - DNA, 2958 bp, Arabidopsis thaliana landsberg
atgatatttttgagcatatttctgatgctgcgaggattctacgtgagattaaacttcttagactcctaaggcatccagatatagttgaaattaagcacattatgcttcctccttcacgaagagaattcaaagatatttatgttgtctttgagctcatggaatcggatcttcatcaagttattaaagccaatgatgatttgactagagagcattaccagtttttcctgtatcagttattgcgtgcactgaagtacattcacacaggtagtctttttcttttggtctctctttatccggcatctagcaatagtcttttcatcttcaaatctctctgtgtgtatatatcgctctctctgtagatgaaaatcttggacacttgcaaaatgtagtgtatgtcagatttgtcttttaggactttacattctacagtactatctcatacattgatgcactgaattggattcttgcgggttccattgtctggctaaatgtttgccttttgaagtttgccccaatatatctgaactttaactcagctgtcgagtttggtttgttgtattatattatcttatgaatcttggctgttgcagctaatgtctaccaccgagacctgaaaccaaagaacatattggcttttgcaaactgtaaacttaagatttgtgattttggattggcaagggttgcattcaatgatacccccacaacaatcttctggactgtacgtttgacaagatggctctctaagagtcttttccttctcttaaactgaagttggtctaaatattattcactacgttgcaggacctgatactcttctacattattttctactgaatttacaggactatgttgctaccagatggtatagagctccagagctttgtggatctttttactctaaggtgttcatttgttctctatataacatcttttaattggtgtgttgccgcgatataacttttgatggatttggctttgtagtatacacccgcaattgacatctggagtataggctgcatttttgcggaggtgttgatgggtaaaccacttttccctggaaagaatgtggttcaccagctggatcttatgactgatctgctagggacaccttccctggacaccatctcacgggtattgattttcttgctaaacgaagtccattgagtttctacacatcttaagcaaggaccagtagtgatgagtaccctgcttttatgatgttatacaggtgaggaatgagaaggcaaggaggtacttaacaagcatgaggaaaaagccacccattccgtttgcacagaaattcccaaatgcagatcctttgtctctgaagttgttggagaggcttcttgcttttgatccaaaagaccggccaactgctgaagaggtgcttttcaacttccatattgactaactatctcaaatcttgaattctcggcttcctgattgttttctctctctaataatagagtatcatgcatttggggtttctattggagtgaatcactaaactactcttgtatacttgaatcaggcacttgctgatccatattttaagggattggcaaaagtggaaagggagccttcatgtcaacccatcacgaagatggaatttgagttcgagagaagaaaggtcactaaagaggatataagagagctaatttctagggagatacttgagtaccaccctcagctgcttaaagatcatatgaacggggctgataaagccagttttctctacccaaggtcgtaatttttgttgattacattcttgagctagcattgcatatcacacccagtccctgacattgatgtatactgtgcagtgctgttgatcaatttagaagacaatttgcgcatcttgaagaaaacagtggtaaaaccggccctgtggcacctctagaaaggaaacatgcctctcttcccaggtatatcctcattttttctgtaaagtctgttgtcacttgatctggtttcggtgatctcatctgtttttgacccccgttatgcaactgctatactagttgtatattaatatacattgacatggcaaggataaaaaagatggaatcataagaccgtgactatctgtttcttgtgttgaacactaatttctataaaaatatgtccttctgactctgtgtttgcatgctttcagatcaacggtcatacactcaaccgcagtagcacgaggaggacaaccaaaacttatgaataacacaaacacattgaaccctgaaactactcaaaacattccttttaatcatgcaacaatacaagcacaacaaagaaacctctcaggtacttttaatcactcatcctgaatccaacagcaatgtgtccaaactgacctctataaactgtaaaacatctatctacacgcagcagccaaaccaagcacattcatgggcccggttgcacctttcgacaatggcagaatcagcagagatgcatatgacccgagatcattcatccggagcactaatctccccttttcacaacaatctgctgcaacagtcgccatgggaaagcagcaagagagaagaacaactatggagcctgagaagcaggcaagacaaatatctcagtataatagatatgcaccagatgtagccatcaacatagacaacaacccgtttatcatggctagaacgggaatgaacaaagccgaaaacatcagtgaccggatcataatcgacacaaatctgttacaggcaactgccggaataggagtcgcagcggcagctgcagcagctgctcctggtggttctgctcaccggaaagttggagctgttcggtacggtatgtcaaagatgtactagttctccacctaagctgggctttcatcacacagaacattgtatgtttccatcttcatgtcataaaagaaaattgtctatgacacaaaaccatatgagcaaaaaatattttttttattaattgtgatccatcatttgtttg

SEQ ID NO: 29800 - DNA, 1139 bp, Arabidopsis thaliana landsberg
  unsure (1)..(1139): unsure at all n locations
aggggtagtttagtcattataaggagacgacgacctcttcgtgtgcgaatccgtcgtgatgctgaatattgtaatgttgttaaaaatgcgatatcgaaaaactctttaaataaaattttgtgtattaaattaaagactaaaaccttacaataattgccgagaaacaaaaaagtgttaagattagtcttgacttggtgactcgacgaagccccttgaagcaaacttttaaagggtttagttttaatttctctatctctctttttctctgggtctcttctctcttcaaacattntatttcaagctctttgagaaaacactttcatggaagcttgaatatcaccatcaggtacttaactctgcctcttcttccctcttcctctctgtatctacttttttttcttctacaagtcatgcaaggaactagtttatgaatagaaaatgataaagtttaagtcttttgtttaattttgatctctgattatagcttcaggatatgattctctgtttgtgaagaggttaatgaatgagttcaacggtttcgtgtgcttttataaagatggcgtcttttgatgatcttgttgttgtttttcctgattattgagttgactgaattttttagcttcaggaaatggtaaaaatcttagtctgaaatttcgatccttgatatgtagatttcgttcatgtcttgtcgattacttgtttttttgttcttgtgattaatgaaatttgggaccatatcttaaagttcttagctttttgttctcttatggactaaggttttgctctatgtgtcaggtgttgtgaaatttactttgtatgatatatagaaacttgattataatagaagtatgacgactacgcagagcgctatgagaatggttgagggtgatcatataaaaaattggcaggcttctagtgatagtgggatctttggttcacttgatatggctgttgaagatttaggattccttatgaaaagaaataggttggatagtggtgatcaaaccggtaaattccctagtagaagcgaaagcgcgccgcctagcatggaaggttcctttgcagctcttaggaatctcttgaaacaacaagaaggtagtagctctgaagttttaagtagggctattgagaattatgac

SEQ ID NO: 29801 - DNA, 2164 bp, Arabidopsis thaliana landsberg
tttgcccagaaggctttgttaccagcgacattgtaggtgacttttgcggaaaaggggttctgttcaggaaaacagaatcttccctacccgcttgaccacgtaaccctaacatagaaggagtaacttctgaaggtctgctacccatgtaggcttttgcaagctgtgctggcgacgcaatgcactcatcgagagtctggtaaggatgtcatcaacaacaaaaagattaaacaatggcatctagcatgaagctcagcataaaacagactagtacaactaatatgtaacaactttcttactctcaaacttccaggaggtgttgaaacaagggtgttcatacttccattatctggatgcgtcctatccctctcatgtgatggtggatgtctcacaaccatacccacttcatttctctgctcctcattcatagtggatgaatcagcagcttttgaacgcaacaaggtagttaatcgatcaacttcagacctgtaaaatcattgaaagtgatcaactgattttcaaaacacaatgtttctttctagttcaaaatgtgaaaatgcctataaatgttgacatgagcacaccaaaatgaaacaaaaaagaaggaaaaatcataggtctttattatcaactcttctattttatgaatgctggatgcatcaaaagattaagacacttttcaatcctcgaaggaaaattgttactctactaggttatatgacctgtaagatagtatataccttgtaaaagtttttccctgtaagattttctcaagatctgtaaatccatccttaggtggatcgacagaggcattggtatcttccatccgaatcaaaccattcttcatggacaacttcacacagaacaaaacataggtttacactacagaagataaaagaacaatgaaaccgaaaggaagaagatatttcatcaaaagatgcggctcatttacttacattagagacgtcctccttgtgtccaaccttcgtctcctgattcacacctgatccatgataagagaaagagtacacattaacaacgtcaacttagcaaagtggaaacgaattccatacatgactgctaccaatacataaacaatctctaataccacaaattcaataatagacaacctggctaggtacttgaagaacattccaacaacgtttatgtacttattagttctgaactactataaactaaaatgaataaaaaaaaagcaaagggcaaatccaaacggtaaaaaaactacagttcctaaaaaacaatttctctaagaaactcagaaactacaaaaagaataacttttggatcgaaaaaatcaacaatcttcttacctctttctggaagctgcttctgctgttccggcgattgtaaaggcgtctcaccagagccgaggcgtttccgggataaggacccgaagagcctctgagcactataagtaataagtctctgcgccggatccaccaattttgacaaccagccgccgcctctgacatctccgccaccaagtccagcgttcctcacagaagtcgttggtcgatcataaggagttttctgagacctacgagccgtcggcttccggaactttcctccggttcccaatccgccgccgtatggattgctgctctctccccgtgccgcgctcgccattagccaacacgaaaactgagaacgaatctagggtttcaacgaacctttctgcgtaaggtaaaatcgaaaacttattgagaaaagagggaattgaaaaattttaggtgaaattagggtttttttctaatttgtggcaccaaaatcgagacaaagagcaaacaaaaaaaaatgactagggtaccaaaaataattttaaaaaacaaaaaggaaaaacgagaggagcgtaaagcaacgcaccttaaaaagggtatattcgtctttccggtaaagacacactagcgataccgactgtcacgtaaaatacgaacccaagatcattttcagccgtaagattaattgatccgatggttaagatttagcgcttgacaatactccagtcacactaataaatatctccaagtaaaacggtgatacttagtgggctgggctttagaggacaacatgggccctacaaccactaacaaacaaatctccagtttagaaatgtgtaaaaattcgaggggatcctctagagtcg

SEQ ID NO: 29802 - DNA, 1325 bp, Arabidopsis thaliana landsberg
cacgagggctagtgactttcagcttcgttgttcggcaatatgtacctggtgagctgactagatcacatgtcctatcagcaggaacgtgtttatatgcaggtccacatgtatgatcccactttaccgcaggaatttggtagttatatctgcaatgtaaaaactttttaaatcatccacaaataagatttttcattaacttactcggtctagaaagctaacagcttacggctcacaaaatcctgttgttttattaagcttggcaagcgggcaatatgcgcctagcggacacgcttcgtttgcataaatcagagaataaacaacaatgaatatgttagattaaagttttagtacttataatgttgatataacatatatgtatgtaaatggatatcttacgtatcatgcaagcaagaccttgtggacaaaagaaaccctcacaacaaggctgacatttacgagttctagatggaagaatttttccattgttgagatcaaatcttttttcatcatctgcattgcaactccatccaggctcacatccggaaacccatttagctaaattgcagttgatgttaggctttacatgaaccgttgttgcttcatctcttctaacaaaactactaaagtagaactttatctccgcagctgaacatagtctaagtgtgaggtcacctgcatatcacaagaccattaaatctcaatgttcaagtatttgaatataaaaacataaccctttttatgttgtttaccatcatttttcttgacacaattgcttaagaagtccagatttttatcaaaattaaatgcttcattccaatcgcccttcctgaattatcaacaaacgatatgagaaaaatgtaaaattcaaacatgggactacataagcggattttgaaaagacttacaaatttttgatgcaataacctaaatctcgatcaacgtcagcctttaagacagtctttagattctgaagtcgagtatagataaggtttgtaaccgaaacaagagcttttgggttccctgttttgctgtaatcatcgccatccagagataatgcaaatgacataaaactcaagccaaagacaaagaacaagaagatgtgttgtgtccaacaaacatcaaccctaactctcattgttcttatatcaaagtcttgcctttaaatcaaaaccttccgaatcgaaatatctgaactttctgacctaacaatggaatagatacattggaagctaccaatattagaaatatccttagagatgtcttgtgtttttctatcatgtctcgagaaaaccatgagtgttcttgaaaatgaagatgaagaatta

SEQ ID NO: 29803 - DNA, 779 bp, Arabidopsis thaliana landsberg
cactatatagtaaagatgcgtagtagcgttctaagatcactgaggggaaggttggtcataaatttggagagtacacggaaactcagactttcgagaacaaatattgtaccgggaagaaaaaagggacagaaatccataaagtcaaaaaatatggcacgaaaaggaaatccgattttggtaagacttggaaaaaatcgtagttcagattcaagtcggttcagtgccgaggcactgttagggtgtttatacttttttatatatttcgtagccccaacattggggcctgttctgtttctactgcgattaatacattttgtttgggggctgaggttgggattgggaaatgagaactttcattttggcgttgggcctgatggcggcgcgactggtctcgatctcaaccagccgccccaagagcagcagcccaccctaggagtcaatcgtgctgctctcgatctcaacgagcttcctccagtacatttattgtacgcagaggtcgagggcccccagtctacgaaggcgcaaaatgacgtaatgttagctcatctaaatcaagtacaaaacttaactagggacctccagactgagcctaatatctggcgtcgtcaggcgttgatagatatactggactgggaggtcagaagcctccagcgccattttcgtatctttcgccagcgagatcgactcagggaggtccaaaagtcctggttgcgcgagcagctaaatcgctatcgataaaatttaaaagacaggccggctcccagactacttaacaaacc

SEQ ID NO: 29804 - DNA, 3089 bp, Arabidopsis thaliana landsberg
  unsure (1)..(3089): unsure at all n locations
aacctgtctcaggaaacacagacacaaacctcacagctacacggagtctcaaagtatcaagcatggcttctgaaaaccatcctgatttatgctgcaaacaagaaacgaatcagatcataagcttgaagagtacttgccaaagtttatttattggcgtagatgcgtcactttgtctgagcttaagctttaattcaacaggcaaaagaccatgattcatgggtattgatttcatgaaaaaactaagctgagaactcacactacaagtagtttgcttgggaggctttcttatctctcgctggatgtactcgtcgtcaagttcaaacaactgcagaaacgtttggcatttaaaaggaaataacttaaaagcacaaatgtcgttccagcttggctttgagctgtagcaaagaaaagaaaaaacatataaatcagactttttcctgcataaatccaatggttcagctgcaaaataaatcatgcttaatctattatacaatcctacaacaagtatcatagaatgctatagagagaattcaggcttaaatctccaggaggctgtgtcagtcatgcaggaagagttaaccacagaaatagaagaagacttacttgttagttgcattggtatcacaataacctcgtaattcaggaggaaccctgaattccattctctgatatctgaaacacaattattcaatggagatataagtgaaaactagtcattatgcacccatctgtgtgtattaccatttcacctaaaaaatgtcacaaaccatacaataagaatatacaaatcaatgtcttaaaagataacttacacacgagactcaggatcattccgtggatcatagcctcttttaatccagaacctaagaaacggaccactggagaaataatatgcagctctgagcagaaacctacagagaacagaccaaattgatcaatatagtactaaaaacacctcagtataagaaccccgtattagaaagctatatcacctgtttaacatatgatgtgtacatttaagacctttatcaagtagtcgttgaacaacagaatcccttgtccatataggccgctcctcaaacaatgcagacactgctacctgccattgccagtggttggagctgcgagaaacaaagtcttcccacttcagtttctttgggatctgtattgaaagctaaggacagaccaagcaaatacagctctttctactcgccagataagaaaatgtcaaagaatattagaagaagaactagcatataagaaaaaggatatctttgacgctgaaatcaattgcaaacactgggccaacatcaatctgcatcatcagtagatcaattagcaaatggagaagtaacaaccacaagtaaactgtcatggaatctttaacgatcaatataaataaacagaacagcagttccctcaatgttttaaaagtgtgaactgcgagcttttacatgcttcagaatcattaactctgcaactacaggctttagaaaaaacatttgcaaactaccgacattcctgtaagaaaacctaagcagaatccacctctttcaagtctcaaaccttaccgttacagacttgcagtaattaagaattccattttactagttacagaaaaagaaaaaagcttgccatatctgtagattatatgtttgagtcaattttttccaacagtctgatttaagtttatccagaaacgtcaaatggtttcatttcttgtttttacctcataaagattctgagttagttcctcatctttcttttttgggcttgatgttactggaagtctcagcctgtgaatcaaacaacgaaagtagaattaacaatagaacttctaaaattataatcaactatgttctccttcattcttagttataggttgttttgtaggggaaaaataaaaaagttaatcttacaccaggttgtctggcctatctttgggtgaaaagaactgtggcaataacatcattacatcttcatcagccatgtccattagatcattttttcntgcatgatactcgagaggattcattttaatttatgttattacagctaaagatttgcaatataatgaaaaccaaatgaatggagacaaatcacctgcaagcgacttcacctccatccattttctcttcttctgctgtgcaatatcagcgtgaataggaattacatgctggtagtcgaccatgccttcgcaatacccacatgaataagtatcattttaagccaaggctcactgtataagacaagaccccagaaattggagaaaagtattcttaccatcaaagcaatacgattcagacacacgagctacaatatccgcacatagagctgggcgcacttctggtaagcatgcatcgctagtggaaataacaggttgactttcaggcagagaatctttcttaacatcctccttcgaaatttttaacagaaaaccattacaatgacgtcgttctccataggcaggatgtgcagaagggtcttcagggcggaaatgcagctcaagcttatttgacgttgattctcttgcctaccaaaaaaaaaaaactttcaaagtgattaaaccgtccaacacttgtgtacaagtttgctactaatcaagtttatgttttacttgtcgaacattttagaaatgtgaccaatttgctaaatcatggaatgcaccaagcaaaagaaacccaaacaacgctacaaaatagctatatggataatcagcatacaaattagggattcctagtaataactagcaggcaaagaaacaagagtcttaggaaaaggctttacggttgtgattccttggattcccccgagagtctccacggctcgggaaatagatgatggatagccaggatagtgaaccacaaacgcctccttgctaggcaagttacccgagatagttccgttttcaatgattcccattgtctctatccaagttgaaacttgctgtgatacaagaatcaaaagagataagttattacctaaagtggtagacttttattcctctcataaatcagaaaatgtaacacgaacaagattgaaagattttcactgggactatccaaaatcccagtgaatacaataacata

SEQ ID NO: 29805 - DNA, 2280 bp, Arabidopsis thaliana landsberg
cgacaaaggccccccacacccccgatggctggtcttggcgttgactttcaagaactgaaggagaagcttctcgaggcttttccagtcgtggtgaagcgcgtgtgcctcaaccatctcctccatggatctcttgaaatcagagtaagggtcgtctgattccaaggagaagagcatgaagccttcttcttcgtcctcttcttctcgcttgctcgtagcttcttcaagtatagagttggtttctcctttgctttcgaagatgagtctctctgatgatcttagcccttttatcacattctctacggaatctgtaatctccggtgggtcgagcaggtcgagctcatcgtcgtcttggtcgtggatagggttggtgaaagtgatggtggctctgaaagataaggttttagggttttggttacaagaaggccatggccatgaagaggatgatgaatttgaagaatatgaagatgttgagtggttcttgtttagaaatgggagtttcatatttttgtttttttttctctgagaaaactaagacaagaaactaaatttggttttcttgttttagttttgtttgtatgttttggggattggattcaaaaataagaaagtgagagagttaatggagtgagggagggaagattttaagggtttgaaggggagaaggacagagaggaatggtagggtctctatttctttacatgttttaacgtctatgaaatttctttattaaatgtatttggttgttgtatttaattattggcttcaaaatttaatgttgtttggttggggttcattcaatactataattcagtaccttttcccggttaagctgtttacgtatttattatataatgaatgatactttcttgttttcgtttttccattcatcgtagcttcttcaatctgacttaattcacaaagtatgttgaaaggattctacatggtttattttatcatttagaatgtaggagcatatcacaaattattggttttgaatccgactgatatttaaaaataaaaattcgcctaacatcgtttactgtgttacattattgtatgaataaaaaaaataatatcaattgttttgaaagttagctaagtgtcaatgatcgtgatttcaaaaaagataattgaagcttccgtacttggggactacatatatgttattgcacgtggcaaaggaacgtaatcgttatttctaaagaaagacaaaatattaggtcacattaagatagttcaatttattattttaattaatttagttccattctgaatccatgtctacagaagtaaacatctataatggatagtcatgtaaatcaaaaaccaaaatcgtatcagaattatcaatactatttgtattcaatttttgtatagttactattctttgaatttgaaaccaaaatacagcaaaacccaaagagaaacgaaatccaaaaatatcaatcataatttagacgtcaaacataagataaatgatttaaatggaaaagaatgaaacatagataattatatactccataacaagaaaaactcaaccaccagttaaaccaacgaatcaaccaaccaactgaccaacaaaacaaaagatatgaggtcaattttaagaaattttgtaaaatcagacaatatccaaactttgcaataatgttgtatttaatactaattgttattacacgcctcctccccaaatcggaaacattttttgtgtttctctttcatggaaactgctcgcacctgaaacctatttacatatatttatctataggtttgcatctgtcaatatattacgtataatgtatattgcatgttaacttttatgtcaataattctagaaatattactacatgtaatgctcgaaatagatagtttaatttctcactgagaatgattcttgcataaaaatagtataactgaactgtgaatgtatattgttttctgtagaatgcagtagatcatagaaataattaaaaaaataagtaatcatagatcgtatcggtgatttatattttataaaaaaaggcaatgccatgtgagtctctcacacaaatcacaattccattttgcacgtaactttcactcacgtgcctctcacgcgtcgccagtggagagattgcgacacgggaggagagatatcaaaatcattatcatatcaaatattaaaaagctaaaaacatctcaattgacaaataataatatattatatataaaagtagaagcttccaaataattatagaactaggagcggagagattagacaaatcatgtggatttttcaaa

SEQ ID NO: 29806 - DNA, 2834 bp, Arabidopsis thaliana landsberg
aaagagtgcaagccatgattttcacgtacggtggttgccgacaagtaatttagctaaatgtaagaaatagtgcagttctattaactctgttccttgttattttttttttttaacttcgtatgttttagaacgtaaacgcccatgcaattacatgacaaataagtccgcaaagcatcttcttttctttctagaaacctaaagcaattatatttctcatctatcgcaaagcctgtctatgtagctataacagttttcaatatctctttccaccatggataatctcgcatccaactcctaatttcaccactccatatttcactttcgtaccatgcacacaaaagaaaccctaattaatcagtcataacttcctccaccaactcaaaatattcattcttaaaaagaagaatgatgagaaccaaatccatagtcatcaattccaattccaagaacgatacttccaccatttccgcaacgacagctctgagacgttcggcctcaaacactaccccctcagctgcagtggtacgcacaaatgatcttaacaaaaaaccgcgacctcggtcagtagagttcccggcatctcctcaactagtacaaggtgaagagatggtccatttcggacatccccaacacgtgttggttaaagttgagttgccggatatttacacgtgcgcagggtgcaaagaagagggagcaggggttaggtacgtgtgtcaagaatgtgattatcagctccatgagttttgtgctttggctcctcctcaactcaaatcacacccttttcattaccagcatcaacttctcttctttgccaaacctggtacgtttttaattattactgtctttgatatccttatttgttagacctgaggagtatttttggtattaattacggaaatggctcaacttgatcggttttatttcttccgacaattttaagctaaatgtcctttgtttgtttttcagccaagaactagactcacgaaagtatataaaaaaaaaagccctgattatatattgattgctttacatagaataattttgctttgctttaaatatttggtttagtgggtatcaacattaacaagattaaatgttggttacgtacgtagaacaacagagaataagcttcctataacgccataaacataatacttttaactccagtacgaaaccgctgatcctggaataaaatggagacgtacaccaaaactaagatacttaaatgattcgaggacaaaaatattattgataattttatttttatttttatgatgaataacagcgaaaggagggatagtaaaatcgaaatgtgacgtgtgtggaagatcaccaaaaggttacactttcagatgcaaagcttgcagtttccaaatgcatcctggctgcgccatgttatctccttccctctcctcttcctccctccatcaccaccctctccgcctcctcccctcttcctcagcaggtagcaccaccggcggagactccggaggattcctctgcggagagtgcaagagaggtaagcgaacggggagggtttaccgttgcaccgtctgtgattaccacttgcatgccgtttgtgccaaagacgccgccgtgaatggcctccgagcaaacggacataaagggagggataagtctccggcagttttgggaacggcggcaaggttggcgtcgcaggttgtgattgattttctcggtggtattatcgatggtcttggcgaaggtgttggtgaagctattatagacggtgtgactagaggtggtggtggtggcggaggcggaaatggcggtgctactagagtaatcccacgtgtcagaggagggtaatggtgaaatttgaggattgtttgattaactaattatgtgtgttaattatgttttgtatgtggagattgctatgacttgatgatgcttttgataagtacatagatgtgcttgtatttattgagtttgagtttgtgtgggggatatattatgttgattatatttggggatatttacaattctaagaaaatgtgtatatgtttaattagattggattgataagtaatattattttctgttgtttgtgttttggttttcattatctaattaattaagaagtagagaatgccttgagtttcacgtgtatgtgcttaactgaatacaatacattgtaatttgtaagtagatcaaacgcatatatagctagtacatgttttgaaaaaaatatgaaaatatatataattgtgacttttattattacatatggagaaataaaaaggaaaaccaaaaagctaatacctaatagcatcttggaaaagagaggaacatcaaacttaactcccattcaaattttatatacaactatataaggagaaatgagacccaccactcacattttatttcaaatttattcaatttgtttcataacattttaaaactttcattatttttgagtcctatacataagcgtcaaatatgttaggatttcacaccaaattttttaaagcacttgacactagtaaatgtcttggatttaagttgaaaacacataaaacttaacaaaacctacatacaatttttaaaaaataataatcaagagttgcttaacttatagccacaagaatagacttttgaaatgtaaacgttacaaacgatttcactttcattctctctttcaagagttttcttttgaaaagtggcattaataaaatctcacactataacaaaatttcaagaatcttttacgtctgttgattattaagcaactgaatcacactaattttaagaatcttttacatgtgacaaaagaaaaaaaattgaatataaagatttcgtgacttgtgtga

SEQ ID NO: 29807 - DNA, 2391 bp, Arabidopsis thaliana landsberg
  unsure (1)..(2391): unsure at all n locations
gttgttttttcccaaaaaaaaaaaaaggaacccaatttaggattctataaattcaaatgagcagaaattgcgaatctgaattacccgatgataccttgtttgttgttggtaatcggtgaatctggtagattgctctctctacctcccccacttaaaatcgcaagccctgaaagcaagagaagaaaggtgaagacgatttgttttagagacgtaccaaattaatcgaaccggtttaactaatgaaccgggattattttcaaaatgattttatgtaaaagaatttggtcaacagtgaaccggcataattctttttctcaaggtcaacaacagtcaacagtaaaataaaacgatctagtgagcaaatggatcaatccatatgcaaaaatgctcatgtcccattgaaatccaactcacaaataggatttggatggttgagacagacaaacagataagtacttatggccattttttggagtaaactaatgagcaacggtttgaaatagacagtaggaggagaaataacatttactagtttgtgctacaaaagaaactacactcacactatgaatttattgatatacaatacaaggaagatcgtattcatcagttccaattggtatggatgaccaagtaatatttctttatactatatgctattaggtgaaatagacgggagcttctatcatagtatatgaaacaatattataagtctaaaaattggagtgaccttactaagactacacattcctaacattatgcggcaaaaagaacgaacttctcctgctgtctatttacaacttcaacgaaacttcctacaagaattttagcttcgacaatagcaaaagtaaaataaccggtctagggtttgtttttgaatgagttatacacattgatctcctgcttcttcacatcaaccatttttatggccgtgcaatgtcctaattttggggccttgagataagtcttcaacgtgggaatcaaatctgagttctgaaggtggaatgaagcaatctatagacaagccagggacattgaacgagatttcatcgatgacccatgcttcttgcattgtggtcttagtgttatgtcctgatgacatatctccaaaccttaaaagcgtagccacggatctaccagagtgagctatcatgataccttcgacaggtttgtagtcttctaggtatgagttgatggtcgtctcccagtaaaccgcttcgcctccattgttttggattcgggttagctgggagtcttctaagtgaacaagcagaccggttttttggctgaagtaaccgaacaacgtatgtcttatggtctctgatgccccttcgcttctagctttgagtgttgccgggtctgcacatagcttgagaatgaaacagtcttctccatcgatctttttttctcctatgcaccttgcatttgcaaacatatacgctgtggtcctcgggtcaagtccctgaaagttgacaacagtaacaattcagttatgcaagcaaagaaaagtgtatgagaaggcttccttgggacaagaggcctaacctgcagagcacgtcgtaatggtctaaccggtccttttgcagcatgaggtccaagccatggtgtgtgtctccacacaagcttcccgtcacaaccagcaagaaccttgctcccaccaagaacaagctccatgtaccacatatcaggattcatatgccacaacacaaatcctccagactcaacagcttttgacgaattattcttgctctttgaaccttttgagcctgtctcaaactctgaagccatcgtcctgattcttcccataacatatccattttgcacagaactatgaagcttttgacctcctgatgcagccgtatactgctgaagtatgtactgagcagaggaagtctcctgaaaattcaagtattagtaagagtcattagactttaccctcaacacattaaagcagagataaaacttgataaatctcaattaattgcgcagtctttctccataattagtaggcaactaaaagaagattcagctaaattcaagctagattatggcacagaagagcttaattcaacatgattaactccaaatccccaacactgtcctaattttgaggagacaacagtgaattaagagctcaccataggtgtattcttgatactgaggtgtggaaggagatccagagcgctaacgtgcacaggacctaaaggtgcgccaagaacaccgaggagaagcctcagatccgttcgtttgaaatccgaagaggacgatactgacggcggagccaccggaagctgacatttcatccaattgtaccaacgtctctcgaacctagagtaatcaccactgcttccggagtcttcagcgtctggatcaggaccttctataaccggnaca

SEQ ID NO: 29808 - DNA, 1238 bp, Arabidopsis thaliana landsberg
ctgcttaacataacatgtaaaaattgcaaaagcattttgcttatttagttttagacactatacaaagaaatttgctttagtagtagactttatttgggtcggacttaagacactttgacaaagttgcgatttgagttcaattcacaacaaatgcaaactcacaaactctcaatctctctgaagaacaactcgattcagctcaaaagaaagatgaaaattcagcaagatcaatcagccaaaatagatccggaaattcactagaatacgtacgaggttacagatacaagatctagctctaagcctctaacaatgaagtatctctttcaacttttctgttacaattcacaaatcacaacttacaagagcaatgaccgtttttgaaggacagaagaccctctcccacggaaagaaggtttcctttgcctcttcaattccggttcatcaccaaaccattaaaccggaaatcagctcttcacaatcctctgattaaaccaaccacaaaattgaatcagaaaaaccaatcaaccacaacagtaagagagacaagtcctactctctgaccaagtcaattgccgaacctcactctcactgttctagaaggtaggagtctatcatttcgttctgtggaattttcaacgatgggttttgtcttctgtattcaagccgggaaaaggtgctgtctttgtaatgcacccagaaagtttaaagagtggattttcagttgaagttagaaaaaatcagatctttcgcccaggattttcgctatttgttgaatggaatcgatggtgaagaaattgaagcaaaatctgagaactgggtcctggaaaaagaaggaaaaaagcatgaagaaggaaagatggttcttagagaatggaagtatcttcttaaaagagctcatcgttgattgtaatggtaaatccattcctatacgtagctttacttcttcccagattcgtaaagccaccaagaatttcgatttaagctgttttgtagctgaagaagggttctacatatggtacaaaggtgtaatcgaagatagatcttacatgatcaagagattctctgagtataaagtcactgattacagagtaagtgaggtttataaagacattgtcttgtctgctcgtatgagcaaccacaacaactttcttaaactactaggatgttgtcttgagatccaaaatcctgttcttgtgtttgaatttgctgagcatggagttttgaattgccgatgaagt

SEQ ID NO: 29809 - DNA, 1022 bp, Arabidopsis thaliana landsberg
tggcttagaaaaggttttccttcaccaacggctcccatctacttttgggttttcttgttgggctcttattttgtaacgaagagagctgagcggagcttgacctatggcacagtgtaaaacttattagcaaaacatatgaagtaagtgttccagacatatcatatagaagaacgaaagttatagatcatgcaggcagcagtggatggaggaaaaaaggtcgtactcagagttagtcacatttgtggtcgtgacagttgagagaggctcagtatcccaatctcgagtataaagagtattatcctcctttgcttttttgacaatctagagatacaaaaataagcattagcaatgcaaagcaaccataaattaacatggtattcaaataactgctatatgatttcttccataaaaggcatgaaattatcttaaacatactacaaatctactcgaaagatcaagttgaagaagttcatccaaattttgcaataatattaagatgagcagagtgtgtaactaaaatcatctatcatgctacaatagtccaacaaccagagcgtctacaattcctacaaacatttaccttcctcagggcaacctcgcaagattccttttctttatcatctttgcagcgggcaaaagccctctcaacaaacccacgaagcgattttgggaaggttccaggctacaagcatcggcattatttgtttccaatgtcaattactcaattgtgagaaagaaacaattactcaacacacaaatttatggtggccaacatttaatatctacttcatttgctaggtcatcaagatttgaataaaggattcttacgtcagacatagcagtggtatggtctttaggctttggcattgaaacactaacatatgcaggtgcttgggctgcactggctgctgtactatctttatccattttggtaaaacctgatggcaagtttgaagcaattctagggttagttggaatctgtactttgcttaccctttgtgaatccactaacggtgctgtct

SEQ ID NO: 29810 - DNA, 1754 bp, Arabidopsis thaliana landsberg
gaatcaagtgtagttggaaccgcactaataactgtagtcgttccagatttcctctttttaagtctcctccttttcttaattttatccacaatcctcattctaaacccatttcttgtgccggcagttatatcattcacaaaaaaaaatttagtctttcgattcgcttgttcttgctatccgtgagatggaggggtttcatatggtctcagaattgtgtcctctgatcactgggtggcgaatttatgtctttgtcgtgagagtcttcaagaaggttatatcgcccaacgtcttcgaactcggccttatcctggcagattatgcggtaatttctgtcaaatcattatgtgtttttctcgttcattcgcttaacttgtatattaaactgtctactatcatgttctgtatgtaaagaataaccgtattgaggccaccgttgatcgtcgccttgctccgttttatgaagaccgattcgttgaaaatgagtggaagacgatcacctctttcttggtccgtaagtcaactgacttagtcagagcaacaaagcatgaatacggcatacttttatgtatcggaccatcgtcgttcaggccccaccgagatcaccaccagttccagatttcgatttcactcccttcgactatattttggagaaatctgcttacaagaacgttttagtcggtgaggaggaataactccgacgcttcatttattacatttttgaaattttttgtttattatctttgtttctccatcatctagatgtcgttggagcgttggttgatgttggcgcattgactacagactattacggtctcaaactgagtttcaagataaaagatagatagtaagtgttcttttcatttgttttatttacaatgtcactctaaacgctaacagtccttatttctaacgtagtaatgaagtcttggagtgcgaagcccgcaatcaacaggcggagtacttggatggttactttcagagtttgggtaagggaaattttgttgtcgtactcagcttttggcgtctaaccgaactgtctaacccgaagcttgagagccatggtgctatttcaaaggtggttgccaatccggacagagcagaagttgcggatatctcgatggtggttttttagctagagggaatgaaccattattctccgttttaatataatataagactacatttcaattaagttttctttcccagttgttgttgttgtttccataagaaccaaactacatttcagtcgttgttgtttcttgtttccgtttaaattttaatctaatttgttgttttatgtacgtgccttgttttattgttcaaatcctctcgcaatgtacgtatagtttctggtgtacgctatcgtgtacgtatattagttttggtgccttcaacatcaaaaactattagatttatacttatgttgtgtacgcaattttccaatgtacgataaaccaagtttaatgtactatatagtgtacgtacacgaagacatctagtaaaacttaaaggggtaattcattcaaaagctagaaacataaaaaggacaaacagtttatataaagggaaattcataagataaataaacttgaacatggaacagagttggaacgattcaaaaaacataaatttttcaacgaagcatacacatgtgttgcaaaatatgtgtgcatccttcataccaaaagacttgagagtagagccgagttagagtagcttagaccttatcagctttgcttctagtagaatatagc

SEQ ID NO: 29811 - DNA, 2809 bp, Arabidopsis thaliana landsberg
  unsure (1)..(2809): unsure at all n locations
tctttctttgtgagttgcattatcgcttctgtttcatcttcttatgtctattaacacaaaatagacattagttacaaataatgtatgactcacaaaagtttgattttgattgacaatgactggtatttccattgttttccctaaacttacctctatcttttgttcagatgctgtgcagaatgtgttgtcgacttgaaaggatgttgctgctcagactgcattactgctcccagacttagaccggtcttgcatggagtaaagagatatgaaaaatggcatgtatatcgcgattcagaagagcaaaatgcgccattggtttgatcatatctgagagattttagaggctagtgatgtagggcattcatgacttgtcactttatattatgttcactgctcccccttgtgattgcttacagtgtttcgttggtctaccatgggcaagtgatcagatgagaacagcacacagcaaaagcagatgagtgctgaagcagaagctaatgaagtttaattacaagcctgttccaggaagaactagtagtcattctttgaggttcttcaggtgtaacacttgtcagaactcagaactcaattttcatttcaacatgtacaaacaaagcttgtaacaattcacaacttaatctatctgctgtaatttcggcacaatgcaaactgtaatgcaacaagatggtacttgttaataccaaagtagaaaaataaatgtagtagtgattattttagacaaatccgtggttttaatatttctataactaacacactcgaagtttctctgctgtcacattacatggagttttgatattgcaggcctagtgaaatatggtggctttgctttgatcaattttcatgaagtgtcttcaaacactggacaggatcaagctctaccatctgcgagctccatctgttcgtgtagcaatgtaatttctcagagaaggagactgggtaagaccatctggtgcaactgtggtgttctgagttccattcttctgcttcatccttctgcgtgctatgtaacctctgacccaaggagtaacatcctcgttggtcttaatcatgatgaagaagatgatgcggtagatgataatcatgctaagaatcacactgaggttaatccattttgatcggtgcaagtcgatctggaagacgttctcaagaacgtattcacctggaatcttgaaagcactcccttggctgtcaaacgtcaagcctctcagatcattctggtactgaccctggagaacaaacaaaacataacaatattagctctctgctatattttaatcacatgatgatgagctgatatgaaacattttcttgtttcaacaatatgtacttgtagagcccagaagtggaagctgatgtatgacattggataacgccagaaaggttttgggatgtcatttggaagcctgaagaatccagaaaccagcatgaagatcccctgaagcaaaagtacagatgaacagatttaggaagagcttttcttgtccttttacaaggtggaagaacacagagaagtcaataatgagagtggtggggatatcacctggattccagctccaatgatgatacccatgaggaagttgggaacaatactagctattgccatcattaagctctccacaacggtgacacttgcataaaggcagagaacaaagaagaggtagtgagtgaatcctggatgcagacccaccatgaagtaacagattgtcccggagatgaaagttatcatgatgaggaatggtgttgcagataatgtgttggctatcacaaacgcagctactccatagtgcccgtttagtctctctctttggaagacctgcaatcattttcagattaacaaaatagtttggatcatctggttgcgcaagaaaaaaaaactgcagaaggtactaaccttcatgtcttcaacgaacgaaggaaatccaccaattgacatgaatgttacaaagccaaagacgaaagacgcacatgagccccgtgcctgaattcacaaaccgaaagaggtaagattaataaaacttcaatacaatttcgagtgtgagttgctctccaataaatgatattagcaataccagaatggcgctgtagctagtcccaacgttcagatagatggttccaatgcagactgtgaccaagatgtaaattagaagtctgagccagtaataaccaaagtcccttgacatgttgatgaaggatcgctttgttaaagtgtaggtctgcagaaggaaactagcctggctgcctccggagtcaagaattgtccctttctgttaacagagacgagcggagactggttaaaagatgcaagtgactcgtcctaacaaaagctcgagaaaggaacaaagagtacttacaaattgggatatctcctcaaccttagcctttgctgtgtagtagtaatcagaagtgtggtaatagtcaaccaatagtctgatagcttcagctgtggtaatcttttccaacggatcatcgcttgcttcaaactgggaagtagaataacaagtccatcaacaaaatgaaacttgcagagaaatgatatcagttaaaagggaaggttttccagtacccttagcttcatagaacctttcaaagtggctctaactttgtcaaagtctgagtttatgcatctcaggaaatgatcagaagggttccttaacgcaggacatggaaacccagcttgtgcaaagaactgcattcgaaagtaaaaacactgattagttcccaagatttcttcagagaatgatngtttcttttggtctagtttcttgcctcatatgcatctgaagcttga

SEQ ID NO: 29812 - DNA, 2302 bp, Arabidopsis thaliana landsberg
  unsure (1)..(2302): unsure at all n locations
tcagtccatatcttgatcaccactgatttttgagattagattcggctcgaatgtcgtgatcgtgacatcatgacacttaactaagcactcacagatattattcactaccacgtgtcggaaagattgtaacaagcgtaatctgtggaaaggggttcaaatacttgttttccaatgacatatatatttatctctcataaaaaaaaaaagaatcataacatgtatattagagcatcagaagacttgtagtttctgttctctagtttcgttttggccttttgggtcctacttttgttcttctcgtgtactgttgctggtttgacttcggttatgtgcacacctgattttattcggctatatccagcgttcatagattcgttagaatttttggtgggaaccttctggctcagtatttcagttttagtgcttagctctcttattcgtcccatgagctgttttctgtaggttcttggcccttcttttgtctccgtttctttggtgctttgtttctagaggagggtgtcatgctggctatgtatgtattacaaaagtcttttttttttcactacaacaatagttagtattcttagtattagaagatagcaatgggtgtggttctactgtattagacttaagcttgcattttggatagcgtttatgaatacgtaaacgctataatttgtttggttcaaaaattacgatagcacaattttcataactgcttttaaaggtgttaatcaaattttcgtaactatattataacttttcaaaaacgataagctttataatcatatagataaaactaaaatcactttgaaccaccaatatttaacgaaattctttcccatacggccaacacttagccaaaaaaataaggaaaagctcaaattaaaaatcaaaccctaatttctatatctcttatgcatcctctttctcaggtttacctcttcactctctttctcgattcatcctttttacaaagattattttcttctccttaactctcttttatcccttcagtctcttcctgcgattatacaccctggatctaatattggattttattaatttctatcactctttgtcactctcgctctcatttccaaattcttcttcttcttaaattctacagattctttttttttttttttcgctggcctgaaaccccaaaccattgtcgatgctcggttcgccgttcaatgacgtcaaccttctctctctttatctttctctttagcctcctccagtaaaattttgttagggttttatgagcacttgggttaaattttgttagggttgagttgatcgatttgaattagagtgatttcttagaaacttttggccaaagttatgatgatgtttttcatgacttcccctatggaaaattaccttccatagtgtgatcacgaaataccacgtagaactacatattccaatttacattccacgcggatcttaagtttcatttgatcctggcacaacgtaaacgtaaaaaaggtccggggttcgttgatccaatgatcacaacggtcaagtgatgagtttgatacaaaatttattgtggtaatatatatcccttttttcttacattcgaatgctcttgtttttcatacattaaaataatcaaagctaataaactctactactcacaaccacttagatattcagaggaagaatctaaaaccctaactttaggaagaagattagatgaaacatatataaaacacttcaaaatccaattcaaatagacctataaagaacaataccctgtaatgaaacgtgactatatatcaaggtgcgctgcatcggaaccataccctaagaggaagtttccatgaagcttcatggcaagactcattcgagtcgatccaatcatataaatattgatgtatacgcaaaatgtaatatatgctatatattcatccaaaaagcctccaaaaatcgtcaacattcgctcaccattatatttgttgtcatgtctatcttattttggatgaaggtaaatatctgagttgagaaagaagaacatataaggatagccaaggagactgcctgatgtctatttataaacaaaatggtcatttcttggtataacttatagtcacttcaaaacatgacatcgaccattttgttcagagaagcaggcaagtcatccttggctaccaantattgttctcctattcatctttgacatctccttctaaataatgtgtagactcagccacataaactatgaaaatgctttagaaaccaaaggcagaattttgacattntcaaaacataacaccctaacaatgattgaaac

SEQ ID NO: 29813 - DNA, 2426 bp, Arabidopsis thaliana landsberg
  unsure (1)..(2426): unsure at all n locations
gtgatagtaagtataatacaggctagctataacaatatacggtaaagaggctggccatcttagagtctatgtcagaaagaaagtagcaactcatgtataaagcgatggaattgagaagagaatcttcttttaagaaagacatgcagcgtgcaatgattagaataataaaactcttaaaaagaaactgcaaaagaaaaattacgaattaaggagaaaatgaaaagaaatcttaataaaaatggataatacatccaaaagcacgacagctaaagttacaatattggctctcattgcaacatctaacaaaattatcatcttttaattctctcttttgctcctgcttctcctttccattgatcgaaacggtgcctaaaaatcaagcatattcaaacatatcagtataattatataaagatttttaatcataggcagaaatagtatttgtgtaacgaaatatatataaatatttgaaagttgaattacctaagaaattggagacaaggctacttcaaaagcagtttgtataacttagaaagaggttctgttgctgaagtcccttggtgcattgcacctgaagcattccattctgcttgcaaagttatgctcattgcaaccaatcctgttttcaagttcaattataatctttatcaatcaaaattttagataggtacgtataaaaactatatattatagtcataaatcgagttatatcaaccaagtatattcattttggtacctagtgcaaatccagtcgccggatttccagctagagcgaccaccgttaccggggactctagaccgcataatgtcggcgtcaaacatggccggaccgccgatgccaccacctccgcctccagcgccggtctcgtccttgaaagtgccgcatttgaagcaggtggagcgactggcgaagttgtgtgtcccgcagtttcccacggtgcagtaccaatcaccgggacgaacgtcggagccggtggtgaatccgaaagcagacatggctctgccaccgaaattaccaaagtctaagccaccaactccaccggggccggaacgagagtcaccgcatcgctggcaagagtcacggcgctggaagttgagatggctgcatgacctgcagttccaatctccgggtctgctcattcttcagttcttgtatgtgtgtgtttatattattttctgtaacatcatgcatagaaatttgaatctttctattagatatttccattaaaaagattaacagaaattaatagaaatatttctaagaatttacgttaaaactttggacaaaaacacgatgtatgtggttaacaaatttaaatatgtatagtactggatatatgcacttagtctagttttgaagatcaattttttcttacttgtattaattatttgtcaatttcttgtggctatatatttctgaaaatatacctaaaataatcaaatagttacaaaataatataaattagagactgaccttgatgaacttggagagatatgtgattatatgagtttggtgaaagaaatcaagacacgaggctttgaaagagtgatgcgaagaggatgggcttaaatagaacacacaagaacaactggtggctcgtttgaaaaaaaataaagaaaaaaaataataataattactttttcgttttcttcaccacaatattgtaaactttcgcaaaagaagagcaacaaaaaaaacgagaatatttaaaataaactaagtgaaaattccggctgagattcccaagcctataatatttttggccatagcttagagtacttcttgtattatgatatatatatatatatatatttgtttaatttaatttataacatagataattactttggccatagcttttgttgtattatgatgttactcttactcacaaatacatggactactacttcatattcaagaattaaaaaaatttaaaattagaaatatgttatactagatatggatatatatttcaccacatgaatgaaacatgcttaatgcatgttgatgaaacacggatgttttaataggtttttcaaattaatctttctttatgcataattatatatagtcaaagatagnnnnnnnnnnnnnnnnnncaacttgatttttactcgacatgttttgtttttagtcaccagtcgttctttttatcttcttgatcacttctttggttttgcataacagttagaaatttaaagtactttggttagaatttagggtcaaaagcatagtgtaatgttaagcaaatttagagtcataataagaagctaacataacaacttaggaggccacatacaactaaaagaaagagaacttgttaacctctagctctcacaaaagacctttgactcgtaccctttttcgccctttaatcttaatgaaataataactatatattatttgttgatataattcgctccac

SEQ ID NO: 29814 - DNA, 2122 bp, Arabidopsis thaliana landsberg
  unsure (1)..(2122): unsure at all n locations
acattgctcgtcttctgatggataggcaaacatgctaaactaaagtgaaacattgacaatttttgtaacaaacaatcgcaaatggtaagcattctaatatctgtaacttatgttatttgcccaggaaacataagtctgttatggtactaagagggaatctagttgtaggtggtatcacgtatcgtccatatcacaggtaaggttttcgcataactcttcccatcttttgacccagtgatgattttctccaccatatgtatgtgaatacgcttatacagctttttgctgtttagagagtagcatgttgacttgttatcttatattatcatcaaacatagcttacttttcctatagaatatttctgaaactgtctgatgtcataatgagcatgaatacagtcttgacatgcttattaactccattgtttccctgggattcagtcagaagtttggggaaatannnnnnnnnnnnnnnnnnnnnnnnnnnnaagtaaaaggttacggtaccagattgatgaaccacttgaaacaacatgcacgtgatgttgatggattgacgcattttcttacttatgctgacaacaatgctgttggttacttcgtcaagcaggttggtgtttcgtatattgtgcaattttttgctctatttttaatctctcaacaaacttcgaccaactgtagtacattccagaaaagtagttgaactgtgttttggatgtaatgttttctattggttaataggagatacctcagagtttcacttctaaaagttctgtttccacacttagctatcaagtctactttctggattctaactgtaatttttatattcttacagtcgtccactaagttgatctgttacgtctattatcttgtgcagggttttactaaagagatttacttggagaaagatgtatggcatgggtatggaaactatgtatctcttaagttcaaactgctcatttaccattcttaacttctgtgctttatctgtatgatgtctaacttaaatatttgttggcccaattaagctcacaaaccttagaatacaagcattttattgcgtggctgattatgctacgagagagctatttaaaacttgtctttatcattctcttcttcatcttgaaacttacttttgcaaataaaaacctttgaaattttcttaggttcattaaagactatgatggtggtctccttatggaatgcaaaattgatccaaagctgccatatacggatttgtcaagcatgatacgccagcaaagaaaggtaagcctttgaaaataccttttatgtggtgaaaaaatatctcgagccttcaggttcatctatacccaaatagttcttcaggttacgaagctatttgtttactttctttactttcactatttaactctagcattatggctgattctgaaaaaaattaaaaacataagaaatacaaacttaaggattcgattattgaaagttcctctcttctctctctcgaggaattaattaatggaaattcctgtcttcccctatgagcccaaaaatcaagctgccctcccaaaagctatctgctttcaagagagcatagcaacgtaacactaaacgagtaaccattgttacatttctgtctaattatacgtatcagtttctgatccggttgtacttttataatatcaggcaattgatgaaaggataagagagttatcaaactgtcagaatgtgtatccaaaaattgagtttctaaaggtaaacatcaatggtttcatgtcttgtggctattattgtatacaatgtttccagtagtaataataaatgagatgatttttgcagaatgaagctggaattcctagaaagattatcaaagttgaggaaatacgtggcttaagtaagttatgattctacttgatggtgttattgcagtttcttacccaaaatatagacatatctccctttaaaatgttctagtcatctcaaaattaagattgtgctagtcgctccatgagatcaagttgatatgcatgtttgagattctcctgcatttgttagctgtgggctaaaggtttatctgtaatacatgaattggctaattcatgaattatggtatactggtgcaggggaagctggttggaccc

SEQ ID NO: 29815 - DNA, 610 bp, Arabidopsis thaliana landsberg
caaattttatggcaatcacatctttataagtactcagtatttcattaatgcctacatgaccatttactgaagccaacatcaacaagagggtatgcttcaaaatcaaactcaaatctatcaaaagctataaaatatattcacaagtgagttaatgcataattttggtaaatataatctgcataattggtttctctaccaatgatttgcttctttgtttggcgttagatttcgcctccaacattctcacaaagatctctcattgttgcttctataataatagtggctcatcagccccaaaccagctttgcagctactacagaacaacaaaaacatagcactctttgatagttagatagttagattaccagggaatgtcatgaaggtggttctctgataaaaaaacattgtcactttaaaatggagataaagtttctaactttaatcttatgcaaaagaagaggtaaaaccagcagggtcctctcataggtgtcgacaagtgatattacacactgtagaggagattcatggaccaccaaatgcaagtcttaagtcttctcacatggagatattgcaatcatttactcaccagaaatatataagtcgaaaagac

SEQ ID NO: 29816 - DNA, 2162 bp, Arabidopsis thaliana landsberg
ataaatacgcaaaaccccaaagaacttcttcaacttctctcctcaacttttaagtatttttcactttcaaacacacacacacttgacttttctcatataatttcgacagctcgtgaaggacaaagacatggagccttctcggaggagaatgaccagagacatgttgcttctaatcgtaacgatggcatggctcgtaaccggagacgaaggaggcataaagcaagaggagcgactgtttaatcttgggaagcttgagatgttcgttgacaagcttcctcatataccaacacttcatggctaccacttcgtcaatggcttcctcaaacccaaatctcttcacataggcatgttcttcaagaaatgggtatttaattctttccttcttctcattttccttatattctaatttttgtttccttgttttctaatttctttcctctattatatattttccccttgttttctctgttttcttgaagttatatttggtatgttattaaattaaatttccagtctatagtcgttcgtgaaaacagatcatcttccatttctgtcatgaggttataaatggccaaaatatttagatagaaaattcaaataaccatcatttagtgatttacacctgtattacatgcaaaaaaatagactcattaactttcttgaccaacttaagccgactaactaatgttgacattatctccttaatgaaaaacattaacattaaattcgatatcgtataagattagtgaagttaatttgctttttacttggctacggctcttcttaggttgtaaagtgattagaatagattcgtgttgtgttcacactattgtcccctcacttgtttgtcgtctttgagaaaaagtattaataattgtatactttttatcactcgtcatgttgaatattatttgcccttcaccgaatgaatactcaaattcctctttgttcataaactaatctaaactcattaatgacaaaaattaacattaaatattcgaaatcgtatagatcagtgaaaacttaagtgctttttagttggctacggctctttgttggtaaagtgatttggaattgattcatcttgtgtactccactcttatcctctcacttatttgtcctcttgagaaaaatatctattggtttatagtactgacgaatcagtgctctttctcaaatttaatattattttgctctcctaccgaatgaatacacatttttttttatagtttctataagctctttaagttttgttctgataaattatactaagaacatcatcaaatctaatgattaattgatagaaagttattacccactaactatataattatgattgcttttctaccactttggcctagctaattgtgctctgtttctttaaactattttattactctgctaatgattcgaatgatttaagtttttaaatattctctaacactgtcacacactgatatgagttaaatcattgtgaagtacagaaattccacagagacttgcctgccacgccagtgttcgcatatggtacatcaaagcgttcagcaacagttccctgacccaccaatagaagctgtttatggcgtcgacacctacgtgacgtggcgaaatcacctccctttacatcatatcctcccttgggacccaacaatctctccggcaatccctaaacacggcggcattcccacggtggttcacttgcacggaggtatccacgaaccaactagcgatggaaatgcagattcatggttcaccgctggtttcaaagaaactggttccaaatggaccaaaaagactacacattacgtcaataagcaacaacctggaaacatgtggtaccatgaccacgcggcagggttgaccagagtcaaccttctcgccggtttgttaggctcttacattctccgccatagctcagtcgaatcgcctcttcggttacctaccggacgcgaatttgatcgttctttggtcatctttgaccgatcttttcgtaaagatggctccatttacatgaacgctacaggaaacaacccaacgattcatccacaatggcagccagagtatttcggcgacgccatcattgtgaacggtaaagcatggccgagattaaccgtccgtcgccggaaatatagatttcgaatcacaaacgctagtaacgcaag

SEQ ID NO: 29817 - DNA, 2125 bp, Arabidopsis thaliana landsberg
taagctgtgaaaattgtttccacaactttttaacaattcacgacattatatcattcaaaattttgtttttgcaagaccctatgcacatatctaaatatagatgataaataaaacataagttcaaaaatttaatcaacaacccttacatgttaacatatgataaaacataattaaaatatgcaatttaaaaactaatttaaggtggatatgtgggtttgatattattaccaagccagtggcggaagccgcaagaggattggcgctcaacgtttgcaaacaaaaggttttgtcttcaacggattgcatctcacataatttatctatgtattttgtggaggtcaaggccgaagcagacactatgagaaattgtaacaaaactgccactgaaaggaccaagaaacaatcagaagaagaaactatttcctctaccacttgtgtacaaattgtgaatttattttttcatgttcttgcatttactttataccttgtaaagtgatcggcagaatctttttcttcatgatttgttagcatctagtaaagaaagaaatctgaccattatatatttttccttatgattcagcatctatagtaaagaaataaatctgacgattaattatacatttttcctcatgatttagcatctatagtaaagaaagaaatctgagcaatataaaataatttccatttctagagtaaaagaacttgattttgacaatatattttccttgttaatttttatcatactataagctttacatatttgattatgttttattaattgtatttttttttcatcacgttttgttaattctgtagaagtagcaagctgtaattaaaaaagttagttaaacatatgatatcaatatcatgttttatttacctttcgctatttaaatatgaaactctgttgtgggctaatacctgtaatcaacttttagttcagtacagaaaggttgtaatacaaaaaaatccaatttaaacctagggctgtgtattgaaataaatatttgggggtgtttggtggtgtttccatattttggagatttgttgagagttggataattggtgatttggtctgattggttagatttttatttttttataaagaaaataatgggaggtttggttagatttattagagtgatttagaaatagtaattggtatttgattagacttattaacaaaagaaagagagttaacaataataattaagaacattttctctcctattttctgtggtggttagagacgaatcaaaactgatgcagaaaaaacaaattggacatcgacgagagacaaatgctctgtgaattaatgacttcagtcatctctttcttgagaacattggatggataattcctcatttaagggatttataaggaaatgtgtcattttctcttggtaacatgaaagaaactgaatatttggatatatttcacaatggttccgggagagaatgaacaaggtattcgaagctttagttctttgtatatgcttgaaatttgaacaacaatctcataggagttaatccaatttgaatttgtgaactttttccttatatgtactactgatcaaacaacatggtggaaggtgaaatacctctttcgttgttcaacaaaataacatcccataatatggaagtatagtggtgcatgagcaaatcttaaaaagaatttatatggttatgtatatcaccacaatgtccttatattttcaattaaacatctcgagagaactctagaattgaatgttcttgaactcgattaatttgaggatgggtaaccgagaattgatttctcgtagtgtgtactgtataaatgaagataaaatacgggaaaatatcacataatgatttataggattggtaaccaagtctttaaaacccctggaagtagcgaactaaccgctagacaaaggatgggccaatagactaggggaggacatgagacctatggacggttgcaattggagagtcacaaacaagtccagtcatttgctaatggaactctcgggaagcaacatatttggatatcaaatctctatatttcgtagcattatttctacaaggcaataaatttattaggggcttgtccaaagacatttgtagccaatgttaccatacct

SEQ ID NO: 29818 - DNA, 1876 bp, Arabidopsis thaliana landsberg
tacatcaaattaaagcaatggaaaagtctgaatttcaatgacgaccacaacaaaggcattcataccttgtgatattgttctttcaaaagaagaaactattgtgttcctagatgagaataaaatgtgtttactcataccttttgatcttagttgcgatccttgtgatcttatatgatgtgaataagacgtatttgtagataatagtaatggtagggtttagtgtgagtagaaaaaatattggtaagcaagtaaaaatattttagcaaatatcatactttcagaatgtttaaatatcgaattaatatggttcaattttgtcaggaaacaaatggtaaatgaatacaaacttcctatcattaggatagaggacaaaacgatttgcaaaaatttctttgttaattacatatattgagttaatgtggatttaatgtaggaagtttcaattaaggaatgatctgattcaaacaaattcgggtcaaatatttaaatatggaaggatccgatttgaagatttaccggtcgaatcaaagaattcaaggtttaaaactaagggggtgtattgaaataaatatttgggggtggttggaggaatttccatattttaagatttaaaaagatttgagtaaaataattggtgatttggttagattggttatatattttattttaaaaaaaaaaaaatggtgatttggttagatttatcagagtgatttaggaatattaattggtgatttggttaaatttattatataaaaaagagtcagcgataataatttccaaaaaacattttttcttctattgtctatgctgagagacgaagctcatttagaagaaaaaatagaagaatgattatcatcaaacaagcttgagagtgtttattttactcaaatcttgcattgtgatttccctaccaggttaatcactgagagaagaaggcttattagtgtactgtgtcgtctcgtaagcaaaaacggtgactccgtcaacgaactttatcattgttttaacttacctgatcgggagcacaatcggtacatctttatttatttcacgatgacttgcacgacagagatagatgttttgaagtggacagtgaggtattgttcgagtttagctgcacaccttctaactcctacgagattgttcaaatatgaaattcaacaacagagcgatttgagaaatgcagctgaaaacaaaactgaaaaatatatttctgacgacgtcggccattgtagacatacatacatgcaaatcagataaggtatcaaaagaagccaatgtaaaagttcatacacgtaaaggtttttggagttggctacgtaggagatagcatttctatctcatttgtctcttaacaccttctcaaagctcattttcttcttcttcttctttttgttcttctaattgttcgatgataaacaaagagaaacatatcatcatagtcaaaatccttaaaaaaccatatagtatttggaaaataccatctatagaggtgggatcgttttgcttttatttttgtactaaaaagatgtctaaagtctctccaaatcagcttcagtattttcttggaaaaaaattgtgaagtttgaataatagtggatttgctatggtttttataaattcttgattgaataagaagagatttagaattatttggaatgattttacataaattccagcttcaataacatggaattcggaatgatattttaaaatcactaattgaataacatgtgattttaacaaaatccccaaattgtaaccaattctactttgaatacaccccctaacaaaatctgagctgattggatttcttaaaatgtacttacaaaatgttaagatagatagtaagatagaaagagcaatacttgggttc

SEQ ID NO: 29819 - DNA, 1118 bp, Arabidopsis thaliana landsberg
aattctagagtaatggactgaactttttatctagctatatgtctgtgaatttcaaatcacggtaaatcactggcgggttagctgagcagtgaacatactctattcctcgagctgcaccatcacgcgattttcattcgagtattcctgcttaatggttcttaattacactcaagatctgaaaaatcatacaaaagagtacaacatttgaagctgaacattcataagatagttacaacaaaacccttgaaagaacaatggagtcaaagtaaactaaccaaaaaggtgatcttctaagcttcccattggcatgtattcatagacaagaagtctttgatcaccagaagtacagtaaccgatcaatgtaacgagattgggatgatgcaataagctaagcataagaacttctactataaactctcggttcccttaaagcccatctggattcaattgcttaatagccaatacctgttttcatcaaatcatatcaaattacatcaaaagctcattaaaaacagagtttctctttaaaagggcttgaggaagagagagagatctgacttgtgctgaatctaaacgtcccttataaactctgccaaaacctccttctccgagcaaattcacttaccggaagtttcttgtaactgcagctaactccttgaacgtgaagctccgagctccaccaccaggcatcggactattcactttaccgtttactgttccaaattccgacagaaattattctcaaaaaatgtgttaaaaagacaccataaaagggacataatcaagaaacactaacgactcacctaagatacccgaaatcgactctgtgcctgttgtatcacttccatgaactgaaacctcaaagaaaaatactataaacaaaaacgaaaacttttgaggtaaaaacaatgaaagttattgaattgtggacatgaaagtacctgatgaatcggtttggtaacgagagttgcatcgagcgttatcaatgacgactcttatgtccttggttcgagggattcaaacaagaaaaaccaacaggccattcttctttttttctgttaaagacttaccaccaatgggggaatttaaaaaaaggggaatttttttatgaaaaatgg

SEQ ID NO: 29820 - DNA, 1811 bp, Arabidopsis thaliana landsberg
  unsure (1)..(1811): unsure at all n locations
ctaagttaatccactaattaactaaatttgtacttcaatagaaatcgccaataattatgcataaaaatctgccaaaatcagatttctatgagatttcactgttacgatctacatcttatataaagttctttctttttttcgtcgacaagaaaattccacagtttcaaccccaaatttttatattttgaccccaaagaaaaagagaactcaacacaaaaaatatatatagaattttctccacttgtaaaagcggtatcgtatctcttgcccttaaagcaaagaacttgtctctccttctccattcactcctcttttggaacatcacaagcacacaatcctctccgtctctgtttcaatgaagaaccaaaaggatcaaaactcatcatcattgtcttcttcatcaccatctctaacaacaaagcttctcaatgctcaataccatcacttcctcaatctcctttcgtattcccttatcctctgttgcggtatcatcatcggcatccttctccattcctctctacaaaacttctcttcaaattcttcacttagcatccaacgcatatctcagctatttatagtctcttctcttcctcctccttctcctcctcctcctcctcctccttctcctccttctgagcccgagcaaaatgggctcaaaagctttattgagccaccggagaagcttatgcacgacatggaggacgaagagctggtgtggagagcttcaatggcgcctaagatcaagaattacccttttcctcgaacgccaaaggttgctttcatgttcatgacaaagggtcatttacctctagctcgtctatgggagagattctttcgtgggcatgaaggtctttttactatctacgttcactcttatccttcttataaccagtccgatcccgaagattccgtcttccgtggccgccacattccaagcaaggtcagcttcctacaaactccaatatttggttttcctttatgattatcatttttttatgtgaaatacgttggagaaaaatggaatagtatatataatttcgtgactttagagtcctagaaaaatatcaaaatgtcaagttgcccaccatatgtcctaactcttaacatataacaaaatagtacatatatatgcaaaactagaaattaaataaatgtcgataatctttgcgcttgtgcaaaatgacgcagctaatgaggtcttagtctaatactggttgaaaactatttccaaacatcttcaatggcctaggcttattttggactttctagaatttgtggaagtgcatctttcgggataaagtcttaaaagaaaaagaaaaaaaaaaggaacagaaacgtcaatgtaaaattttatactacatttttcgaattttcgaaaactgtgtgctcttgttgtaaacatgctctgactgtgattgagtaattgtcaaacagaaatctcatactaaaaagaatacaattcataagaaattgtgaagggaatgtagattatcttgcacattacggtttgctttttgttaaatagattattatacctttaatcaagcaattgtttgtggtccgtcggtgccagtgctattatataatataatacagtaaattgcatggtttcgtttgtttttttaatactatatataaagtattgcatggtctcttcattagttaaacatattgtttttgccgacaagtatttgaggcacaaacgcatatgtatacccgtaaaaaaaagtgttacttattagtgcatgtgtcttaattgtttnccctgactcttcttcaagggtgaagattcattcatatnccatcaatct

SEQ ID NO: 29821 - DNA, 1589 bp, Arabidopsis thaliana landsberg
acatcaactaaaatactcagtttcaagcccaatcaacatcaatatatttttccgtatatgccgatcaaatgggcctgtccaacggcccattaataaaacgggggttaaaaatgtaaatacaagaagatagatgtttggtgagtcctaaaaatcgtaaaccagatttccaaatttctctccgtctcatctttgtctcggtctctctctcgagtgtgtgtgtgtgtctaaaggcaaagagagagatttgagaaaactgaattacaaaaaaaaaaaaaaaagacaacgaaaaaaaagacatcaaatttgcgaaagttgaaatcgaaaacggtgaatacaagttcccgccatggtggctcagcagctccaagagagatgcggcggcacttctcaagaagatccagttgagaccaccaagtctctgatctgtgctctcaattacatttctcgtgaccttcctttgcctcctcacctcttcaccgccgtttcttcaatctaccatggcgcttcttcttcttctctctctgactccgatgtctctccgccgctacctacttcgccgcctgtaattcactctcgagcccttctccagcctcaccctagattttgatgtttgcccctttttgtgttttgtgctttgtttgggaggttttgaatcgatttatgtggtcctgtgatttgtttttgtagctttgctttcgagtttatgttcaaagttttctcctttttcgagtttctatggaaattagatatcttcagtggcttgttttgtcgaattacagtctaaaggtttttgctttaatctgtggtttggtctctttgttgtttttgcaggcgaataaagctccctatggagctgatttgatgggtgaattcgaggatgcacttttgaagcagagaccagattgtgaatcaggctctcgattgatacaattactggataatcggaataagagtcatatccaacgccgcttatctgaacttgaaggttattatcgtatttattactcctaagttgcacttcaatccattctcaagttttgattttgttatgcttggcaacagtttttttgttactggagaactattgtcaattatgttactaaaaccctttattcttcaagggggatgctttgtgcttactctttgtgtttttgaatcagaattaccttctactagaggtgaagatttgcaggcaaagtgcttacttgagctttatgggcttaaggtatcatcgttgctagatgttctcattgatcgttgttgttatgttacattgtttgaattgttatatctttgacattgacactttacctggtgagttacagctacgggaattgcaaggcaaggttcgaaccgcggtgagctcggaattctggctacgtctgaactgtgcagatgtcagtagccaactatttgactggggcatgatgcggttgcctcgtccattttatggggttggagatccttttgctatggaagctgatgatcagttcagaaagaagcgtgacgctgaggtgatctaccttttattcagctagcatattctggtgaaacttttttagttcctggattatattttaacctatgat

SEQ ID NO: 29822 - DNA, 2342 bp, Arabidopsis thaliana landsberg
cttttcgtactcgtcttcccctgccatgcgagtctgtttcttcttagagtcttctgctttcttcgccagagccacctgatcttcctcgcgtcttcggatgagctcagcctctgtgaccttaggaaccggcacagtgacgcgattcgccttcttgtctggctttttcaaagccttctccaactctttctcctcctgctcagccagacgcttcgcctccaatttcttagcggcggtctctgccttcttctccgcttcctcttctcgcttcttcaccgctttggatttgggaccttccgcctcgcgccagtattgttcctctttctcccgagtctgacgatccttctgctcagcctccgcggcgttcttacgagatttggcgacctccgccttgctgttcagacccatcttcttcggcatattcgattcgctggggttaattgatctctctcgctctctcgattgttgaattcgcttagggttacgattcaactttgtgtgatagataagaaatgaattaaccgtaccgctcagagctgagaattgactggttcgatcttaacagctttgtttggttaaggcggtggctcaaaagctgggtcaacaaccgatcgatcatttcatttgttaaggtcgttaaccgggattctttttttcaaaaatccactacaatcccttgtccaaagtttagagggccgcttaacggttcaaccaacttaatccgagaaaagcccaagttttgatggagtttgggaaatttgaactattttaaattggcaataaccataatttagtttgctttgtaaagtaattgatcacacactatagacttttacttctcttagacattaggttttgataggaggagaatctagtgtatttttttttttttcacaagaaacaacgtatgtaacaattatatacacttgatgcatattcttaggaagagtttggacttcggaaatattgattttttacatgcaatgttagacatagaacctgataaatttggagtcttagactaatcactataaaacatatatacagtgattgtcatttgattgaaacatccgaccagaggcaagagacacgtttcaggttctatgtcaattacgtgaacaattcttgctaatactaaatgtttcagtaaaatcagatttttaaaatttgaaggggcagaaaacatttaaagagtgataaagtggctcacgtgcagtaccaagctgcgacctctttccaatatctctctctctttctctaattctttttgactaaaaataagtacttttttgaatagtcagtcttaacgggagtggagttagtaaacacttttgtgctctggtctgtgttcaagttttggcgtctcttctcaaacagagaatcctaaacagtttacgagattcttgattgtctctactcactaatgttttgtaaagatgtgatttttgcttctctctatcttagtcttttttcttgttgatgttgaaatggaagctgtgagtctttaaacgggaatttattgccgaccaaaccccagacaaaaaaacaggtctctggtagattctatttctaactatcgattttaagaaaaaggctttaacttgttttgaaagattggggatttgcaaatgggtttgtgtcattcgaaaattgataagaccacgaggaaggaaaccggagctacaagcaccgccactactactgtagagagacagagctccgggaggctgcggaggcctagagacttatacagcggcggcgaaatcagtgagattcaacaagtcgtgggtcggcttgttggcaatggttctagtgaaattgcttgtctttacacacaacaaggcaaaaaaggaactaaccaagacgccatgcttgtctgggaggttcgtgtttcactttttttttattagggttttagttcactgtgatgacatgttggattgtttgatgtttagaagcctttttgttatgctgttgctgctacagttacaatgctcttcttgttgctattgatgttcttcttgtgatgtattttagcttttttatatcttcttcttgtttaacttgttacagaatttctgttcgagaagcgatacagtgttatgtggtgtatttgatggacatggtccatttggtcatatggtttcaaagagagtccgagatatgttacctttcacattatcaactcagctgaaaacgacctcaggaacagaacaaagcagctccaagaatggcctcaactctgggcctacttgtgtagatgaagagcaatggtgtgagttacagctatgtgagaagaacgaaaagctattccccgagatgtatctccctcttaaaagggcctg

SEQ ID NO: 29823 - DNA, 1281 bp, Arabidopsis thaliana landsberg
gtgggacttgaccttagagatgttgttagagattctatgtatagagaagctagagggaattctgatgtatgtaggcaaaacagaagagaggattcttcaagaccctatggtttgaagcaatccaggcctgttgatttcaatgaatcctgcagagctctagccaaacttagaaaaacatctcatcactattacaatgaggttgacatgaaagatacatcccgttactatgttgattctcgcggaaagtcgaaatccgggaagaagctgaaagagttgcctaggctttcgttggacagtagagaccacgttgatctcaaatcaggtaataaactttctgaaagtttcagtagaagctctagcatgaacaaagtttcaggtagcccgaaacggcctcctagtgtttgttgccaagctaatgggcttggaaacattaccgggttctcctttgagcttatacagattcaacatgtgtgatgataacagcgatgcattcacaagatcattgagggaaaatagcctgaaccgttctcttcggttctctcctagctcgcccagaagcttaggaaaggaccctggtgcttcttcttcttctccaagatggagaagctctgagtttgttatgaaacccttatcaagtttgagatatcccattgaaccagctccttggaagcaaaccgagagaaaccggttttctcaaaagcaagcctgcaggtctgtgaaatctctgtcacagtcgatggagggaaaattgaaagatcttgaggttaaacattcgggaaaggatctcagagctcttaaagatatattagaggcaatgcaatcaaaaggtctctttgatactcgaaagcaacaacaatgctcaaacttggaagctcaaagagattacgaactggcagattctgcaacttctaagcatgattcaatagacctgagaaacccggtgattccatccaatatgagaggtccaattgtgataatgaaacctgccagacttgttgaaaaatctggtatcccttcatcatctctgattcccattcacagtctatccggtcttaataagacctgcagagaagaacctgtaaatgttagaagaagttcaacaagtagaaaggcagtaaaagatcgtagtcctggaaaccaaagagctgaaccatgtatcagttctgacaagaaatctagcagcagaaacgtgatgtcttctcaggtttacaaagaaaagcactttcaaagaattcagggcctgcaagttcaaagttgcagcagatgaagcctgagcatgac

SEQ ID NO: 29824 - DNA, 2103 bp, Arabidopsis thaliana landsberg
atgtaagcctcttctgggtggaagtagactgttggtccgaagtgttcgataaccgcatggacctggtcaagatttggcatcgcgtgtaaggtcggatcaagattctttaagcatctgatatcagggaccgtcctctcagacgacagatcatacgtgcagcaaaagaatgacccaacagcgacaccttgtgacagcatccctctctcgcaaggtcgggtgctccatacactaaaaggagaactagagccgttcgacttcttcgaagaacccacctcaagtatcatctcagaggtttcacaactctctgtaagatcctctcttacacatctgacctcctctgtttcaggttcacctggttcatgggttacaataactcccattgctctgtaaccaaccggaggattaggtagccagaaataaccaccaccatttttctctgaatctgcactccaaactaaagaataactcacaggctttttcaagggcgggaaatcatcagcattgacggctttgctagtccgagctgcaagtacataacctctcaagggctgatcggttggctggcaatagtgaccaaggcaatggaatccttctggaatgtcatcggctctgtaaaatgtagcacgttttgatttgtcgtgtgatgaatcagagctccaaactcgatggaacttggtgattttcaccacttctatttctcctaggctaattcttcctgtggcaaaacctttacctgcaaagagattgacagtaacagaaaagctcatcaatatctgcatcaacgaactaaaaacacttatatatataccattgtttgattgaaacagtttaacatgaaggcgctcaacttgatgcattcaaaagtacaaattcatcagcttcaaattcattaccaataccgagatttatttccatcaaacaaaacttaagtttttgtcccatataagagtattaaataacatgataccatatccatctactcttcaacacatttaagatagagcctttttttctatgatcagagagacaacattatcattgcttacattattgagccaataaaacttaacaaaaccaatcatatctaattatagcaaaaatagaaagtctctttaaggcttgaaattaacttgtgtatacaaaaatcttgaatcagagtcaaccaaagaagaatgaacaagacaagtagacaacggaacaacccatgcagaatattccaaagcatcttcctcagtctaccctttcaaatttcaataaaccagaaattaattctctctctaaacaattatataaaattaagccaaacaattagataagattgtcattaacaaggaaggatccataaataattaaccttatcttatgtacgcatgaaagataaagtatcgatattataacttgtcagctcaattatttgattagaccaagcctagctgaaaaactcaattccatatacagaatcttgcaacttcaatttgaaattatagataaattagcaatttccagtaaagaaagttttttgtaccttgcggccaactaggaagaggagccggaagtgagaagggctttggctcggacgattccgaatccaactcggagattcctctgctccagtaaaaacaatcacacccaaacatcttgaagaaatacaagatttttctccagaatttggaaattaatagagaccccccaaaacccacgagctgatttcgagtgggtgaggtttagattcttcgattacagagaaatcagccgattgttcctccgggaactgggaaaatcaccgtttcctatgcccctctctctctatctctgtgccctctctctctacctcaatttgagagaaatttgaaaagcagagagcttacgactatctcgacattcacggcgaagagatagagaggcgttgaagttgtaattgcgtaagaaagaggagaaggttgatgatgaagttatggtgtgttaatgcgtttctcaaaaagctctcttttcttttccctttctttaaaagcttttcacaataaccccagtattatacaaatattcaaattagtccatttaccagaaatgtaacgggaaagtttattcatacgttttaacctc

SEQ ID NO: 29825 - DNA, 16168 bp, Arabidopsis thaliana landsberg
aaaaccctttgacaatcttctgagcacgtgacactcttgagatctgatatagctttttttattatactgagtcatcatatggtggctgcttgtttgcatcattgagaacatacatctttaccatgtgttaatttgtagtgtccaaccctttaaggtgtaacctgattctaacattctgcagtattgatcatttcggaatgctgtgaatacatgaaagcgtcttgatataagtttttcagttaagctagaattccaattgatggggtattcgacgtggcgatgcatggaagcgtttcaggatatcttctagtaaatgctgaggttgagtccatgggaagagctatcgatagtggaggtggtattggtgttaaaacatctccgcgccgaacagctattgagaaggctcaagcggagctaaggtatttcagattgagacatcttgatcttctgcagtgtgtttaaatgctctataatttctacagctttctattatttccaatgtgtaacaaagatgcttatttcaacaggcaagagtatgatgttcgtgaggaaaggaggagagaattggagtttctagagaaagtatgaatacctatttccctgttctataattgttttgtgtgtgtgtgtgtaagaacttatgatgacaagcctttactcttctatctgcttcagggcggtaatcccttggatttcaagtttggtattgcaacttcacatagcgtccaatctacatcactcacagatcagcaagcagagcattttgtaaacaggtacattcgtgtttggtgtagttcccacattaatttcatggaataactcatcattatttgcccataacccccacagtgaagtcaaagatagttttgccctgactgcctcaccacatggtgactcggtggagagtagcggtagacctggagttcctacaatttctgaacccaatacaggagataatcttttactgtttgattctgaaaacaagtcagttgaaggggaaagaaatttgagacatcctaataggcaaaacagaacttctgagtcagaacgatcttccaaagcacacaccaaccagaataccaaagaaacagaagattctgccatctttcgcccgtatgctcggaggaacagatcgaagataagtcgggatccagcacggtcaagctctacggatttagttcagaatcgtggtggtcttgcaacgtctatatctattcgcagaggatcagtggaaggaaagggttgcattcccgaagcagccaatcaaaaggatatgcatacaacttctgtatcttgtccagtatttgcaaattcaaatggtaatatcgttccgaaaaatagagtttccagcaattcgctgaatactaaggtggatggtgaacctgttgtacgagagagtactgctggatccaagactagtctattgaaagatgaagccgacatttcatatagtaaaagctctgcatatttgccagttggagagtctggccttgctggggagaaggcacaactagtttcgactggtggttctcccaaagctgcaacaatagctggccagaaaaatagttctacccaactgaatggcctaagagattccacggtagaggaagaaagcttaacaaatagaggagctacagggactaatgggttagagtcagagtcttctcatgcgaacaacgtagaagtaaatgtagataatgaaagagatctttataaagtggacaaacttgactctcatgaaatctctatgcagaagactttgagagtagaggggttactggatcaaacagttggtgaaatgaccaaaactaagattgaagatgagacaggtcaatctaccaccattatcagtgagtgcattcctgaatgtgaaatgcagatgaaaccggttaaaattgagaatcaaagtcacagaagtaaagctgagatgcaaactaaggagaaaagttccgagactgagaaaaggcttcaagatgggttggttgtactcgaaaatgacaggaaagttggtagtattttacctgaaaatcctagcagcacgttgtgctctggaattcctcaggcatctgtagacacaagttcttgcacagttggcaatagtttattgtcaggaactgacattgaagcgttaaaacatcagccgagctcagatgcagttatgttagatactgtcaaggaggacgctattcttgaggaagcccgaattatacaggttttctttttaatcttgacttgatgatttttagctatctagttttcgtagaagttatgatgttatgtacctattcatctttttatgtatgacataatacattaacaggcaaagagaaaaagaattgctgaattatcttgtggtactgcaccagtggaggtccgtgagaaatctcaatgggattttgtcctcgaagaaatggcatggctggcaaatgattttgcgcaggtctggtctagttaaattatctttctaacataaattctatatatctgcatggaaaatgctgcattttgtggatttttgttctgtttatttactacggcgtctggacattcgtcttcttaaatgagcttgtccacttttatgttactggaacatttttccgggactgttctaattgcattctgttaccttttttcttttcatcttctaggagcgcctttggaaaatgattgctgccgtacaaatttgccatcgagttgctttgacttgtcagttgagatttgaggaacgaaatcagcacagaaagctgaaaaaaatagcttcagtcctatctaatgctatcttacaattctggagttctgtggaggccgaggttcctggggagctggaggagacgagcttgggaattgttaaggtatttgactgtctgacctcttttatggtttttgatgacaatgatgatcatatggttctttccttttcttttaaattagaattatgcatatatatatacattcgttgaattaaagtattgacaacactgacattctgagaaaccatattattatgtttgtgactagactgcaaaacaacacaattctactgatatttccttcttatgattgagaagcctgatctttcttatttgcttgaattgtctttgataattacctacaggagtctctggttctgtcgctccttatgttatgatttttgtaaaacttaatggtatcatactaaataataccttggttgtatgcaggagacttgccaagaatctaagtgtttgaatggcagaagatgtttagctgcgggtgtcaaggaatatgcaagtagatttttgaagtacaacaactcttccatctcctatcattcagctgcaccgtcaacacctgacaatatgtgcgacccagaaatattggatatatctatggttgatcagcttacagaagtatgaacttctgaaaagattttccgcagcctcagttgaacactattgttgtggatagttctacattattgctaattgagctttattactgtgcaggcaagcctcttttattcagttccatctggtgcaatggaggtgtaccttaagtccattgagtcgcatcttacacgttgtgaggtatgtgagattgttctatgctaggagctcgcatattgtaaccttgatggcgtatattttcctgagaatatatatctgttctccaaagatatttaacagtatttctctgttcccagaagtctggaagtagcatgcaggaggaggttgatacatcagcctatgatactgctggaggtatgcacaattctgggttgtttgagcttcgctggttggttaaatttttgctaattttttttctctaattgtagatataggatataatgttactgcgttcgatgaggatgaaggagaaacaagtacctattatcttccgggagctttcgagtctagcagatcatttaatataagccacaaaaaaaggaagaatctgatgaagtctcattctgcccggtcatatgatcttggggacgatttaccatacgtcaacaacacaggtggctctaactcatcaagtttgatagtaaaaaggcctgacagtaatattaatgccggctcagttccgacaaggcgagtgcgcactgcttccaggcatagggttgtgagtccttttgggtgtgctactactgggaatttaccagtgccctcgaagacagatgcgtctagtggggatactagttctttccaggatgagtatagtagtttgcatggtggatcggcagtccaaaaaggcacagaggttgagtcaagtgttaattttgaaaagctgttaccttatgacatggctgaaacctcaggaaaacctaaaaagaaaaagaagactcatcaggtagttagaaatatcagcatatctcttactattgcagaaaatagttgctattagttttagttgacattggattgcaattttcaatttcatttgttgcagggctccgcatatgaccaaacttggcatctcaatccgtcagtccatgttgaacaggtgaattcatgataaaatcctaagaatcaatttgaacaaatgtttagggaaaggcgagtttaggtggtgtgaattaatcaatattattgcttgactagcgtgataaaataatttttgcctcttgcttaactggtttgatacttgagtcctactctttggattaaaaacaaagttattttttgtttccattttaatcttgaggaggtgactattaaacagtttcctattatttgaaatgagaactttaagttatatagttggtaaatgtttaccatttagtagtaattgacttcttagaaaggattctaattcatccttatttgggcagaaggaccactggaagaagcgaccagagaataatttcgatatgaatggtattatttgcaaattcattttttactttgtggtgcattgtagttcttcagcggctgggggatcctcagcctctgcctgtataaattaaacaatactcctagaggatatcatgttttaagcagcatttttacgtacatcttatcattaaccaccaattatacaactaaagcaatgattatcgtttataattctgtgacatattttaattattttttgtaaggtctgtatggtcctcatagtgcaaagaagcaaaagaccaccaagcaattggtagagaataattttgatatggctattcctcacactggatcgattccttctccggctgcttcccagatgagcaatatgtccaaccccaacaaatctatcaaatttattggaggtcgtgataggggcagaaaaataaaaggcctgaaggtatgctcttgaaggtttactaactccattcactttgtttaaaatatctgttttaaactagaattttgtttttctcagatttctcctggtcagcatggttctggaaatccatggtcactatttgaggatcaggttttttattcgtcatctttcattaacatcgatgtactgttggttgctttatgagtatctaatttattttttcctaccatataggcgcttgttgtcctggtgcatgatatggggcctaactgggagctcattagtgatgcaatgaacagcactcttaaaattaaggtaagtgcctgttgttttgaaaaatcttgggattctttctttggtacctttcgaacagagtggcagagctatacttcaatagttttttttttttctattctagtgaatggttgtgttggatattgttgtccaggttattgctttctcgtatcagtgaacaactggtatttgttactggctgattgatttttccactgtttctccagtgtatatatcgcaatccgactgagtgcaaggaccggcataagattctgatggataaaactgctggtgatggggctgatagtgcagaagattcagggaattctcagtcttatccatccactttgcctggcataccaaaggtttttctatagctctgagatggtgaacaaagtgtcttctatgcttagactaattaaatgccctggatatgtctgtgatattcagggaagtgcgagacagttgtttcaacgactgcaagggccaatggaggaagataccctgaagtctcattttgagaagatttgtttgattgggaagaaattacattataaaaagacacaggttagttcaccaactactttgttactgtttccaagcttgtaacctaaaactagtggatttctttctgcattttttggctagtcataattcaactgttgcctggtaatagggatagttcgttgtgtatgtactgtgtagtatactagcatcaaggagatgatatgttgggtgatggtagtccaaattttagtttttgagtcccttgtgggcagaatgctaaagggttcttatagtgccagagagtgttatcggggtttctgtggtttcttttgttcacggaattcagttttcaagttgcactggagctggtaaatgtttttgcttatagatatggaatttgagaagataggtttgcttaattcagtttttaatttgcttaataaagtttatgggtgaaaggcatatcttaatcacttcgacatacccaggtctgggggttgggaagtatagctgcaaatcttagcaaagatttgctgaagtcacattgtagtttgaagtatgaatctactaaggacctaaatctgttttcttgttgctgcttttgtatttttgcgactgtttcatctatcttcaagaatgatggtcgggatcccaagcaaatagtaccagttcacaattcacaagtcatggctctctctcaagtattcccgaataatctgaatggaggtgttcttacgtaagttctgttgtttccttgtattcacatacatcttgacttctactcttgcaaattctaatattttgctactctccggatgaaggccccttgatgtctgtgacgcatcaacttcaggtcaagatgtattttcacttgaaaatccaggtcttccaatgttgaatcagggaacgccagtgctccctacttctggagcacatccatccactcctggatcatctggtgttgttctgagcaacaatttgccaaccacatctggcctacagagtgcttctgtcaggtagagcttttactgaatgatttgttttggtgaatgcacacgtctgtgaatctccgctcaatttacttgagggttattacttcttttgattgttgatatatttttttctttgtagggatggtagattcaatgttcctagagggtctttgccacttgatgaacaacaccgactacaacaatttaatcaaacgttatctggtagaaacctgcagcagccctccttatcaactcctgcagctgtctcaggatctgatcgtggacatcgcatggttcctggtggaaatgctatgggtgtaagtggaatgaacaggaacacacccatgtcaaggcctggttttcaagggatggcctcagcagcaatgccaaatactggtagtatgctttcctctggcatggtagaaattccaaacactggaaatattcattccggaggaggagcttctcaaggaaactccatgatcaggcctcgtgaagctgtgcagcatatgatgcgggtaagctacttggatttttttactgctacgctaattattacacttcgttttacgatttctcacatgtgggaacttaactatctatttcttacttcactacctggacttatttatctcgctctttgtttagtttgtagacgttcagcgcttctaatttttgtcaaccgctggtcgattgtcattttgaaactcgttgacaacattacgaactctacaatggtgataaaaactgatattcatgagtttcagatgcaggctgctcaagggaacagtccggggatcccagctttcagtaatttgagttctggatttaccaaccagacaactcctgttcaggcgtacccaggccatctttcccagcagcatcagatgtcaccgcagtcacatgtgcttggcaactcgcatcatcctcatctccagagcccaagtcaagccactggggcacagcaagaagcatttgctatccgtcaaagacaaattcaccagaggtatttgcagcaacagcaacagcagtttccagcatctggttctatgatgccacatgtacaacaacctcagggctcttctgtttcttcttctccacaaaacagtcctcagactcaaccacctgtttcgccccagccattatccatgcccccggtgtcgccctctcctaatattaatgctatggcacaacagaaacctcaaaaatctcagttggcgcttcatggtttgggtaggagtcctcagtctggtacttctggagtgaacaatcaagctggaaaacaaaggcagcgacaacttcagcagtctgcaagacagcatccacaccagcggcagccaacacaaggtcaacagctgaataaacaactgaaggggatgggtagaggcaacatgatccatcagaacatcactgttgatcagtcacacctgaatggccttaccatgccccaaggaaaccaggctactgaaaaaggagagatagcggttccagttaggcctgatcagcagtcaagtgtggggactaccacgagcacgaatctgcagtctaaaccatttgtttcgcccttgtcttcaaatcattcacagcaactgtcaaaatcattccctggtgctttgcctccatcccctcaacaacagatgcaattacattcagacaatagcatccaaggccagagctcacctgcgaccccatgtaatattttatccacctctagcccgtcaattgcaccagcggttgcaccttctaaccatcagcatttgttgatacaccaaaagcagcgcaatcaagtgcaatcaacagctcagcgagttgttcaacataatcatctagggaactctgagttatcaaagaagtcccaagctgaacgcatgccacgtgttccacagtctgtaaccaatactacccaaactgttagtatgggtacgaccaagggtatgcctcaagcgagtaatgatttgaaaaacataaaagcagttggttctactgcggtgcctgctttggaacctccatcttgtgttgcttctgtgcaaatcactgcttcgaaagtagtaaacaattccaatacagattcagcaggaaatgatccagtatcaacaccgaaccaaggactagctcaaaagctcgggatcaagggcgttacacagagacaacaacagtctctaccttcagaagaaaagagaccgaaattgccagggaagccgactgtacaaaatcagaaacaccttgcttctgaggagcagcctcatttagaagaagcacaagaattatcatcttccaagcctcctgatacaaaagtggaatgagaggcatgacagatgaacctagaaccttgagtagctgtagatcctgcaaagcttaacgctggcccttaccgacaacaaccctgtacaggaacccaaactggtttgtgtcctccaccttcagagtcgggtctctttttggcattaacatcttgaagctgctggtggtctttggatttggctgagagtataacataacaaactctacagattgtggagtttgcagatttgataaggccagagggagataaatagggaagaagttggtggataggataaaattcatgcaggtctttttgcctcttttgatgaacacaaagagaagaaggtatatcataatgtaaattacccacttgcatcatagagaagtagtctcttcttcttcccatcttttggtttgggagagagtagaaacagtttataatgttttgtatagaagtctctactcctccatccttgtggcatatacttagggcccttttttaaccttttcctctaacttattctcttgtaggtttaggttaatttgatgaatgtatcattgttcttttatggttaaaaaaaaaagttcacttcactcccataaacattagcttacatagtgcatttcttcaaatccgttacctatgttacaaatctaaaagcaacaatgactaaatctctacgttagaaagaatcaaaagcattgttgataaattgaagaagctgagtttgagaactctgaatcaaattgattcttcgaatctccatttccttacgaagtctcacagtctctttagcaaactcaatcttcttcttctccattaccattactctctcagcaaacgccctaatctccgctgcaacggctcgcattcctttcctccgcctctcaccaccgtctccatcgttcctcttcctcttcgatgatctctctttttgtccccatgacaacaatcctccaccaactccagcaaatctgttaacagttccaggtcttctcaatatgtaattaatactcctcgatttgctctgtctctcatcttcttcttcctcttcttcgtagttattgttatcctcttcttcatcttcttcttcgtcgtctacgtagcgattattcgaactaggaggaagacgagtgagaggacgagctgagatcggagcaggatttgaagaatccaattcctccatttgattatagaaaggccaaattgagataggtcccatactctgtctctcagatcggaatcttttacgcatcttctcgatcttatgcctacactgtgtagatgtccgttcaacgccggaacgagatgaggcagcaacggcgatctcttcccagtgagttgattttagaggaccacgaccaattgcgaaccatttctctttgtatgattcgattaagaggagggtctcgtcttgagtccagagaacaggttgggtttttctggcgacggcggaggttgatgcggctaaagctacgacggtggtgtgcggtggtggagaggatggattcgtgggttgaggaggagagggtggttgtttctgatgcggcggagtagcggcagaattagggtttgaatcagagggaggagaggaggtcggcgaaggcgtcgccatggtttagtgtaacaatgttaattggtgcttcgggttttgtcagtttaactccaactcggatctttgggctttttttgtcttcttgttgattttttaaattttgggcccaacaaaaatttactagaccaacccacttagaggaagtaaaaatttacttctctttttttactcagaggaagtaaaaagtaccggaggcacaaaagagataaactcatgcagaactcctttacttattcaacacaatagtctaacttgtagggattcattgaagagaaattgactaattcttcctaacaactgacaagtagaacaaggagaagcaacttttctccatgaaacaaaccaagagtttgaggtgatgccttagcattcttcgaaacaatcaatcacttcagcatatttggtgagcaagtttatacccgagagaaagcccaaatatgtttactgggtttatattcagatagtcttagctaaagtcgatctaatcacttgaccatatgtttttttgttattctgtatcagatcatctagaaaggattgtgttcttttcccgcgacgaaaaattccctggaggcttcgataaagatggtcttgcttttgctgcaaacagcaaaacagcttatgtggtcagccactactgcagttatctctgtttttcaaccagccttccaagttgtgcctaggcaaacctgcgttgatgagatcctcctctcattttctctctaatcgtttctcgtcctcttcactgcaatttcctccttcttccatcaacggctgctaagtgagcaaaacgaacacaaaatttagttggaatatgacaagagatgagcgtgatgtctctcacatgtaatatatatggtttgagggtgaagtaatagtagcaatgcagacttcggatatgagattcaaatataatcaggtttcagcttggaagtttctgcagtgtcttggccagcacgaatgcattccctgtgttaaaggacgtcgtacttattcaagtggcagaaggaagcaattgtagcaaaacctgtcattggcaacaaattttgttcctgatttgatcattatacttgagtttaaaaaccagattctcacttagtagaaaacaaccctggttttgattgtattgagcatttctcatgaatgtaccataacatgtaaccttttcacaattggatcaatgtcatcacacaaaattagactttgagatatattacaagaaatcgaaaggtaactaaagtagaccaaacaacaaaccagattcatgtcaaaagtgctaagtacatacgattataatgatctgaaacaatagaaggaacaagttactaagaagaaagaggaacccaagtttctttagtttaactctttcaagaaattactagacaaaagaatcttcagaatctcctgaaaatcactgtgcgtgttaatgaaccaagttatagtcacaagactcacaacagacataagatacttagcagagacagagagcaagagaagagctactctgttccatggcaaagcaaaggactccacgacacctgaacgaccaaacactaatgttgtcgccttctttcaatccgttagcctcaacgacatcgttccacccacaaatcagattgtagttccagcttccttttcctgattccttcttcagctcccatcttttcaacatcacaccccactttacagaccgttgatccacgagaatcgctcccactccaatcttcttattgttgttgatgtcttcctttatgattctggactccacagacgtcaagaaatcgttttggagtaagttgttgaacggcattgagagacggttctgtgttgggtttatatcagtcacaaacagagtcttctcaaagatcagtttagcatctttggcttctttcatgtctctcatcaccttgacaagccacttaggcgtatctctcgctgtccctggaaaaggagcaacctttgccttcttgaatccaccggtacgtttcctctcttccacagcacgtctcttgcggcttgtgttccccgttaggcacaaagacagagggtttggtgggtctttcgtctccatcttttccgactcagccatcttgtaatcagagagtacgagtgatgaacaaagttcagaactagggttttgtagggttttcgcctccgtcttctcggactcagccgttttgtaatcaaagagtacgagtgaagtgcaaggttcagaactagagttttgtagggttttcatctgggaatcagaggtttgtgggtcttcgatctcagaatcagtcggcaactggttaagatcgataagcgatgaagaagtaaaagagataaaaccaccattaagcttttgttgtctcttcaccaaagacgatcttgttcttctcgggaagagacaaaatattctcttctggctttcttcttcagatacgatcttgccacgacgttgtatctcatcatataacaaaaccgccgcatccaccagtccatagaacttcgaccacaggcccttccctgaagccgtgagatgatcgtaatcgtgatacatactactcatcgtgaatttgtgatggaaccgaaaactcaagtttttctcagaccaacgtgaggcacaaggaaataagagaagcagagagaaatatgcgaatgagagagagcctctattgctttaaataaatagttacgctctctgcttagtgcttacattagatctagggtttccttttttctttgagtttagtagtttaattcttttaataggtaactaattatagccgttacctcccttgatttccttttcgttaatatggattagctaaccttattattacgatgtagtctctgtgtcggtgtttcctaaactaactaattttcatttctgtttctttctctctttacatgaccatcaaatgtaattatatttgtaaattgtgattgtaagtataaactaatacacaacactgtaaattgtaaaactcatctgtttttttttttttttttgacaatcaccactattggattatatagtatacaacaatgatttgcaatagaatcgttatggaaaaaaaaaagtatattccgaaatagttcactaattcctctgttttcaaacctaaagaaactggtacataaacactgcttgcttgctactaaacaatttgtaagctttttcctcttcaatttcacttcctgttaccattttgcctttatatatatataccatttgaaaaaccaaaaaccattgaaggataagtagtctaagtgagcataacgaacacagattttagttgggatatgccaagagataagtgtgaagtctctcacctgtaatatggttaagtgggtgaagtagtagctatgcagacttcggatatgagatccgaagataaatttattctgcaaatcaggtttcagcttgaaagtttctgcagtgtcttggccagcatgatcgcattccctgtgttaagcaaagaagaagactgtttcatattggtgcactcagagatcaatctcaagagtttcacatttaagaaggctaatcccttaccgttgaactgctctccttcaagttttcgaaacactcagcgagttctatttgttttgacgcggtcaaaaagagcgcctgtcaccattaaatcctaacttaagtcgaatacctggagagatatatagatattgaaacaaatcagtgaatgtctatagtttaccttctttgtcttctgcaaatcttgctcaatggatttgatacggtctaatgaatcacgaagtatatcttctttttcctgaggaatacttgagggtttatcacacaaaactgtgaccatggtctccagattttgcaacctcagccaacatggatggacctgaggaggaggaacttgttgctgggagactgaaacacttaactccggtctcaattggttctctggttgcttatttacaagtcttcccaagatccggaacatgagacatagactgccaagaagttggaggataaaacgggccaaaaaacttgcaactttctgaagagaggtcgttaaactcctttctactgccagattattcggtaatggacctgcagaaaagtgtttagagattattaaaatcttgtctaaaatggatcatgacatgagcacacagagtgggtttaacctacttgttgaatcagactgttccattctcccaacaccaactgcttcagcttgattgctcagctgagcacgtttgtcctgcatacataagaatgtgcgataatcattcactgacaatattagaacatgaacaaacataaacagactatttatatacgtaaactaacatgttcaggatgcgattctctctccctaacatggcctccatcaggtgatgacatatctgtgttcacatgctgctaaaagaaatgggaaggtgatattaatacagaaagtaacagaagccagtagctgttacaagttgactagaattaatactaacccgtaaggaaaataatttagctacttccccattctccagaagccccatttcttttggtttgtacattgcatctctcgagcgcactagctacaagtatgatgcaaaacagagactttatcatataatgcttttcaagagataccagtgtctacacaaaaatttgagcagaaaagaatcatactttcattatctccgggtcgttccaaggccccttgttgaatcgcatacacccaccttcatgtgcacacttgcaatttccacccagaaactcaggaagctcactgtgtaaagaaaataacagaggtttttgtctcagcctccaaacaactaagcaaaagtggattgtattgggccgccaccaatacagtataaattctgaccttggatctataatttcaagaaggtgactgcgatatttgtttcccaaaacctgtgcaataaccaatgtaaattgttggtcaagttgaagcatctcaaatgtcctgtataagtcttatctatgtggaagatgtaatacatgtatcttagaagtagttttcgggtcgagaaagcctttcacggtgttccaaacaagcttgaatccgtttccagcattaataatgtacatctgattcaatgtctgtcttcagtgaaccaaaaccaatgttagtgttcttcaacggtgaaaagtgtataggttgccattcaaataactttcatacacccacctcaggatagttgtcaccgtcaattttctgcattcgcattaca

SEQ ID NO: 29826 - DNA, 2672 bp, Arabidopsis thaliana landsberg
aaacggttatagaagaagtacaaatgcagatcaggtggatgatgttgatcaatctcaatccgatacaatcacatgaatttaaaacatagaacgtgattctttcctctcttttttttctacaaaagaattatatcaatctcaatgatctgatataatcatatttaaaacgtaaaaatatgattctttcctgtctttagaaaagtaatatcaatttcaatatgatacaatcatacgtaaaacgtaaaatatgattctttcctttaagaaataaaataatatcaatcacgatctgatacaatcatatttaaaacagaatgtatttttcttgcctgttttatctttaaaaatatcaatctcaatttgatataatctgcaaactattgtccctgaattcacataggaaaatggagggagtacttgtagcgcaagtcttttgctataggaatccagtgcagtggctctgtataagcaataatcactcgagcctcttagccccttgagtctactcaagaactacttgatagactagcgacatggaaatttgttcgttgtcttatcttggttcgtgatttgccatcttggtcatcagagcggtttcctaacataatgggctattttgcattacacgctcggggttacgaatctttttacacccaaatcagaacgttgttgggcagtcaaagcagctccaactacgtactaatatgggtgtaaaattgagtgacttgtttgagaatgcaaaccgagctaacaatacaatattttggggaaacaactctggcgaagaagattgtaaatctaggctcaagaagtttagttgcacactttagattgggaattatcaggctcaagcatcatgaagaatacttgaggatgaggttaacaaggtatggttgacaagtaaaatcagagaatacagaacaaatagaagtgagtaagttcttgtttaatatctgcaaatttgtaacagagttcttgcttctatctcaagggtagactagttttggttagtcgcattgagcgacaatgttttttgtttgtcttttggatctgtagcagaaccaagaacaggatcgtgtctgagtagtctattgctgtttgctgctgtcagtaccatcataccgaggaagatcaaaactgagatagatgagaagataagcattaagccagaaccgaccggatctttcacctcttgcgcatactgaaccgagtctaacgcaagaaaagtgagtgggaacgagtaagcccaccacgcgacattgaatcttttcattgatttcttgaaaagatttggcctacagacctgaaaatgttaaacacaaagaaggtcaatatatgtttgaaccttgtttcttaataagtgtgtcgataacttaccagggacatgaagatgaaaagtgaaaggaagaacaacatcttcgctacggcatcaaaagttccacaaatagagttccaggctagacttgccatggctggtgcagcgacgaacaagaagaaaattggccttaacttggctgggaagttgtttcctcccggtaagcgttgatagagggtgacaaagatgaccaaatagtgaaccattccgagtgagaacatgcatagagcacactctttccaacccatctctgctgctccccgcgcagccactaggtttgcgattaccgatacttggcttgccgggtttgccattatcgacaaaaaccttttctctgttgtgaaccattgaccataaagctttgtgtctagggtcaagactggaacagcaaagatccagaatagtgtctgatataaaacgctgtgtggttctatcataggagctgcttgaagcaatagaaggcatgaaatggatggagcgtaaagatagttcactccaatatagtgcgagaactcttccttcaccatgtcaaagagaaaaatacacttgaaggcatacaaaaaacagagtgatacttgtgttgcaagtgctaggtaccacaggagataatacgccatagacgggagttcgctatgcaaatgcaccataatcttccacaacaatgcttggctacatagagaaaggcttattctgaaatatcccgcatggagactactcaaaacagacatcaggacaatgggttcggcatctgcgaggttagtctttctctctttgcgcctcgatattgtgttatcaatcatgatgtgaatttcttgactaggtatttccatctcggtatatcgatgaaatagagcttattttgctctatgttgtgctaacctataaaaaaaagaattcatgtacataagcataaggcagagaaatcaaaagtacaaaatacaagttagtgttggacattcagaaacttttggtaagttcaataacttgtacagtacatatatacatatcaacatctttttcttttttctttcgacatcaacactttttttttcttttgatgaagcgaaaattcttcttcaagcttcatgaataaacatcaaaccatttcaattgcttatatcatcataaattctttcagctgatttataactttaagtattagttccttataattcatacaaagtactaaatgaaatatagcttatataatgtaaataaacctggataatctgcagcgaaacgattataaattggtttaatacttaaattggctgtgcttcgccagtgtctgcacaca

SEQ ID NO: 29827 - DNA, 923 bp, Arabidopsis thaliana landsberg
tttttctggcagaatattgtctgtcgcttcggggtacgaagcaatcactgtagataatggaacgcagtttgactccgaagctttcagaaatttctgtgatcaaattggaacgaagatccatttcgcatcagtcaggcatccggagtcaaatgggctcgttgaaaggtgcacgcattataatgacaggaataatgaagttaatcttcaatcaacccaggggaaagtggccagatcagttaatcaaagtggtgtggagccacaatacaacaacatcaaggtctacaggctttaccccattcaaattattattcggtgacgaagcaataactccagaggaagcaaaagccggatcaataaggatagtagcttcggcagaatcagattccgaagctgtttattctatagaaaaagatgctttagaagggatcagactgcaagctgtggagaatattaataaatatcaagctgaaacagtcaaatggtgggatagaaaggttcggctaaaaaatattgagccagggcacttggtacttcggagggtggccaacccggaaacagtgggcaaattgcagttgaaatgggacgggcctttcttagtagcatcttcgtcaaggcccggttcatacagattgaaagatatggacggcaatgacattcctaggtcttggaatgcggatgagcttcggcgatattatgtataattcgatgtaatttttcacatttttatttttatttcttttttcatggcacccttttcctttccaaagggggagaaaggtttttaatggggccagcatatgtaattccgttttttagacttataagagcaaaatccccaaaaaatgtaaatgtaaaagctgagagcgcccatcgagtgcgaaaagtaaaacgaagaagctccaagacgttctaagggatgcaga

SEQ ID NO: 29828 - DNA, 6388 bp, Arabidopsis thaliana landsberg
agaccaaggttcacttcaatgaaagaatcaacgataaaataccgttttttggttgaaacttggttataccggcaaaaatgcacctaatctcatggtcgcaattctcaagagacaagaagtaaagcaagctaatatggtcctaatcctctccaaatctcgaaaacaaaaaaatcaggtctacatctaaccgagttcgagctaaactaataagagagcttttactcccaaccagcagctggaacagaagcagcctcccatccagcagcaacggtaactgcaaaaaggaaacagcaaaaacattagaacatttggtgtttagattccgagagactatgatgaagaagaaactaaccgccaactgcaggtgcagcagaaattggctgttcgacttcaccagaccatgcagcatcagatatttgagcagtggtccactggtcaccaccaaccattccataatcggcctgtacttcagcttcttcatcaccctcttgctttgcttcttcgggctccctgtagaaaaacagatccacctacacaacagaaacaagtcaagatctttgtctggtgttggagaaacacaagtcctgatagtatttctagagtttaccatgacatcccatttctgagctgcgagaatggttccacgcatttgaagaaccatacgagccaaaagccagaacaagcaaccaatgctgtgttttcccttgttgttagcaggaataccaatgtcgacaaatcccattggagaatccgtgtcacagaaggcaatagttggaatgtttcccaaagcaccttccttgattggctggcaaacacaaaccaaaaccgcattagcaaaaccaaaaacctacacagttaaatcacaactgatgaggtaaaacacattcaatatacctgatggtcggttcttgggtcggtgagaatcaacaacctaggctcactgaaagaagtctgcatttggttagtgaaagtaccaggagtgtgtcttccagcaatcgcattaacaccagtgtactgagcaaacttcaagacagctctttgtccataaggcctggctgattgaacaattatgtcttttgggttttcgattgctacaataaccctagcagccatctgaagcttgtcccatgtctttccaagattgattatgtaaatacctgaccaaataaaaaaaaatccaaacttcataaacaaaaaaaagatccaaaaacatcacaaaactctatgaaaccgagaattacagttgaatacccaacactatggaaactggagaaactatcaattcgtaagctacgatgtcattttatgtggatgttatattactgtcttatagtttagactttagagtgggggatcaattagcagcagtctaaaatctttctacaagatatagatagttcattcaaaaattcgcatcttcaaaagtgttttatcagtattaggatagggttttactgaagaacggcacaatagtaaaaagttgtatatgcagaggaacccctacttttaaatagttcaactgatttgtgtgtaggacgagaaaccttccatctttcttaacctagtgctactctgtgagcaggtgccatggtactcgcagatggcgggttgtgctgtattgatgagttcgataaaatgaccaccgagcatcaggttttttcttatcggcaatgtcattacttctgatgttgacatttttctcattacttacatcactttgcaacaggcgttgctagaagcaatggaacaacaatgtgtctctgttgcaaaggctgggcttgtagctagtctatcagctcgaacttctgttatagcagcagcaaatcctgttggtggccactacaagtaattttcttactttgctatctcatcaatcatcattgtgggagtgtttgaaatatagtaacgacaatgtatgttcttgatatatacattgtctttatgatgtcatgtcagccgtgcaataactgtaaatgagaacttaaaaatgagtgctgcccttctctcacggtttgatttagttttcatattacttgacaaacctgatgagctactcgacaagcaagtctcagagcatattatgtcggtgagtctctccatctcagagccattattgttgtagagcatgcctcacaaagatattagcagattttcgcatttgtaaaccttctataaatgcttggtggataaaagacatattttagtttctggaaagactttcttcagtctacgcattcatagccattaatataaaatcgtacctttgaatttttcttgcagcttcattctgcaagtggagaaacatcacctgcactaaagaagtttaaaccaggtccactttcttttggttgttgggtatatagctagtagaaagacgaccttattgaagataaattcttgacttcttgtttaatagtaaatgcagcatcacagaatgctgggtatgcaaacatgcatgcagaagggaattctctactttcaagactgcggttggactctgagaaagatgacgacttttctccggttcctggccaattgcttaggaaatatatttcctatgcacggacttttgtcaatcctaagtaatttgatctatctcccagctgcaatgactaaatgcttgcgagctaatttagatattacaaataacatctctttatctgttcaggatgtcaaaggatgctggagagatcatacagaagttttacttgaagctgagagaccataacacatctgctgattccacaccaataacagcaagacaactggaaagtttggttaggcttgctcaagctagagctcgggttgatttaagggaagaaataacagtccaagacgctatggtaagccagaacatgaaatgattgtatcctttctctgtgcttacatgcatatgtttgaccatacactgacttagcatccatatcatacatgtataaaagtcttatgttctctgatctctattggttgataaggtaagcagctagcatgaaatttcaattcaaatctgcattgttgtgatcttggcttggtcaactgtcttgacttttttcgttggatttgcttttacaggatgtggttgaaataatgaaagaatcgttgtatgataagcttatagatgaacatggtgttgtggattttggtcggagtggaggaatgagtcaacaaaaggaggccaaacgcttcttaagtgctcttgataagcaatcagagctgcagcagaaagattgtttctctgtttctgtatggacaacttgctcgacattttgctaatggcgcttctgacattatattatgatcaatttcttattcaaaaacaatttcactgcaggagatgtatagtttagctgatagaatcggcctacgagttccagacattgatactttcctagagaacctgaatattgccggatatttactcaagaagggaccaaagacttaccaggtatattcctccacctaactcagaaactagaatggtcaatcatagatggataaaggatttgatttagttttcttacactgcttaatttcatatacaggtcctttcctcatcttattcccggagtcagtcatccaggtcaagatgattagcattccgagtaataaccttcctttataacagaaacattttaagtaaatctagcatgttcattgcaatagtattgttcatatctaattatgaacctgatcatcaaaatcagtcaattatatattacacaatgccagaaactccttagtattatctcatggacttgggttgaatgtttatgttgttgttcactcacacctactgaattacaactacggtagaacctagtatacattgttgtataagagagtagcctgatcaatatattgatctagtcttctcttggacctaacttccattcacttccataataagaattaggcaaaccgagccaaaacttgaaagcttcagccgctctctttcgttctacccgcctatctattctggcttgtgaagcatgtttgctagtgaacatcctcgagtgcatctccacatagatcttcttgtacttagtcttattcggaggtatcccattctcctccatacatgcgattatctccaatgccttcttgaaaaaagcagccctgacacatatatccgctagtgtatctaacaacccttcatctggtttcagcatcggaggagcaggatctgaagaagaatctgaaggtgcttctttctttttcaccgcacacctttcctttatctccttccaaagcaagagagcatcaccaggtttcctcgcctgcgaaaccccattggctagactcccataggttgccacatttgggtaaaacccgttttctttcattcttgacactactctgtgagcatcctcaatcaaacctagcctgcagtacccttcaaccaacatgttccacgcgatcaaatcaactttgacccttggatcattcatcatctcatcaaacaccctattccccaacttgggttgccccgacattgcaaaagccttcatcaaagttgtgtaactattcttagttggtgcaatccctctcgttctcatttcattgaaaaacgctagagctcctgcgctatcatctataagaatgcatccatctattataatgttataggaaaccacgtctggctcgatccccgcatcttcagtcatctctcttagtaaatcctctgccctatctatctgcaactgcttacaatatcctttgagcagaacattataagtaatcctatttgcaggaacacccatccgagccatctcggctaacacttgtcttgctctatccatcaaccctgcatttacaaaagctgacacaaccgtagtgtatgtaacttcatctgggtgactgtttctatcatcttgacgcctcattgcctcaagcattctagctgtgtctgccacacgcccattcttcatataacctttcatcaacgtcgtgtagatccttgagtctggtgcaaagactttaggcaacaatggtggctcaccactcggatcaaccgagttaggtagcaatttcttgaacacatctacaaccccctcttcacttacctcatcccgagccgaataacccgagtcttcatcatcctcaaacgcatcttcatcatcttctgcttcttcctcttctttctccttcaaatcctcagcgttgcattctcgtagaaccttacaaagatctctccttttctccctcatcgcttgaacaatcctctcagcagttctcaaatctccaaacccaacataagctgcaacaagagaatgcattgtagtcatacaaaccttaatccccttgtcaataatcctttccaacacaaacacaatcaattccttccgaccaaccctcgcacaaagcttaatcataacattgtaagtcaagacatcaggctcacaatcccactcagacatttcctcgaacaacttccaatacttgtcagtatcaccaaggttagcacaagcgttaagcaccgcattaaatgccgccgtatcaggcctagattgaccaaccaaagactggtcaccaaatcgtttgactcgtcgcgtaatagcgatgaagagtttgatagattcttccggaccatcatctccggaagcagagagactagctactgcagctgtccacgctttaacatgaggtaaatacccagaacgaatcatggacttgatgacggagacggcgtaaagtgtttggccagacttcgctgcagccatggcgaggagaccgagggaattagcgtcaaggcgatgcagctggcgttcattgcggaggcgcgtgaggatagattgtgcgcgcgtgagactctcgggtttggattgataagataattgagaaactaaacggctaagacaagttggtccagggagatgagtggattgaacatacttagcccaagcttcatcggtttttctattgcggaggagaaacaaaagctcttggtcgttgtgtgttgaatacgcctctgagggagagcccaagaaagacgagaggtcttcggcggagctattagcagtgccggaggcggaccgttggaaaattggtcgaccagcgttggtgaatggtgggtttatagagcagaggtttatggggttgtggatgagagtgaaagataccggaggggttaatgaaacgggctttgggtatggaggaaacgacgaagatgatgatgacgtcggaggtcggagaatgttcattttaggtccattggagagagagtgtgtgttctgtaatgaaaaaaagcctccaaatggattattcgagtggaaaggagttgtgctacgtcgtcgttttgagttcaagcaaattaatatctccattttattttttcaaaagagcaaaacaattataatgatgatttgaagaaattgtaggcaataatatc

SEQ ID NO: 29829 - DNA, 2232 bp, Arabidopsis thaliana landsberg
gcaagtaagctatactcttgttttcaagaatggttgcctgcgacgcaataaagcccaacgagataaccattctcgccattctcccagctgtttggaacttgggagacttaaagatgtgcggatcagttcatgcttatgttgggaaaagagggtttgttccatgtgatatccgtgtgactaactctctcatcgacgcttatgcaaaatgtgggtgtattcaaagcgcgttcaagtttttcatagagattccaaacggaaggaagaatcttgtatcgtggacaacgatgatctcggcgtttgcaattcacggaatgggaaaagaagcggtcagtatgtttaaagacatggaaagattaggattgaagccgaacagagtgaccatgatcagtgttttgaacgcttgcagccatggaggtttagcagaagaagagtttctagagtttttcaacaagatggtaaacgagtacaagatcacgccggatgtgaagcactatggatgtctagtagatatgttgagaagaaaaggaagattagaagaagcagagaagattgctttggagattccaatagaagaaaaagctgtggtttggagaatgctgcttggagcttgtagcgtttatgatgatgctgaattggctgagagggttactagaaagctaatggagctagagagaagccatggaggagactatgtgcttatgtccaacatcttttgtggtactggaagatttttagatgcgcagagatttcggaaacagatggatgttagaggagtagctaaacttccagaacattcacaagtaacatagcggagcatgtatatatttatgactccaatctttattgttttgatgataaacttcagaatttttgggagctctgttctgatcctcaatgttttgatcataaactcccaaaaggtgttttctgttctgaatggttttattggattataaagaaacgcaaacctaatcaagaagaccaagttcataattcattgtcataataacttcacaagaaaaaaggaaaacatgagagcattgctgggtgcaagtttgatagataataaaagaaaaagcgatgagaatctgcaacaagggtttttgatgattcctcttctgaagaaccaagcttatgaaatcttgttcatagaccactgggggttgcatgtgtttctgtgctgcgcttggattctcctgaagatgggtcagcaccgaatctgtgaggatgatctgtttcttgcatccccttttcctaaaccctaaatcctaaactcccaatcttcaatgagttttgatcataaactcctaaagtttggtgagctctctaacgaagtctcagttagctgagattacagtgacaaagatgtgtaaaatacaatggagctcaaatcattcaaagagattaaaaaagactaaatggatcaatgagtaacaagaacatgcataaaaatagttcattttttgaaaaaactttgcttcaatgggtgtcattatcaaatttgaatccaagtcagattttgagtagcttttacgctaatcttcttcacacaaaaaaaccatcaacacaaaaagatttataatttaaaattttatcggcccaaaatacacacatcaatcttcctctcggcccacgcttttagaatttttgtagatttaaaaattcagttggaatctaacggctgagatcacgtttaatccaacaaaccaagctatatatttactaaaacacccgagagatctgcttcttttgtttactctactctccacgagaagcacacttgttttttgtttatatcaccgcaccaaccgctaatatctttacacgtgtcaaatcttttgcttaaggctaattatgcacagccttctttctcccgttttatccaatactataacgccatgtcattctcaatgacaaatgtatctgacgtgtcggttacctattggattacgtggctgcagatttacacgacgtagcctaaaataaaatccatgagagcaaagctcacttgctagctcctctcctcgcggtatatataagctccaggtcttgtacatcttcatcatctgatctcggggaagctccgatctgagttttttttatcaatggcgaaaatgattcctagcctcttctctctaattcttatcggtcttgttgcgatcgcctccttcgcaattattttcgaggagcgctttgatggtatctaatttctacatttctatctctatactt

SEQ ID NO: 29830 - DNA, 2629 bp, Arabidopsis thaliana landsberg
  unsure (1)..(2629): unsure at all n locations
taagcgttatgtaattaaccaaaaagtaatattttccttttcattttggtcatatttcttaccttttttccggatattaatttcctttttttagtcatccagttggtctcaattgcttaatcataaagtcaggatttatttacttaaataacatagtattgaaataaaacgaatcttataaaaatgtgtttaatcgatgatacttttaaaagttgtaactatatacagtatactgttgatagccgttggggaatttcacattttgaatgccatgtcacatatgacaagtagcttttcgtgttctattattttccatcatagcttccacgcgcaagcttgaccaccgctattaaacttggtaatttagtataattcacatgaatgaattagtaattttgttaaaatgtgtaaattaaaaaaaagaaattgagaaagttctctaatgttcctttcattttgaccaaaaatatattcttaatttgttacctttcttttgacgttgcaaaatgatataaacggagtaacattttatgtccacacaatatttcttgtaatatccacgtaggatgaaatatccatttaaaccggtccacgtgtccagacatcagcttctagttccattgtacaataataataaaaaaaccttacctgaaccaaaaaaaaaaaaaaaaacgaactgagaagcgaagaagaaaatggcggcagcggccatggccgttcatctcccgaaacattcttcgtttcttccgaaacccaaacttccattggataaaaaaaccaactttctcggtgggtcatttaatttaggtcgacccatgtccgtaaaccgggaatttaacagtccggtgatggtctccgcttcttcgacgagcaagaccgtccttaccgatgacgtagacggcgatcaaagtaaacgcttttatattaacttcactggctttccttttcctcttggtcctttccttaaccggcgcaccatcagaaccgaggttagcttttgctccatctctcaattccgttagggttctttaatcagtcatctccaatttcagaatcacaagtcaattatgcccgaatccctcttaatttttacaaaattttgaaccttgtttgtttgcaggcggttaaaggttgcatatggatgtttgaacaagaacaagctttagggtttagcagcgtgtnnnnnnnnnnnnnnnnnnnnnnnnnnnaactaaaatctggaggtttatgggttcatgctcctattgctcccaccaaagagtgtgtccaggttctattttgttctcttttttttttttttttgacagtcaaaacataagttctattttgttctttgtgtttactaatatagtagctccaaagaattgttgaatgacaaagtatcatactttttgttgtcatttctctacttacattgacatgtaacacttagtggttgataaatagagaatgattgaactctattggttgtttcgcttctcttttttgtgtggcagcttattaaggagttgggagctccggttgagtacattgtcctgccaacgtttgcttatgagcacaagatttttgtcggtcctttttctagaaagttccccaaggctcaagtatgggttgcaccaagacaatggagctggccattgaacttaccacttgagtttttcggtatctttcgtgctaaaatcatcaaagacagggacttatctacgccatgggctgaggagatcgaacagaaagtcctaagctccccagaagttggtatgttcctttcagtatttcaatctggtttggttggaagatttagaaatcatactttctcattgtgtatccaggaattggaccatatgtcgaagtagcgttctaccataagcggtcaagaacccttttagtcactgatgctgtgatcttcgtcccgcggaaacctccctcgagtatcagcaacgaatccttgttggcctcggctaagaatggactagctgtgaagatacttagcaaaggaaaagacattcctaatgatcctgtggttgataatcctaacacccgccaaaaaggttagcagttcttaaaagtcaatttcctatttcttgatcttagatctcagtggcctctgtttgttttaccacttgcaggatgggaaagaatggttctgcaaatcctatttcttggtccctcgaatctcttggaaccaaacgcaagcttcgcacgaatgtcacagaagctgatcgtttctcccattgtaaagactttggtctttagcaaagtccctgagaaggttccttatctctgtttaaatctttgttttggttccaaaatgtttgttttgatttgatcatcactgatgattcaggtgagggattggatcgatgagatagcccgtgactggagatttaaaaggattatcccagctcatttcgaagctccaataaacgcaggaagatcagattttctagctgcgtttgggttcctagaggatcttctaggggaaagatatgtaactcgtccttcgctctctcttctcttcacttcactaatgggaaaagctgcgagctattttcctccagacgatatgagaactctctcttcacttgatcagttcttagtctctgttggggctgtgaaaaagaacagtatc

SEQ ID NO: 29831 - DNA, 2965 bp, Arabidopsis thaliana landsberg
gggttccaggtccaaaccgggctcttgaaacctgggaaactaacaaaactatcagaatatgtgaagactgggataatgctgatcttcaaatgatgattgaggaagattttgtgccttacaccaatatttcgtcgatcggttcagaagatgaggatgaagtgcttggtagtgtacaacaaaactcttcagtagtagctgtagagaatgcaggatacgtgagtgatgagtctgcccagaattcgagtttcagtatccaaagtgagaaaactatggaaccttcgaatggagctttgactgctcgggaggtgatcaaagaagccatgtttactgaggaagaaagtccagttttggttcctggattgattcctctgtctgacttggataatgaacaagtggaagttattaatgaaggtaaagcagaaacgttcccggaggtaataacctgatcagttttgaagttttatgttcctgtttttctataaaaaccttaagagctgttgttatgcacactgctgctgatggtaatgaaatctttgcatgtggattattgatgctttaagacatcatgtttgtgtgtagaataagactatgcttgtccactggttcaatgtatattgttaccccagttcatgataaaagtttccttcactatattgactattcttgtccactggtacaatgcatatctaactgttaaattattttccagcaatgtgattttcggctgcaaatgcccttcttgtgctatttgcaggtagataagaagcaagaacccaaagcagaaagaaacaagaaagcaaaagtaaaagcgatttcattattcgagaaatcggagcaagaagcagtgaaaagtgtagagcagaggcaatacaatgcagtagaggaagagcagcagcggctagagacagagccgcttggaacgccggatgtgctttttgagaatgatatccaatggggacgcagaacactttacaagcttctaagcaactttagacttttctaaactcgactaagttttgagtgcatacatacatcggcaaaagagcctcaagagtcaagaagatgtttccgacagatagtcaaaaactgctcttaaaaggtaggctaccttcttcttctatgctcatctttacgttttgtatctatgagaactgggagtagattgaaaccaatgttgtgttgtctttgtatatatgtaatgatcaaatggttttggtaaagagaaagatgaagaaagaatggactgttagtgttagctgttaagtacataggacagtatgtagcatctggatcctattctcccatataattgtattgttgctacataataatgatgatgatgatgatgattatcttatgattgaacttacaattccaatgtcttacataatgatgatgatcatgattaaacatatcaataatttagttgtacattttttaatggtttatcaagtttggacctttggtgctgctcttgacgaagggccaggtaattgctgacgccgtacgtttaggagcacctcgtttttttcaccttgtcatatatttgtaaatctcgatgaccatatgctttttttttatcccaatatataatcgaaaaatcccaaatgatatgcgatttcttgttgtatgatttacacacaacatgagatgcaataatgttagtgggcactgggcaggaggaaatgcgataaagttaataaaattgtgacaaaaacgtaaggtgataaactaaagggttcttaatcaaaaactacataaatcccttctaactaatccacatgctggtttttaagaaccacaacaacaaaaaaaactatcaacttagactacaaatatacaatcactatacacaagacaaagcctaattgaggtggagccttgggtgcaaggtttcatactcactttctcaaaactctagaaaccaaaacagcaagagtcatgagactagctccctgaggaataggccatcttttcatcaaaaagtctcttatttgggacactttgttaccttttttgatctttgcttattttctcacattggtaatgaatatataccgtatgtctttttccccacaatcacatctctctttcgacctaaattttgcatttctgcaaaactcacaactctgaaatgttttctttaggcgcttcctcttcaagtcctttgtttgatacatcttcactgctttcccacaaaaatccattatcattttccggacctttctctgtttctctagctagaggtgccacatgtgcaacatacttttctgcacaaagcaacacaaagaagatttaccaatctgtaaccaaatttgctcactacacaaaagactaagaacaatctgcagacttaatcaagtggtgaaatagatccacagttattaattcccctagaagaaactttaccagccaaacttcgaagagcattctcagccgcttgttgatgtgcatctttcttagtttttgccatcccaatgcctatcttctcacccgtgaacaacacctttgtaaaattaacaacaacgattaaaaacaaatataagtaaagctaacaatagacaaagatgcttcaataaactgatccagctgacctcaactgaaaactgtaactctttgttggtacttatcacagtcctaaactccacctgcaaaatcgtacatcaattaatcagaatccattaaaagagaagaagcaatggcttgcgtggttagtgaatatgcacctttgaaccacatcttcttccaatttcttgcagtgcactcacaaataaatgagattgcccgccattactctttccaccatctgtatgatgttctctaccatttgacaccaaatgattctgggatattccacttctgcaaatagtttaaacaagtgccaatgttaaaaaggtattaatgcaccttattattcaagtagctgttacagattcagtagagagacaatacatgagatggggaa

SEQ ID NO: 29832 - DNA, 2423 bp, Arabidopsis thaliana landsberg
caaatcgatttcaacatggagatcgatcagaccaagaacatatactcttagaggtctaatcgctgctaaataaaaacggcatagaaacacaatggttgaaaacgaatatcaaaacgatactccacaaatttaaccacgcattgaaaccgaaatcgaacaataatctgagaatagtaaatagtttgcatcgatataataatacgtaccacgccggaggcactgtaagtggagatactgaacttctgatcggaattgtagtctctcgtcaacagatctacaaagaaggaaccaaaaaaatcaacagaatcagcttaaactcgatagaatcacccaaaacagaatcaaaatctaaaagtcatttaaatctacaggataaacaaattcgaaaaaaaaggcataaacgcacgcactaattgcgcgatttcaaccggaatcttaacgatgagagaaggaatatagaagaagagcgatacgatgataattatacctttggctttcttgccgatatcggtgaagagtcctggacctttgctcatggttgatcggagattgagagagatcggcaggcggtgaagatatcaagatagaagaattacgacttgtttttctcgtggtagacgaaaataaatagcgaagccaatactatataacagcctgtgacttttctttagtgactaaccactcacagccgttgatgtggcacaaaaaaaacacatgacgctttatgagataatcgaatcgctttttggtaatgaggtctaatatataaaaaggttacgggttcgaaatcagcccacgtcaactttaccctctaattctctcctatttgttttataaacatgttaggcctagatcctgatgggcttgttaaacataattatactgggccaaatttactctctaattctcttaatttatttataaacatgtaaatgattgggcctagatactactgggcttattatcaaattatggcccaacctaaatgactatcgaaccctatactatcacaaaccgtaaaggtcggatctctttcttgatttggccgactcatctgatctaacaatggcgacgaacaacatcgtacgtttgatcgctccaagccgatccgtctcctctagattcctcgagccagtgtcacggtttctaagctccggtacacctcctccgccgcaagctccatctccgaatcaggatctgaaccgggacgtgaagccagatcagaatcttcaacagaatctgcagatgcagaaggaagaagaagaggaaggagaaggaggtggaggtggagagtttgtgaacgaagatactggtgagattggagggcctagaggtcctgaaccgactcggtacggcgattgggaacaacgtggtcgatgctctgatttctgagaggattcatgtatccctgtgttttagcttgttcttatatatttctgggaaaaatggaaataaattcgttttatgtgtttatgtatttgcaaaataatggagaaaatggaagaaaatgtagtagaacttcaaattcgttgcctttatttggatcatcattctctggtgatcttgttattccagtattagttaataagttcttcctcaggtggttaaatgtgcatctatacatctctatctaaaaaatttgggacactttaatacaggtttagtgatgatttagaattaaggaaacaacaagagatgagtttaactaacctgagagttcagagttcaggtttgacattacccggtggttacatgagttttggtccaagtttaggcatggctgcatgggtcaataagttgaattttaaggtatttctgttgttcaacaacattgcaatgtgcacttctgtgataactgtaatggctctaatatgggcacaactgggtgatgcacttctgacaaagaaagcttttcgactagctttaccacttctgttaacagctgttgtatcaatgatgatggcatctgtggctggacttactcttgtggtgagcgatctcccatggctttcccatcttgtattagccatagattcagccttctaggtattcctgagcttgtttttcagaactctctttccatgttagcgaaccataaattgggcttagttactagtattgtgttccgcaactcattttctcttccttctttattggcacatttacaatgttgtctttttattttctttgatttcaagatgtgctcattcatgtcttagatatgtatctttaaaccaaacttttcagctcaactagaacatgtcatcgcctcaacatagtggagatcaagaaaagtggcatgtgactgtttgagttttaagaaataggcaaaaatacatgttataaagtttgcaagtttatcactgccttacgaagttagatcagcactaatttcccactcacttgccaaaatgctaatataa

SEQ ID NO: 29833 - DNA, 3269 bp, Arabidopsis thaliana landsberg
acatttaaagaaatgaaaccaaagaatcgtatgaagccacattaaacgaatcataaaagtaaaaaaaatcatgtgtagcaagattataaatccaactgaacctgaattccatcaaagatatttcccaatattcctggcccgagctccacagaaagtggctgtagtaaatccaggacaaattatatgttagctgcagatgaacaacactcgaaaaaaccaagataaataactcgcgaaccttgtgtgttcgaagaacgggatcattaactgtcaatccagctgtttcttcgtaaactgatcaaaaggaagttgccaaatatcagttaagatatcttacttcgacagaggtcacataagatgccgtaaagtaaattacactaggaagcacaatagaagaaacaaaccttggatggtggcagaatctccttcaagacggatgatttcaccaatcaaattatcatgaccaacacgcactaactcatacatagcagcaccggccataccatcggcaacaacaacaggacctgaaacctgcatcccataaaagaaaatgtcaaatcactgagaactatcagatcagatcagaaattcaaagacgaggttactgaaccaacgcggaatcaaccgattcaatcactgataactatcagatcaaatctagctatcccaccaatcttacctggtaagcagatcaactatttcatctatccatcaccaaaaactaacatcgcaaaacagaaaaaaaaacaaattgaaaccagatcgaacgaaacaggataataccttacgaacgtaaccatactcgctctccttctcatcgtcctcgaaggtcgtaagctttcctccgtaaaacgccggcattttctcagcaatcagagattcaaaaactcaaatccgatcggccaaaaaaatcaaaattcacctcctagaaaatgccgagatccgatcaaacaacaacaacaacaaatcagaaatcgccaaaatcagacaactcttaaggtttttcaaagagagcgatacaataaatcagaaagaaacaaaaaggatcagagagagagggatagagatctcctaaccagtgaacagacaggaagagtggtcacaagaagaagaagagagaggtggatgcacgtagatagatattgaaagagttggagaagttttgatctgattgacgaaatcgtggagtgatccggtacatgactacacacgatacgcgcgtagatctggactttgtcgttaatagccacgtgacagtttatttattgggctttataatatatacttacggcccaataagtgggtccgtttagtcaacaaagacatgcggcttgagaatctctctctctctctgatcaagccggaaaattcacaaaagtgatcagttttgttttctcggggaaattttctgaaagtgaagaaagggaaagcaagttttttttgaagtggggagagagatgggagaaatggggaaggcgatgggattgctgattagcgggacgcttgtgtattaccattgtgcatatcgtaacgcgactcttctctctctcttctccgatgttttcattgttctcttatgctctctcgccattctcggtctcctttttcgccaactcaatgtctcgtaagttccctcacatttttcgcctaaatctctctggttacggtattggattttgttctttggtctctgatttagtcatttgctgtttggtgaccgagtagatacgaaatttgttggctcctttgatttgtgacaagtttgaatacttgctcgatatgattgtttaattgggttgtactttgtaatgtggttgtgcaatcagttatgttaacttgattatgaaattgatttcatgtattctctgaaggcatgaactgaaactagttctcattgtatttctgggtgaatcaatgatgcatcgatcttatttgattactatcatcttccgttctctgtgatcaatgcatagtcataatcctagaatgttcaatgatatcattatcttctgctcattgtgtgtataactcttcaagacccttgctttatcataccacatgatttacaatcctataacttttctaaagggtaccagtggatccactagagtggcaaatatcacaggacacagcaagtaacatcgttgcacgcttagctaataccgttggagcagcagagggtgttctgagggttgcagcaactggacatgacaagagactttttgtcaaggtaagtgtgtcctttgttaccaacttactatgtacaagataccgttactattcttggatcatgagtgtatcaaaatgcattagcatcaatatatcaccacagagattctcttagaaccctagtgtctttacccagttaccatataaatgcattgctaattgttaactcagtaattgtgctctatactgaatatgtttgttttttgctttttcctttaggtcgtaatttgcctttacttcttatcagcgcttgggcgactcatatcaggtgtaaccgttgcttatgcaggtaaagcattcacatttcatctcaaatttatacagagtttcattttaatgtggaagagtgtagtatttcattgaattttaaagcattcacattttgtctcaaacttatacaaagttcattctaatgtggaagagtgtgctcttaccttataagtagcatttcatggaattataaagcattcacattttgtctcaaacttatacaaagtttcattttaatgtggaagagtgagctgttaccttatgagtagcagtacataccaatatgtcggatttcttagcatttaacaaaagttggccatttgggaaacccttcgtcttgcctgtgtcaaatattgcaaaccaatgatctctgactagttcttctccctgaaacaggactatgcttgttctgtctctccatgctctgtcagacttctcaatctcttggaaactgtgtactaaagcgaggaaatggccagattttagaacaagaagcacattctgatacataatatgtctagcttttgtttatacttttcgtcttttctcatgcttacatgctcatagcttcagtcttcagagtagtttccccttatgtacattggatttgttgcatactaccttgtgaaaaatgtaatgatattgtttaacctccacaccatgtacttgccgatcctatatctataaatgtattctcttttcacgttaattttggactcaaggcattatcatacaaaacagtctgcaaagtggtatgagaaccgaatctg

SEQ ID NO: 29834 - DNA, 1061 bp, Arabidopsis thaliana landsberg
gaaactgcacacttgcttaatattggaaggagaagctcgtaaaatggaagaagacatcataaatcacataatgaaagatgagataagaaatgtttctagattggcagagggatatgatcaccatcttgttcatgtttttacaaatactagggcgaaacccgcgccaagccgcgggcttttttctttaatataatttattaaatgttatttgtcatgattcataatatatgtagaacaaaaagattcattacaaaaagtgattgggaacacaatgcatttgttaattttttttagtaagatctatatagtctttataagttttggaagctaatattttgctttacgaacatctatttagaacagtcattaaaaaacaaaaaaatgaaaagagttaaaaaattataatatgctaattctggtgaggttaaagtcattttagattcttaagaatatgttatatggagttatcatctttgattttaatgttccacatgcatatttgattcatatgatgaagagacataaaaagctaaaagttacgtttgtttgcttttcaaaatttcaaaattgattctttgttattgggagtatagaacgtactcacatgattattagttattgattaagatccataataacgcttagaaaatctaataagatccttgaatattttgaggaagaaactcgaaaatctttaaggtctcttctttaagattcttctttcattgacctttttcctcggtgttttcttctgctaagacttcattcagttcggaaataagcttttgaaccaaaaaatagataatagatgcatgttgaagaacaaaaaaaataggaacaaaaatcgaattgatcattggagatttgagagtaaccatactttagagataaattcaattagaccttaaagaacaaaaatgacaccttagttgtaacaattttttgcttgtttacagatgacattgttgatgtaatctctaacatttttcagcgtaagcttcttctcgaaaacttccatataggttagtgatttatactcataaaacacaagcaattttttg

SEQ ID NO: 29835 - DNA, 1747 bp, Arabidopsis thaliana landsberg
agacagagaatttcttaggaatgattatgaagaagatgcaggtagatatgtgcgtgtgtgtatatgtattaaaaggcaaataatctctgttattaaattttggtttattttttcaatgtacaccgactcgagttccaatctattaaatagaaacactttagaagtttttgctttattcataagtaaatgcaaaaagatcaaagcatgttcgtacgaaccgctcaagttcaacaaagaaagatcaaagtatttgaaaatttattcctaactggcctaatatcaaaagtattatgtgaagtatcaaaaatcatcaataaaaataaaatgattacttgacgagaaaataaaaatcattcgttttagactttgtttacaacacagtttcaggctttattcgtcataaagtttgcttttctttttcataagtattcatcattcaataagaaaatgatacttttattttcacactttttgatgccaaaaaaaaaacttacagaataaagtatgtcgaagacttgaagtaatactgaaaatggggattgagtgtggaagtataaataaattttactttatggccaacatctaaaatttgaaaatacagagcatcagaatctccttagattatctttcataagccaccaactctgtagaaatttaattacattaggtaaagctttatttgattctagtgtaatttcagattagtcattgcattgaatttcttcttcagacaacaagtaaatgtctgccaccaaactcttccactgtagtcacaattttcgagtttttatcatttattagctgtataaaaaataaatttcccccttacaggaaaaattacaaataaaaaccaacaagtataaatcattttataaaattataaaaccattaaacggcaaaaacacgacattaaactccttgattcactgttacataaactgtcccagtaacaggagcgtttgtctcaacgaccacccggttatcagaaacgttccttagcgcgtgcagaggaaacacgccagcttcactcgccacaagtgtgtactgcacgtggttgattaaatccgggaacaacaaaaccgggttaaaatcaacggtccaagacgtcccgtttccatctaccgaacctctagccaccgtcgatttctctaccattccgttcacactgttacggtcaacgaccacctggccaacgtcatcaaacgcagtgttcctctgatccaattgaacaatctggaccccatgacccgacccggaaaacatattgtcaacaatactaaccccacgaatatatccggctatcgatttcaacaaaataaacgcatctcccaaaaaaaacgtccctgaaatctgtaactgaaccggatcttccgcgacgataccggtataatccaaatacgaattcacaatccggttctgagttaaaccgggtaatctcaaataaatcccggttcctccaaaaccggttgctttgttatagcaatgcacgccggacaataagttagcttgtcccgataccattactccgatcctggcggagaatataacggtgtcagtaacggcgttatcgtttcccatcaaattgatggcggtgccggaaaagcttctttctcctctgtctccaccggcggttatgtgttgaccaagaaacgagtttcggatataagtctcgtgtccacttatgacaagaatcccgttcgtgtctccgaaccgtgtgatgtaacagttgtctatgcttgtccggaga

SEQ ID NO: 29836 - DNA, 2702 bp, Arabidopsis thaliana landsberg
gcagtttcgacggtcacgatctactcggagaatgtagtcgtcgtgacaaaccaatcgaacggattaaagcaatggtgacgtggtacatctcaacactccggcctttgatctttggcttggctccatacaatcctgtcatcggcgaaactcaccacgtgtccaatggtcacattaacgttctcgcagagcaagcaagtgttttattcttcttctataattagtgttttagattacttgttagtgtatattgaaagaatttttagtatagcgactaatttatgttacgttttgattttttcttcttcttcagatatcgcatcatccaccagtttctgctcttcatgcaactcacgagaaagaaaacgtagacgttttgttatgtcaatatttcacgcctaaatttcgtggtacgtataaaacaaatttaactcaactttaacaaaacatacaacaataaactaaaaagtgggttttgaaatttaaaaggtgcttacgtggacgttgaggtgaagggtaaaagagtggtgaaacttctgaatcacaaagagacttacgaaatgaaccaaccaaaacttctcatgacgtttttgccggcaatgggagctcactgggccggaaagatcgtgataaagtgtccggagacaggactcggagccgaattgcagttactatccgattcttttctcagtagattcacaggaaacaataaaagagccattaaaggcaagatctttgaatcttcctctaggaaacagctctatgaaatctctggacactgggacaggtaacaaacacaagaagcagaatccatctttcaaagtttattgcagttgaacatataatttacagtgaggtaatgcatttcagaactgttaccgcgaaaaatacaaagactggacagcttgaggttatatacaaagcgagtgaaaacattgcaaagctcaaaactcccattgtcgagaacctgcaggttactgttataaactttctcgggagattatttgttttgttcgatattcgtaattcagttatttctggtttgcaggaggtgagtgagagcgagtcggcggtggtgtggggtgaggtgagtgaaggaatcgtgacgaacaactgggagaaagcaagagaagccaagagagatgtggaggagaagcagagggagtctttgaggaaaagaaaggcttctggacaatcatggattccaaaacatttctctgtagctcgaactggtaaggactgggactgtgttcctctacagcctacggttcctcgagctcctatagttgttcctctctgattctgctgattctctgtagtagaggttcctacaagaagtaagaactcatgagaagtgtaaagcacagagaaaataagttataagtacaaagttgtcagaaattctcaaactgcaaagacacaagctatgagaattttaacttaccagtttatcttacagaaaagctgctaatcaactgccaagagtattccaattcgatgaatgaacccattaaatgtctaaccacatggataatccaattcgaataactctgattatttccggttggcttttggtgacttgagaagtcaagtaaacatactgacctatctaggcatacaagagagcacagacataacgaactcattagcttgctccagcttcccactggtgcagagtgagctaacagttgagtgcaggctatgaaaatcatgaacatagtctttcttctttatctcttcttcattcacatcattcaagaactgcaacctttggtaagaacccaggtttttaccagacggatagattgttgaacttatctcatctaggattttgatagcctgagggacccttccttgttcgcacagctcgacgaggaagcctctgatcgattcagattcagctaattccgcatcaactctgttaatcagcttaacaacagattctgaaacaagcatttctctcaagaggccccttgcttcttccattcgccctttcgtgcagaagcctttgatcagaaacagaaaaccaaagaaatcggcagagatatttttatccttgaactctgtaaacacactgagagcttcttccatgtcaccttttttacagtaacctttgatcatagaactgaccgtgaatgcatctggtgttacccttcccatcattttccgtgatacaactctcatggcgtcctctgtttgccccagcttgcagtacccgtcaactatcgaattataaatgataatgtttggcacaagtcccttagataccatactgtccaatagtttctcagcatcaagaaacaacccttctttgcataaattgtcaatcaaaatgccgtaggtgacctcagatgggactaaaccaatattctcaagcgaatcaaatagacggagagcttctacaagacaaccttgctggcaaagtccatttatgagtgaattatatgttatggtattgagagtgacacctctgcttttggcaaaactgcacaaatttaaggcctttactagaaatccttccttgcagagaccattgatgatgattgtgtaatcgatcacatccattgaagacagagtagtttctccagcattaacaacgagtagataagcatccaatgatctgagattgtccactagtgtttttagaattgtagaagggaaagtaacagttaaaccttttctcctcataatcatataaactgcaa

SEQ ID NO: 29837 - DNA, 3478 bp, Arabidopsis thaliana landsberg
tgtagcttcttctttggttcagatatgggaagcgaggctaaaccgatccaacggtggaaactcgccgagcagcagtcaatctacggcgactagtagtagtcggagcgattcaggagttagtgttcaagattccggtctttcagaatcttcatcaatcgatggagattctgaaatttgtgatcgaacggtggagattgaatctaggtcacatggtttggtttctgattccggagaaagtaaatggggacgagtcgctgacctaattcggaggcttagcaacgaagacaagaaacgaaccgccggagataatggcagcggcggtggttgtggcggtggactcgagattatcagaacgccgaggccttgttgcacttcgtcgtcatcggagaaaagtaattttccggtggttagtttctctccgaagatacgaggacggcaagcgtttaccgattttcttatgcaaatggaacgtgatcgccaccgtgaattggattcgcttcttgaacgcaacgcagtttctaggtttactcaacgtggtcgtctccaggtaaattatattttcactattttgataagtaacaaacatatttgtgactttattcataatccactaaatagtttttctgattacattatttaaccagtcaatgctaaggttaaggaatctcaatcgatgtcttgtgattcaagatagaaaccggtctaacgcaaaaacaaccggattaaaccgaattgaatcaggctctgctgttctgcatttaaggttttttcagattttctgttttatgttttgagtttagttcttagggtttactttcttctgattttcaatctttgattggcaacgcagggagaaatttcatgcgaacgtagtaaactctgcggctgcaacagataagaggaagaatcatcaacgatccactgagatgaacaacaaatccgtagaagaaacagaaggaactactaccacaagcacgaggttaaaggatggtggtgttactctcgaagcttttttcgcagagcggttgagaccccgtaaccgcaagatagaggaagcaacgttatgtaaggaagaagaatctgtaagtggaacagttgattcacaaaagatttgccttcagctgcaagaaacaagagaagtagaagaaacttgcaacgatggcaagtctgaaaagaaagaagaagaaaatactagcccgagtgaatgtttaactcgagaatcgtggttgagacagaatcaagacgagaacaatgtgggaaagtatatgcaagaaactcgagaaacagaaggtctagttcatgagagtaatgagatggaccagtgccttgatcaacaagaaacatcctatttgaatagatggggagaacaagaagagtatgcagatgagcagtcttattatggagaatataacgacgactggcttagtgaaatagctaggcctcggagttactgggaggaattgaggaagtcacggtacctggaagtaatgaacactaggtctgagaaagatgacatacgcagactccttgagcggtaagtaaccatcaaaattgacaagctcatgtttcttaatggttaataactgactaagaaaatgaatttccctgcttaatacagaagaacggtgacagatttcctcgacagcgggttgcgagagaagatcgataatctcatgatgtcccgtgtacagacacactcggataagcactccaaaaaaagggaatttcaacaagaagaagaggaggaagaaaattttgaaattgaagaagaaatcaaagaagagccattaagaggaggtgaagagcaagatgatagagatgacttgagccaatcgtcgtcttcacatatatctgcatcgtctcctgcaggatcatggagttctcaagacactgatgttacttccactcctgccttgtctgttcagaatcctcagtcacctgtgagtcattatcgatttcttgttatactatagaaactcgcaaccgcactagtggtaaactcattgaaccgcatataaacgttttcaggaaatggagctgataagcggtatgagatcacagatccaacagcttcagcaagaaatgtcaatactacgagattctgtcaaaacgtgtttagatgctaacgggatcctgcaacacaaggctcatcaagaaaacccaatgaaacgaaaatgttgcgtctgcgacgaaacacaggtcgaggcggttttgtacaggtgtggacatatgtgcatgtgcctaaaatgtgccaacgaactacattggagtggagggaagtgtccgatttgcagagctcagattgttgacgttgttcgtgtcttctacgatacaagaaactgaaatcaaccgtttttgaaaacgctgaaagaattcactaactcattaaaccctctttttcttatcgagtttgcgttatttggcgttttgtgtctgaatatcgtattatgctctctttatacagtttttagatttatatatgttaccaacactttctccagttttatgaagtttttgatctcctaaaccaaccaaaaaaattaacagaaaacagctaaataaaactaaaaacctgaaaaggcaagtacaaacagagcttggaaacaaacatgaatttttgcaattactctagtaccaaatttattgatttgatacctattgagtcactcaaaattgagattaagtctgaaacagatcttcgatgcaaaagtgaaccacatggattttagattactctcataatcatatactcttggtcaaattttatttcataaagattcaacaaagccaaacaaaccctcaaaaattggagatagagcaaacactaaaaattatacttttgagttatttcagaatcataaactctttatcgattttgatttctcaaagattcaacactctctttctctccataatatttacacatcatccgtagatacattacactcatttcatacatacatattataaataaaactctctgtgttctgtttttgttttccttattcaagcgttttgtgcggtcaagaaggtgttgaagtcatctctagccttacgcaaacgtggagtgatacaagttcgcggcgaagtagggcacgaaactgaagccgatgaagacgaagtcgagaacctaacacgacgttgcggtgaagactcagctgatctccggtgatcacgagtactccttgtctttaaaacgcttctcagagccaaagtctctgtttctctatcgaataagaaaccagaggtcaccggttcttgcacatctcttcctccgtttccgcctcggctgttgcatttcgtcatctcaaccggaaaatcgaaaaacaaccgaccgttatcttggatcagagctgtcgtcgatgcccaagaaccgcattcgaatttctctagcgaggcgcgtacagaaacagttgctcccgtgaaggaagaagctctgatcatcttcttctccatagaattgtggcgtttcgaagaa

SEQ ID NO: 29838 - DNA, 1540 bp, Arabidopsis thaliana landsberg
  unsure (1)..(1540): unsure at all n locations
acttcatcttttaaatgcttatccttttttttcagagtttgatatcttattattgtatttgatttcagggaagaaaaatgtgatgtttgttatcgcacatcctgatgatgagtcaatgtaagattttgagatttaatgaaatgttaagattagtactattgttcttcttcttatgttttcctgagtcatggacatgcttgacaggttcttttctccaacaataaactacttcacttccactgcctgcaatcttcacatcttatgcttctccactggtaataatatacctttctaggttgctgttttgctttccttttcaaagttgtggaattggtaaaggactgagaaatttctagtttcattgaagagaagagattgatatctacttaagttaaaccattaggttcattttccatagtaaagatgaatttgttttgtttcaggtaacgctgatggtatgggaagcattagggaccaagagctgcatcgggcatgtgcggtgctcaaggtaatcccatttgataaagaaggaatctgtgataatgattcttgtcattgtaatgaagaacatgtttttgctaatatatatcgaacatgatgcaggttccgcttcaacagttaaagattctggaccatccaaatttgcaggtttagtagttctattatatctccccaacacatgtgtatctttacattcaccatctcataccgagtatattagtatttactctctcgcaggatggttttgggcaattatggagccacgatttgctaacagagatcatcgaagaagaagtcactaatcactatatccacacagtatgacttaaagacacttcaggatattacttagatatatttctgcatctaattctctatgtggttgttttttcagataataacattcgataactatggtgtttcgggtcattgcnatcnccgagaggtgcatcgtggagtattgtacgtctgacttctttcaatcctttaagtcataaaaccacaaaaccattcctcatcactttggtgtacatgcagaaagtccttgcagactaattcaggaagaaatgtcaaagcttgggaacttgtaagtctttctttcctttctcggaacttaagagtatctgcaagctcctattgattgtaaaatcgattcagctaaaagaatacatgggtttttgtacatccattatgtaagccttaatatctttcgcaagtactgtggacctgtcgacatttggctgtcaattttatccgccaaaatacatccgagcaaggtattcatcataaacaagcagccttggaaaagcttcaaagcaatggcacaacatttaagccagtgggtttggtatgtctcattctctaaatatgatatagtatgttctttacctttgatcatgatgaatgtgaatgataagaactgaaacatgtatcgctgcttttttgttgtgattgtgtaggtttcgaaagctttttgtttcgttttcaagctttacatatgcgaatacacttaatagaatcaacccttgagtcaaaggag

SEQ ID NO: 29839 - DNA, 992 bp, Arabidopsis thaliana landsberg
  unsure (1)..(992): unsure at all n locations
actgcttcctatcgaatttagacttaagagacaaatcacaattcaaagctaaacccaatctaacaccaaattcaacaactttggaattcaaaacaggcaaagcaccaggcaaacccatacaaacaggacaaatacttgtgtttggataagaaccgtaattgttagagcaactacaaaaggcttttgtcaatgtagagagctgaacatgagtctctatcccaattacagcttcgtaatctctcagaatctcatcaagttggttgcttttgtggttttttggagcaacccttgttggagaagactgtttagcttcatgggtcgtcgttgtttggcttccacaagacctcacggagaagttgttactccttctccttcttaacaagctagttccgagaagtgagaactggtttagctgaattgttctcaacaatgtggtagacatgtttttaaggatgttttatagaatcagaaatgaagaaattgagttcataagaagacaggacctgctcgtttctcaccggaatcttatcggagaagagccgtcgacttatcttttcacgcatcatcttgtgcgcaggggtgttatccgaattgggcttaattgagttattgggcctgttatgtctttttaagcccaaatctctctctgagactctgattagcttctctttctttctgatccagagataggtttgggcttttaacttgttcatcaagttagtgatcatttttagtttaggtttaaatccgtagattaattcttgtttgcatatagttgttatatagtaaacaattgtcttatataagactactatatttcctnnnnnnnnnnnnnnnnnnnnnnnnnnnnctcaaatgtttataaaaatttggaagatgagatcaaatagaacaaggaggacctacatattttattttcctgcaagaaatcaaacaaaaagtattaacgatcttataaatgatatttggtaacacaaaatcagaaggaaaag

SEQ ID NO: 29840 - DNA, 2270 bp, Arabidopsis thaliana landsberg
agagccaaagtttcctttttgtttgtttgtttgttgtttgtatttttgtatctctgtgatcgcttctacgtgttgggtcatgcagagaaactcattttgttttgatttgcaatgtgtcaattccactttgaaatataagattcatcggcctctctctcctttgttttttttcttcttctgcagctacgagctttgggatgtggtgagatgcttgttttatctcgaacaatccgccggttgttgattttaaacaaactctctatcacaaatctttcccgatcatggattttattgagatctcgttgatctttcgagagcatttgccactactggaactatgttcggtcatcatcaacctcctactctttcttgtctttctattggctgtctccgcgaggcagattctcgtctgcgtgagaagaggcagagataggctctctaaggacgatacggtttcagcttctaatcttagcttggaaagagaggttaaccatgttagtgttgggtttgggtttaatctgtctttgctctgttgcttatatgtgttaggcgtccaagttttggtgttagtatatgatggggttaaggttagaagagaagtcagtgactggtttgttctttgctttccagcttctcagagtttagcttggtttgtccttagcttcttagttcttcatttgaaatacaagtcttcagagaagctacccttcttggtgaggatatggtggttcctggcgttttcgatttgcctctgtactatgtatgtcgatggaagaaggctagccattgaaggttggagcagatgttcttctcatgttgtcgccaatttagctgttacacctgctcttgggtttctctgctttctggcctggagaggcgtttctggtattcaagttaccagaagctcctctgatcttcaagagcctttgcttgttgaagaagaggcagcttgtcttaaagttactccatatagtactgctgggctagttagccttattacgctttcatggttggatccacttctctcggctggttcaaaaagaccgcttgagcttaaggatataccgcttcttgcaccaagagatagagccaaatcaagttacaaggtcttgaagtcgaattggaagagatgcaagtccgagaatccttcaaagcctccttctttagctcgtgcaattatgaaatcattttggaaagaagctgcttgcaatgccgtatttgctgggttgaatactcttgtgtcctatgtcggtccttacttgatcagctactttgttgattatcttggagggaaggagattttccctcatgaaggatacgtactcgctgggatattctttacgtccaagcttatagagacagtcaccacccgccagtggtatatgggtgttgatatcctagggatgcatgttagatcagctcttacagcaatggtataccgaaaaggtctcaaactttcaagtatagccaagcagaaccacacgagcggtgaaattgtaaactacatggcagtcgatgtccagcgcataggagattactcatggtatcttcatgatatttggatgcttccgatgcaaatagttcttgctcttgcaatcctatataaaagcgtgggcatagctgctgtagctacattggttgctacaataatctcgattcttgtcacgattccactcgctaaggtccaggaagactatcaagataagttgatgactgcgaaagatgaaagaatgaggaaaacctcagagtgtcttaggaacatgagagttctgaaattgcaggcatgggaagatcgttatagagtgagattggaagaaatgagggaagaggagtatggttggcttcgcaaagccttatattctcaggcttttgttacttttatcttttggagttcccccatttttgtcgccgcagttacattcgctacttcgatatttctaggcactcaacttaccgctggaggtgttctttctgctctggcgacattcagaattcttcaggagccacttcggaactttcctgatctggtttcaatgatggctcagacaaaggtttctcttgataggatttctgggttcttgcaggaggaagaacttcaagaagatgcaactgttgttattccacggggactttcgaatatagccatagagattaaagatggtgtgttttgttgggacccttttttttcaaggccgacattatctgggattcatatgaaagtggagaagggtatgcctgtggctgtctgtggcacacttggctctggaaaa

SEQ ID NO: 29841 - DNA, 2132 bp, Arabidopsis thaliana landsberg
cgctttttaggtgttggtggcacgagtgtagatctgctggctcgagtgtgcagagaccatcctgatcaaaccttttgccattagctccctaatcgccctcctcgcaagagacccattaatctgatttttaacaattcacaccataacaaagtcagatactaacatttgaatcatgagcaagtaacaccaaccatacagtttttaaaaaatgcaacagagataaaaaagattgtataccctcatacggtcggagaggattgatggagtgatgagcttgaacttgggagcttcagtgagaagcttgtcataagtgccttgatcaaacaacaccatgttgttcaccttctccttttgctttcccttgctccacttctgttttgtttaacaaacatttcattgaaaaaagaaaacaattaagcaccaaacacatgaagaatacaacataacacacaaagcaagacaaaaaatgtatatacataaccaaagcttacgagaaatgaatcacagagactcaagtttctagatttgtatgaaatcagtgcaaacagaaacctagattttcagccaattcatactaaacctagatcaatctacgaaacctaattcaatttctcaaaactctagacataaacgtaggaattggagcgtcacgttgcttctaaatcgacattaaaagtagctatacaagtagtttaaaatggataatagaggaaaacggaccttcttcttctgttttccacctccagatttggccggctttgatgacggtggtggaaccttatccttctttggcgcctgtaaccatgacaacgaaagtaacgattcagacaagagaaagaagaaaatgaatacaggtgattagttagagaaaaggatgatagaaaacgataccatattgatttcgacggcgagggaaaagcgaacggcgaatagtagtgggtgaaagatgaggctgagggagatagcgctgctagggtttgctcttatattagggtttccctaagtttgaggtcaatatctatacgggcctctttcaaaaacaaagcccatgtttattaagttgggcattacgttggtttttcttttgaatttctgacttctttctctacaatagtaatattacaattgaaatttcccatatcacattttcattttttagtaaaaggttaaatagtactattttttttttttgacagaaatataaagattacaagaaacacagattaaagcaatctacacaaaataaatataatattacaacttaaattgatttggtttgcttctaggcgttcaagactaagttacgaggtgaaacaccgattcggattctgcgaagctcagaaatttgtgtggttgccacaactggaattctgatcctagttgccatgagcatatcatatcacatttaacgttattgaaagttgaaatccatataaatttgtgtcttccctttattttaattgagtctaacgtctatttacataaaagtagtttttttattctttaaaaatttgtttgatatttttgtgactatttgtttggtttcttatccacctaagatgtttcaatttgtaagtgtgttttgctaaaagtggaaaataatacttattcaatctaggttgagagtttttaggaacaagtttttctataattctttctatctcaaattttcaaaagtaaattcattttttggatcataataaacaacatgatatgtcaatgcatacacacaaaatggtgcgtaaacaacttttcatgcgttggctgcactaaacagttgaagttccaagtctgttgtcaacccaactaaactagagaaatcaaaactcatgtatgaccattcctcattcacaacatcttctaaaacccacaaggcaaacatacaaataactcaattttcaaaaaaaagtacagctagctgcccctcataagatcttcttagctctcaagaagtaagaaagttaacaccggcattgacgagtcccttgataagaagaaacttttcagacctaacatcaaaactcatgattgcaggttcagttagaatttgtgtcaataaaagctccataatacagaataccattgatgcacatctcatcacatgtaggagaatgaagaggaatgtcttcaac

SEQ ID NO: 29842 - DNA, 2220 bp, Arabidopsis thaliana landsberg
  unsure (1)..(2220): unsure at all n locations
tttttcaatttttgtgtgagtgccccaaaaccgctttgatctcgtttatctgtaattcttccgaatcttacaatataatcaagtgatcagtttatatgagctaagtggacatttattctcgtacgttgtgatcgtcaatgagcaagccaagtcgataaatgtaaatgattttagtaccatataaagtatattgaaattaatatagtttcatttgctccttgttcaagtcaacaaatgcattcaatttaatacaaaaacattgaaagaatgtggtctaccaaactaacaccctgataaacagagagaaaaagagaacacaaaaagcaagaaagtttcaggtttgacacagttgatccacacacttcttccgttatataacacaagcctacattcataacaattttcttgtggaacaagaataagaaagataacatggagatcagaagatcaacagaagaagttgaagagaatcatgtaatgcagattacaggaagcaatggcatagttcacaacatggagttcatgccacaagcttacctcagaaaccaatactcatccgagattgacattgatgaagagttcgtttccacttatcctctcgaagatgcccctcttcccatctttctcaaggttcaactttctcttttgctttcgattttccttcattaagacaaagcttattggtttcgcctcttttatttatatgcagtttgaagatgtggagtataaggtgagaaacagtcatgctagctcagcaaacctggtgaaaacaatggtgtcaaaggtggtaacacatacaaatccggatccagatggatacaagcacattttgaaaggcataacaggaagcacaggtcctggcgaaatccttgcgctaatggggccttcgggtagtggcaaaacaactcttctgaagataatgggaggaagattgacagataatgtcaaggggaagcttacctataatgacattccttacagtccatctgttaagaggaggtgagttggatattttctcctacctgaatcatactattatgtgctgatctttccctgttttccagaattggctttgtgacgcaagacgatgttctgttgccacaacttactgtggaagagaccttggcatttgctgcgtttttaagacttccaagtagcatgagcaaggaacaaaaatacgccaaaatagagatgatcatcaaagagctcggcctcgaaaggtacacttcttgaatatttccagcttatagtgagaactagctcgtagactttcttcaagcatgttcttggtgatgtccagacacatttcttgtaaacactaaactaagatttattgaaaaacacaatgaaagatgccgtcggacaagagttggaggaggttttgtcaagggaatatcaggtggagaaagaaaaagagcaagtatagcttatgagattctcgtagatccttctctgttgcttctagacgagccaacttctggacttgactccacttctgccaccaaacttcttcatattcttcaaggagtagctaaggtatcagtttctagttacatgcaaatagattactaacaaagttcttgaaagatacagtagaataagattcagtttgtctttttcaggcaggcaggaccgttataacgacaattcaccaaccatcaagcagaatgtttcacatgtttgacaagctcttactgatatcagaaggacaccctgccttttacggcaaagccagagaatctatggagtatttctcatctttgagaatcttacctgagattgcaatgaacccagcagagttcttgctagacttgnnnnnnnnnnnnnnnnnnnnnnnnnnnctacccgacgaactatttgctgccaaaactgcacagcctgattctgaggaagttttactcaaagtaaggatcacattaagtcatagcctattctactgttcatgggactcaattctagtgttcatggtttgcagtacttgaaacaaaggtacaagacagacttggagccaaaagagaaggaagaaaatcatagaaatagaaaggccccagagcatcttcaaatagcaatccaagtgaagaaggactggactctttcatggtgggatcagttcttgattctttcacgaagaacattcagagagcggcgtagagattactttgataagctaaggctagttcaatcacttggtgtggccgtcgtgttgggtcatctctggtg

SEQ ID NO: 29843 - DNA, 2641 bp, Arabidopsis thaliana landsberg
  unsure (1)..(2641): unsure at all n locations
ttttcatacagagacatctccgaatatacgttttctcaatgatgctttctttctttctctatttagctactttcgtagatgatcattatggttgatgcaaatttagttggaagctgaagattttgctctgttctgagaacttttcatttcaaacaaaacttatgagtttacactcttttacattacagccacaactctgaaacagacaaagagaatttcccgttttcatccccaataacgaacaaaaaatcaaatactcttcttctcaaactacaacaattgataaaaaaaacagctcaaactcgcaggctaataataacctgagcgaatttcatctctctctcctccctaacatgattgattctctctaccaatacaataacaaaaaactaccaaaaactgtgattttgaagaagctccaaaattcagagaacgagggcgactttctcatgagatatcagaggagatggattcgctatcaagggctcgtaatggtctgctccaccaccacaccaacctgaaccagtgagatgagtttagtaattaccaagtccaaaaatatgagatagatttgaagacttttgatcaaatggtgtttagttatttaccagtgcctttcatgaatagaaagactgggacttcaagaacttcacttcttggtttgtgaggaagaaagaacacacagttctcttcctctaccatcccatctgatccatgcgcttgcacctataacaccaacatttcacaactttacttagatgtcatttgggaaaaaaaaacacaaccaaagtaacaaacttgttacatcagataactactcaccacatagatttctcgtttgaactcagtggctagacactcgattgctatgtcatccccaaacgcagctgcacgtccttctcggttctcatctacagataacaccccatcccccgtatactgcaaggtaatgatatcatactcaacctctnnnnnnnnnnnnnnnnnnnnnnnnttagaccaactaagtccatcattcaccggaagacacctctctctatagattgactctgcagcagtttctctgcaatgaagaaaagtaatcaataaacattacaaaccctagaaattatagaacacaatgtcacctcaagattatatctttcttaatcataacaagaagaacaataatgctacattttgcttcctatttcccctaatcataaaaacaaaacatcaaggtcgataccagatctgagtccatagttagcaaaagtacctatgcatcccaatctgtaaaagctcttcaatggcggaatcaagactctcacgttcatcttttttcgccaacaacttctcttcctggacaatatgaatcccccaaccactcttcagatccggcgaatacatatgcctaatcgcatccgtaataacctccttctcttcctcgctagcagatctgaaatcctccaaaaacctcctcaccgtccgccgccgtaaatctcgcgcgtcgatcccacgcgcctccatagccttctgagaagcggtgaacaaacagttcccgtcggaagaaacctctccgccgtgagagagacggaaaacgacggaagcagaggattcatctttaccaggatgtttccacaacacacctctcgcgtgtannnnnnnnnnnnnnnnnnnnnnngcctcctccaatccaaaaacctcatcccaagcggtggtagttgcggcggccattgtcttctcaaccgcgtccaccgccgcagcagccgcggattggtcaacaagatctacatcttcgagagacacggcgactgtagaaggttctctccaaggaaccgttggtgaaggagattgaaatgtcgccgttgaatcacacaaaagctttcccatttcttaaaagattattgccaaaaactctggagatgtcgtcttcttcgttctctttcttccaaaccaaaactgcaagaagaagagagagaaacagagaagaggagagagagagaaatgtacagttatgggctcaacggctagatatgggaggtgagagaacacgactgttgaagttaacggtcagatctaaggagactaaacgcgggagaggaaagaataacacgtggcgttacctaaatggcttcttttaacccgctctgactaacgaatggctgaggcttgaccgtgttccggtggaccacgccactcaaaaacattaaccctaattcttaattttttaaaactaaatcctgtcgttttattagctggcgcatcatactctaacgtgcacatggtgactcctttttggtagattgccaattatagagagacacatcagcttttagtaacggattggaccaatgagagagctcgctcacacgtatgagttgtgtcagggatggggcgagctgcgccacatgtgcggatttgtcttggacggcgtgaataacgtcgtgaatcgcgcgttaaagtacgggaacggtattttttacctataacggctagtaaaaaggaaatcttttggtcttcccctttttagcctattcgagtgttaaaaattggttgaataaccttaaggataagaagttgtagaataaagatccagagttaatgttataatataaggataaaactccctaataatgtatacatcaaatgaaataaaatg

SEQ ID NO: 29844 - DNA, 2472 bp, Arabidopsis thaliana landsberg
gctcggctgttacatcaaccacacagcaacacgcctcagccaagaccaatacctcagaaagctttagtacaagccaacagagatatcaattcaaccgcccttcctcgacccttagtcacagcagaagcccctcctttacatcaatcaagctgcaaggctcctcagccaaaaccaatatctcagcaaccagcagtacaatccaagacggatatcatcaattcaaccgcccttcctcgaccctcagtcacaacagaagcccgtcctttacatcaaccacgcagcaaaacgcctcagccaaaaccagtatctcaaccaccagcaaaacaatcaaacacagaaatcaattcaactccccatcctcgaccctcagtcacatcaaaagctatatctctgcaatcaccgccctgcaacacacctcagccaagaccaccgcctttaatctccaaccatactccaacttcttatcaaccagcttctgctccaccagtgcatggtatagcgcgaaggaccatggcacctcatttaagatcatctcgagctcccaactctgctgctgcaccatcaacatatccaaggttggctcaagaacaacaaaagcaacaacaaaagaagtcaaacagtagcttggtctatctctcagatgacgactagtgacaaatctttgggagtatataacatcagtatatagtttttgaagtttctcttaagggaatatataagttcgagaggccctttaaaacatttgagaatgccttgtacgaaggatcatttcgaatactaattttttggagaatatcaagtaagttaactaaaatatttttcacaaatttgcagtttaatcaaaatttatttacataattctgttatttttactctataggaattttcaaaatactttttttctccttacttcgagttttgaaaatatttttcatgcagcgaatctctgatatcaatttagcgccacgtggcacgtgacataccccgatctctaataaatgaactctttttaaaatcgcccccctcgatacatcagttcactagtttagtgactccactcgaccacaaacgctaacgcaaacgcagtcgcgtggactcctctgtttatttcgcgttttagatttcttaattctcattctgatttgactgtggaaagggattcgtttctccttcaaggaaaaagttttatctttgctggaaactcaactacaaacgcggttttgctccatttcgcgtttgcgttttagctccaatgctggtactctctgttctactataagctgtagcaagctccaaatcctcaaaaatcgacattgttgcttcttcatattaaggtgggtttctcattaaatatgcgttttcaattcatttccctacatgtatgaagaaatcatgaaatggggttccccaaaaacttcaccttttacttggagagagcatcattgaatttgtgggacatgattctttccatcaaaaagttagattttttcggtcaatggtggaggaaacaggtcctacaatcgaaaaccggttttttaaaccggtttccgacaaccgacaccgggaattgtgagtcccacaatcaaaaaccgggttttaaaccggttcctgacaaccgacaccggaaattctgggtcctaacaaatttcaacagtttgcttcgaccaacgttttgcttttccttaaaagcaaagtcctttttggctctatctaatttggtttgtctataattttggatcaagaatctacaatgtcaagttcataaagaaagagtcatgtgagctaagttacagtatcatcatatagttcttgttaagattcacaaaatctaatatttatcaattttggtaaagtttaagatgttttgattataatataaagattttgccattagtaaacagtttaaagttaagagcttttcaatgattctgcctctttgattactataatggttgaaaggtcactctcagatttgcaatgcccgtttctttctattggtggttggtctgttttcattccatttattattgtatttgccattctttgactaatcctatactcaatcatttctttaatcacattattttagtaatcaatatccttcaagatgctccattacttctttttaatatcctcttgtctgcaacttccttttcttgactctgtagttcttacttcaacttcaccactttgcagggtaatgtaatctatattagctctcttgtttggttcttttagtgttttggttgttgtgttatgatgtttgttgtctgtatgtgaaaacatagccaactaactttagagggaactaaagattttgcagaatcagatgagtgacaatggatctttaaatgattgatgtggaccgtatatctatcgctatgagtttcttgttttctcttccaactctgggcccttttaagaataaaagaaaattgaccgagtcaggcgagcattcagctagacggtaca

SEQ ID NO: 29845 - DNA, 3110 bp, Arabidopsis thaliana landsberg
  unsure (1)..(3110): unsure at all n locations
ccgccaccccacacacacacacgaagtatattagttggcactttcttatcgatttgagtgtatttaatacggagctaactatagtgtgggttcatgctattacagtcgttatgttcactccgactgagtagtcaccaagtgaatatgcttctttcatccctatggatccaagcaacttctaccgacaatacccctgaaaattttgaggccatggccagcacatatcaaatcactttactgttttcactagcaaaggttagtcgatacttctactctagctttattgtatattgagttctagatattccaccataccaaaggcttatggaatgttggtattatttcattctggccacggtgggtaattccactggaaatctggccccggacatcttgactcttttagatcaaaatgaacttacaacaccttgtttttgaaactgaattttatggttaagaactttaatactttatgcaatccatctagatgggatggtcttttgattttgtaaaattttctctgtttttgtgattgcaaatggcagagatcaaatcacatggctctggtgcagtgttttcagctggcattctctcttcgaaatctctcattgaatcaagatggtaagtgaaagactgtggttagtggcttaatgctttttccgttcatcgagagaattacctactttcgctagattttatgaatggatctcattaattagcatttaactatgatgaatattgttcattaaattatgccatgccatttttgttgatttgcgatgtaattttgttagtggtggatgttattatacagtctctcgcgttcatattgtacacctattaagagaggataatatggtgataaatcaaacatctagtcaggatgcaaggaatttaatcaaagggaacactagtttagcttttagttcctttttgactcaattatagttttagcatctacatattggacaggatcttccggaagttaatttgttttgttgaaacttgaaacactacctaccagtcacagattggctagaacttatatgttcagtaaaagtaccttttgttgtggaataccgatgaacgacatcttctccttgtaaatgcaaaaagattaatatgtactgaactccccattctattgagtttatttctgacgtagatttctggtataatgttgaaggaggtatgcagcactctcgtagaagatctatcttcacttttgcatcatatatgctcattttcggtgccaagatttccaatattctggagctagttccaattatcaaagaatctttaactgcccaaatggtgagctttggttgataattgcatccatttgttttccgttttctaaatctcttgtttctgggttgctcagctgtttttaatctatatgtgcaattcttcatgtcctaaataggttgatccttatcttgtgctggaaggagatatcagactgcgtgctgtatgttctggatttccacaggaagaaacgtatggatctgacaaagatgatagtgctgctctcaattcttcagtgattgtcacagatgatagacgcctgaaggaaatcgtgataactcattttacatcgaaattgcagacattatctgaggtacttatctagtttaaagttatataatgtgtaattcatgatagttctgttattttttgcggagggagtgcttgaccttataaccatttcatgcaataatttcacacttttgttttgaatttttatatgtgtaattctcttaggaggagcaattaaatttgagaaaggaaattcagtcagatttttccctagatgatgcacattcgcttggtggacaattattcacggatacaccaggacctagttctcctcttaatcaaacagaacttccagcttttgaagaggtataatgatttcatgataaatttgcttcaggaatgattctcttattgcaattttgtggatctttcaggttgagctttcagacatagcggcatttgaaggaatatccccaggggccagtgggagtcagtctggccacagaacatcattgtccacaaacactaacccagtagatgttctgagtgtcaatgagttgttagaatcggtaatagctacactcaatatttcataatagtttttattggtctcctcctttttaatgtgattttttcatcggtgatgtgtaggtatcagaaactgctcggcaagtcgccagctctccctgtatacgtgaaaaatataaaagataaaaatagataagaaagtaaggagatagagaaagaaacataggactaaccaaggaaaatataaaagaaaaaaagaagagtaaaacaaaaaagcaagcaatgctaatggcatcaataagacaatgaaaagaacgaacaatatcttctcaagaaggtgagagtttgttctctgtgacattaattgtcatcctataaacgttgaatcttggttcagttcagtgttcatttttttttgtattctcctgtgctgcagacagaagaagctggtgaagatgatgagaaggcaataattgtggctgatgttcaacctcaaggccagcttggattcttctcacaagaagttccacaaaattcatttcggttaccgccttcgagcccctacgataaattcttgaaagcagccgggtgttaaannnnnnnnnnnnnnnnnnnnnnnntatatatagacacacacagagagcataatatatattatcaccgtgtaatcttctgcttcgtatattcttagtcatctcttggcttttttttctgaaagcaacaatgattgattcatttcgttgtgaaaaaaaaaaagttgtaatcatcaaggagcattcgtttaatctgatcgaaccgtcatggaagagcacaagcaccgaaaggtcgggcagaaactcagaattgtctgtttgtttaatgtttttgtttgttgggggtgggaatatcatttgattgattcaaagtgtcgttgattgttttttgtatgtaatgagctgtgtgtgtaagagttttggttgaaccagagtcttgtggtggtttagggttaagaactgtgggagggtctggtcggtcaatgtattgtgtctggtttgctcacgaaa

SEQ ID NO: 29846 - DNA, 1278 bp, Arabidopsis thaliana landsberg
acagggttttggattttggtattcaaatgcagctcatttgcgatcacgggtaagttttcaaatttagtgcttggtccacactagctatgcaagaacccatgtactaatagtctaatactcatatttatcatgcttttctttctttaatgatattctcttttgataccaacaaacagagggttaagaaaatagatgtgcctcacttattttgatgctatttcgtttctgtagatggagaaactggcccgacagcaatacctgaagaacaagaatcctaaagattgtgcgcttctctatatagctttaaatagagttcaagttttggctggtcttttcaaattaagcaaggatgagaaagataaacccttggtggtttttctttcacgcaattttcaggttgtgtacacaaaccatattcttgttgggattctagggtctttttcacctttttttctgtacaacttctggcatctaggatatcatattgagtaacatgtctccttatttttacaggaagagaaaaataaggcagcagccttgaaaaatgcatatgtactaatgggtaaacaccaactggaactggctataggtttctttctccttggaggtgaagcttcatctgcaataaatgtttgtgtgaaaaatcttcaggatgagcagcttgcgctcgtaatttgccggcttattgatgggcagggtggggccctggaaagtaatcttataaagaaatatatactcccatctgctgttcagagaggagacttttggctagcaagccttcttaaggtggttataattgtttgcaaatattgttatcttgtcaaatacctttcttgcttggtgttacaaattatgactatgaagttgtccctggtttatacagtgggaattaggagagtaccaccggtcaattcttgctatggctgggtgtctagagaaccctgctactgagagctctactgtttcttcaaatcacgtctcttttgtggatcctagtattggcctatactgcctcatgttggcaaccaaaaatagtatgaagaacgcattgggggaaagaactgcctcaactcttagtagatgggcatccttaatggctgctaccgccttcagcagatgtgggctcccggtaaatcatatcagaaactagaacatgctgtgtgctttcaaatgacataggatctagagtacttcttccataatttgcatgtttttaccaaggcaccatgttgaaagctaagaacaaattttatagggaagaaactacctttttttata

SEQ ID NO: 29847 - DNA, 1313 bp, Arabidopsis thaliana landsberg
gcgatggtagatcacttgcgatatttagggaagatcgattttcgtttttagagcaagagatctataacacaaggaatatagagatttgggtgacaaaagaaactattaaaaatggggatggagaagctgtagagtgggtgaatttgatgagtgtgttagttcccgaatggtcgagtttaagtgtcaactattacccgccaagttacttcgtcgatgaagataaagttggtttgactcttgtaatatgttgttataacaaggagggaaaagcttatatttatattgccaagggagataagttccatgaaattgaaataaaagatttggttgagtataatcctcgtcaccgtacctattttcccaatttgatccaagttcctacgtttacgatgagcggtaggagtataacccaacatcaggttgaatctcgcttcgcaccccccaggggaatacaagtgagcgttggagttggaggagacgagtgggacgatggtttcttcgacaatgtaaaggaaataattatacatacaaattctttaggcatcatctttgtcaagttttactaccgcaacggtaacgtacgtgtagccggagccgctcatggggattccaccgagacacgcggggtgaaatttcttttgttttatttattttctaccttaacattttcatatatacaactatatactttatggctttttatacagcttatggttcccgacgacgactacattgaagccgtccaagggacctacactgagagtcacatcacctccatggcgttccggttgcacaagggcaaccggtcgctacggtttggattcttcgagggaatgtcctttgtgcttggaggagcacgaggctcaaagatcatcggattttacggaagaagctctgatctctacctcaccgctttcggcgtgcacttctccccccttccctagatttttcatttccaagatgaataatgatgtgtaagatgggagcctagtaattcatttactctatttttttgtttaatatctttactaaataaaatttgatgtctcaagctaaatgttactagtcaatctatcagattttgttgaaagtaaaactaattcgcatgaaagtaggataataatcaactgatcaaagttttggaaaaattagatatacaaataactaatagaaagtaaacacaatttaaacaaatatgaaaactaatatatattcaatcatatgtgataaagtttactggaacaaaatagtagaaaatagaaaaaacaaattgcaatgtttaacctcttttgtatgggtgaatgatgtgtttc

SEQ ID NO: 29848 - DNA, 4219 bp, Arabidopsis thaliana landsberg
  unsure (1)..(4219): unsure at all n locations
aattttttttatttaatcgttgcaatttcaagggggttttgctttacaattctagatcatagtaaagctctagtgtccaaataacccgagtgaaattttattttcggccttggtataaaattttgtaaatcacaatataatttctttaaagaaagtaaaagccaaatcatacgtcaaccaaataaaaaagaagttaaaagaacctaacaacaaaatattatctcatctaaattgttttggaccttttaattctcttaagataaatattctcattttctgtttcatgtaacgtaatcttccaattgtcttaaatagaataatcataaataaaaaaaactttacaaaaagcaaaatacaaaacgtcataataacataactccataattttctttctttttggcaaaaacgttatccttaattaagttctagtgttccaataggcagagtcgagcttaacagggtaaagatcgttggcgttggcggttgacgtagaagacgacgtgaaaggtccatcggtggttgtcgtgttcgttatctcctcctcacctatcgtggcgtaatgccttttcatcgctctcacactctcttcgtccttttcattgttgaccgaagcttcaagaagtttctcaacattcaccgttgaatggccttcgagcatactcaccaccgtcgacatcgaaggtctatcccctggagctggactggtacagagcatccctatctgaatcatcatcaatgcttcttgtttgttgtaatctgttcctagccttggatctactacttcaagtagagtgttttgttcccttaaaacgtgcacctgcgaaagaaattgagattcagatccataatttagggtttaaggggtttaggtttaggttttaggctttttgaggtgtgaagtgatgatttacccagtcaagaaggtagaaggtatcagctttagatcgtgagctcgtgttgctctttccgtgaacgatttctagggccacaacgccaaaactgtagacgtcggctttatctgtcaaatggcctctcatggcgtattctggagccatgtatccactacagacaaaaaaaagtttgtttttggttatatgaaatctcagagttgaaacttcttgtttgtgattgattggttgtttgactcactatgttccagcgactcgtgtgctgatgtgtgtgttttcttcttcatcaagcttagcaagcccaaaatctgaaatctttgggtttagttccttatccagcaagacattagtggctttgatgtctctgtgtacgatcttgagtcttgattcctcgtggagataagctaatcctctcgctattccaacacaaatcttctgcctcattggccaatttagtggtatctgagtctcttgaggtcctttaaattgataggaacaaaaacattgttattgagcaaaacaacaattggattggatagaatattttaagctgtaaggtgttttaaaaggaatgactaaccgaaaagagctcgcgcgagactgttgttctccaagtactcgtaaactagcaggagctgatcaccttcaacgcaacatccatatagtttaaccaaatgtggatgctgcagagccgaaatcatagcaatctcgtttaagaattctcgattcccttgttttgattttgccgatagctgcttcaccgcgattacagttccatcagtcattattccctgtaatcaaaacaattaacaaaccttaaagatcatatatcttttatcttttgtctctcataacaatgtcatttcacagtataatgctaaccttgtgtacaggaccaaaaccaccttctccgatcttgtttgcaggatcaaagttatccgtggcaactttgatttgcctcaaggagaacgaactgatctggaaatctaagttcttgaaatctgaggtgaagaaacacagctgagttagaaagatacaaagagacagaactcaaaaggaattggaatgttgaaatactatttaagcaactcaaactatgtacctttttccatctgactcttgggtcttaagcagcctctccaccataatataccgccgattaaaagcacaagaaacaccgtagaagcgattacactaccaaccacagtaccaacagaacttccaccaccagttccagtgcccggttcctttggtggaataaaatctagaaagcaagaccatgggagtaaagtcaagagacaaaaacactcaaacaaaggagaagtctctcgtaaatagtttgaggtttagcaaagtttacctggatctaccgatacagcagatatgagaggaccatagacacctctcacaggaatagcttgagttcctttcccagcccactgcaatcttatttccagtttcccatttgtaaccatgacaggaaatttcttaacaacagcttttcccacaccttttgcttcatcaacgatattgaaatctttcacttcacgtttaccctgcaatattatcacaccagccaattgattcagctatacaatctttctgacaatcaagaaacaagatcaattaaattacctgaacgtatatgtcgaagtatcgtcttcccaaattgctatacatgttcttttcattgaacataatttcagcgaaatgaagattaaccgtatagtttccttttccaagacacaatgcctggtaagtgagggagatagccgagagacgcgcttgtgtgtaaagcctagaatctatgctagaatttgatatcttaagctctgatgaattcgaccattttgattttccattgttagtccgatcatcatccaagaagtttcccgtgttgctagaaacccacccgtttttactatcatagtaacccggtgtatcccatgtgtcagcatcatacttagtctcattgcttgttatttcattaccaccacagtttatatgaaggccgtagaaagctgagaacaaatgattggtaaccgaagataaatcagatacgcaggtaggtattaacccgatatggttctgtaatgtattatatatatatatatatatatatatagcttcagaggcttacttttaggacaggtatatttactcagacacgaaacatntgagctgtaggtaaacataacgtaacatcaatattatagtgagtgttgtataaatccagagctttcgaaatgttatgagaagtagaaaagacttacgagttatttgccactaaagggcttgtgcttgaaaacgtgttcctgcaaataaacggaaccaagaaaccataagctttatagcgaattttgaaggcatgacaagtttaatcgtttattgttcttcttacacggatttttgttgacattcttcggttttatctttggagaagttattgtaagtaatatcactgccaaaaacgatacaacaaccaaagaaaacgttagttatactgttttcactacaaagaaatgtaatatacatataagtgaaaaacactcacatcgtgtctccttggtctaccatccaacttggtacttgtccatttaacatgttacttgtaaagtatctgcgcgattggaaaacaaatttcagctcagtttaatattactccatataaagcttttttcttgaaacagaagaaagaagagaagaaaagagcatcatacatgaaatctacatctgaaagaccggaatatgtggctgggattggtccactcagtttgttaaagctaagatctctgcacaacgagactcataatgtcagcttaaattcttttccatcttcgacaaattggtttcatgcttgccgaagaaaaaaagagattacttacagattctttaattttctattctgtccaagatacgcaggtaagtctcctgtaaggttacagttcctaagaatcctgcaacgaacaacgagtataaacagaagttagctagttgaaggtggaagaaaccaataccaaactcgtctattctgagtctcaaactcacaaatacttcatcgatgtcatgtttcttagtggcggaaatggagattcaggtccactcaagtcagtgattctcctacaaaatttcatatttggaatagagtaaatatacattgttgaaggtaagtcagcccatgagaggcgaaaataacgaatcaccacacgcaaaattcgtgtacatacaagtctgtcaaggttcccagaagaccaatggcactaggaatcggtccaactaaaccacttgctagaataaccctgattatttag

SEQ ID NO: 29849 - DNA, 2517 bp, Arabidopsis thaliana landsberg
  unsure (1)..(2517): unsure at all n locations
ccgatatccgggtggtatgggacctgactcacgcaaaatttggatcaggacccgatccggaatccgggttttacgtggcagtctttgtgtccggcgaagtaggtcttcttgtcggtggaggaaacttgaaacagagaccgaggagacaaatcttggtgtccaagaaagagnnnnnnnnnnnnnnnnnnnnntactctacgaaaatcatgattcaaggaaaacttagagagattagtatcgacgttaaggttgttaacgacgatgctagtctccggtttagcgtagacgataagagtgtcctaaagattagtcagcttcaatggaaattcagaggaaacacaaagatcgtgatcgatggtgtgacaatacagatatcatgggatgttttcaactggctgtttggtggcaaggataaggttaaaccggataagattcccgccgtgttcttactccggtttgagaaccaagaggttgaaggaaacgacgttttgatgatgaacaagcgtgtaagagacgatgtcattttacggaaggagaattgtcgaacaccgtcgttttgggcgagtacgtatagtcattggtcttcttctaggatgtcttctgtgatggagtggtctagttgtagggaacaagatgagaggagctacgggtctaagagttggttctctttgattatctatgcttggaggaagtaaaaacacactcaacttatctttatcaatttttcttatttgtatatggggcaagggattggctttgaggatatatgaaagtgtgtaagaatcagagccttggttttgttttgttcaaaacagaccagaaactcgtcgttgcataggaaccagtatagtagttagaacaagcaaagggtaaaaaagcgtgttttgtgaaaatttcttaacaaacaatgcctcattggagatttaatcagtttagaaaaaaggcaaaagccaccagaattagaacaagggtgcaaaataagccctatatgattgtgcttaaacaaccaatgagataattataagatgacttagtagatgcttgatacaagtattatacagaggaaaaaacaaaagacgaaggaaaaaactcgtatgcaacaagagtatgactcacaatttacacacttgtgtagtaacttacttagaatttgacttggtgcatacgttatcataacaaaaagtagatgatattcctttaccggtttgaaaaagtagatgatagctccgttggttaaccattgcgactgaatatgggagaggtcccaaattcgagtctttgcaacggcgaaggaattaaaaattgtgaacacatggatgtttgagtacaaagcaatcatgtggagcacaagaaggagctgtacgccgggagcagcgagacttaaatgatgcaaattatatttgtttgttctcatatacacatcgtccttgattaccaaagaagcaccagctacataaaatatacatcaaaggaattatataatcatgcaactataacatttcattatctttttagtgaatcattgggatacaaaaaaatatgaccacacagagggtcaatgtgtttaaaactttgaaatgaagaagtttaaatgagagataaaacatagaaaaatatatgaatcatattctttttgtacatactcatgacctctctctctctcctataagcaattgtacaaagaaaaatgatctacacacccaaaaaggttttcaataaccttagaacaaagcacgagcatgccccatgtatgattgatactttgcttggcatgttcctctgttcttgtctttttactttttgtccttttcataaacaataattaaatgttcaaataatgatgataacaatcaagtcttgatgcttacgcttggcgacttctggtcttgagctttaggtcttcgatttttcttagaacccgaagacgaagaagaagaagaagaaggatgattaccacttgattttgctcgaatgtgtgaacgatgattatcaggtgtcgatgaagacggagaagaagacagtaaaggatctgatcgtgatcggtttcttagtttcttcttctcactttccgaaagctctccttttcctactcgtctcacttttgcctcgttcaaacgaggtggtaacacacagttgcagagaacccctatacaaaaacagttacctgcattacttgatgtgatctctcttatgccaaacaaaaacataacaatagtcacttgtgattggtttacctaagcgagcaagtcgattcacccatctagggattgatttctgagcaagtttaagacaaacttcattgcaaaaatggttgcagttccttgtgatgagatggtacttgtttccttgatactcttcagctaatttctccataaaaacacgaacttctttcgcaaccaagtcggttttccccacaagaatcgatttcctaaacgtgaaaccaggacacttctttggttccacaaaaaaaatacctgtgcttgatgattcatgtgctccaaatgcaatgcatctcca

SEQ ID NO: 29850 - DNA, 1326 bp, Arabidopsis thaliana landsberg
gaaccctctattgaatgttctctcgtggttttggctattccttgtttgtttttcatggggttgagtatggatacggggcacacgagaaatcgagctcggggatttttgaggtggagccaaagaagtgtcctggtttcacattcaggaaatcgattcttgttggtgaaacagagatgaaggctaaagaagttcgaagctttatggagaaattatcagaagagtatcagggtaacaagtaccatctcatcacaaggaactgcaaccatttctgcaaccatgtttctttgaaacttactcacaaatcaatccctagttgggtcaaccgtcttgctcgcttaggtaacccaaaacttcctctacaatagaatctttcaggggatcaaataagtaatgttgtacattggtttcttttgaaccttcttaaggtttcctctgcaactgtgtcttgccggcttgcttgaacgagactaaagtgaagcgggtaggaaaagacgggaagctgctcttggaaggagaaaatacgaagaagaagaagaggaagaagaaaatacgaagaagccgatcaggtcctttatattcgtcttcttcaaatgcaagattagataatactcctacacataacagatcaatatcaacgggtaatcctcctctttctgcttctccatcttgtcctttgagacctcgacttccttctgttgcatctggagctgaagatcaaaatcctccaagcgtaagcgtcaagacatgattatttttcattgtttgaacagctgctagttatatacttgtttatgaatgcgaaggtggtgcttgtgctttgttctcaagttatatatcctccattcgtttggttatacttggtataatttacttataggagaatcatgaatctctctctgtagatactaactgtagagtgaattcaacatttgtttgttatgttttgatgtaaaattttgaaaattgtacgaattacttgtttgaatatcaacaaatcgaagtaaaatagctaaatattttggaaacaacaagtgttttattttaaatttctaattaattcttaagcaataagtcccaaattttcacaaatagagtttttattaaaagaaaaaaaattgatgagcgtaaaaataaaaaaataatgaattttattttattttattacagaaccaggaagtggcataaaccctagtttgaccttttcagaacacaactcactataaatacctatcaaaggacactcttccgcagctacaacaaattacaccctggaaccctaattcaccgttcctgtgaaaagctcgcatacataagatctgttctatt

SEQ ID NO: 29851 - DNA, 2895 bp, Arabidopsis thaliana landsberg
  unsure (1)..(2895): unsure at all n locations
caaaaaggcttcgagtgagaatgtgcgatgggttaaataaacggttaagatgaaagactaaaccatccaacggctattgattcaccgacttacttgaaaatggaaaatgttaatgaacccgggaaaatgtaaaccccaaacacatgcgcattttagctaccatctaatgaaattaccgaacttaccctccgatgcaacattaatttcctaaaaaatttctggtatatatacacgaagctttgtatatcacagcaaaaaacgcacaacgagaaaataaaaaacgcaccgccggtaacaattttccggcgaatctgaaaactaacgatttttctcgagtttggtagagaaagagaaagagattgattcgttcctggttcgtggatcgaatagagaagaagaaagagtaagtgcaacagaatcaatggtatttcccggtgagatgacgacgacgacaacgagacctgagcaacgatcgaagactcttcacaatttccctctcccgaacttatgggggaatcagagacaactcaagtgcacgaagatcgactctatcagcaacaacaacaacaacggaggaggtcccggcggcgatcaccgactacgacgccgatctccgcctctggaattcgctgattctcccgtttcgatgccgtttcgattcggtaacttcgatcatcgccgcccgtttaaatcgggaagcgaagaagggatcgaagagttcagggtgaagcttatgtcggatctgaagacggagacagataagatcacacaatcgatgtttaacaaaggcgtatccgaagaggaagaggatcaaatcgacggttctggttctggttctggttccggtcaagagaagtagnnnnnnnnnnnnnnnnnnnnnnnnnnnnnnaggaaaagaagagcagcagcgtgtaaagaagcggaatcctgcagtttgatcaataaaggaattgtgattgagcagtaaggtagttgatcatccatctccggtgagaggcgtcggcggagtggtcgaagcggagaagaagcgtcctatgttctctatgaagctatcgaagaaggagatggaagaagatttcattgggatggtaggtcaccgagcaccgcgtcggcccaagaaacggtccaaaactgttcagaaaaaactcgatgtaagtcttttagattttgcaatttggtgaacgatttgaaatttttttgttagatttttgttgaaactgaaatttggattctttttgttctttgcagagtttgtttccagggttgtatttgactgaagtgacacatgatgcatataaggttccagaataaaccaaggtataatcatcaatcatcatcatcatcacggatttgaaaagcttgagacttttttagtttgagagattctgattcattgttgcttttacagaatctgcagagatgatgatgatgatgatgatgaatttgtgtaattctggaattgagggtcaagttcttgagaagctccttcttcctctgctaatatttttcttgattaattctttcttctaaattgttctgaataaaactatacaaaaacgtttaggtctccagttgattaatacaaattaaagttttcttctttctcggtaaatcttgactgtgttgtgaggaaagtgttttctctgtcgaactcaatctcaatctaaatctcacatgtgtgcttaattagtgtgatatgattaactagtgaaagcaaaccaagatttgttttgagtgaaatttatgcaccgacagaggatattccaaaattcttgtgtgggattagattagacaacaaaggggcttgtcttttgttgtttctcttttcatctacttaatgcattaaactgacaatgaagaacatcttaaatgtgtgaagaagagagttttaatggtacaatgcgtttgagattgagtcaaaataaggaacctttgagattcaagtcagtgcaaggacaatgattcctatgaaaagctgagaccaatttggttttgtggggtgtgttttgttttcccgcgttggcttgtttccgctttcgtgagttgtgtcttttgactcgttctttgctggttaacatcttccggtttggttttaacaaagatttttatgtggttaattaataattgccgtgcttaacttgactcttctgtaatagtgggttcaagttgactaagtatgttaacatatatagttcaactttgtcttatgtcaagaaataaagaaagaagacgttcgactttgtaagaatgaagaaatatataacctgaaagtcagatctgttaagaattgtgggcctttggacaaaaaaaagccttacaattgttgcttcttttagtttccttgggaagcaagtattattagagtaagggattttgctagagcctagaggagatatagcaatctgcaagaacagtgaatatggcatggcatgtcttcaacataacactcaggattcaaaagctgctccttgagtctcttttattcactattgctttctccttgcaaaaaaatctatgtatgaagtctaaatgaattgccaaatatgaatacctcggctaccagaagttaccacaagaacactcgccattccggaaatgatgaaacctcttcctgtctctcaagataatgtctcgctgcaccacccacgacaagaacctgaagaagttatggcaatctccacaagtcctcaagttcttgaaaatcctaatagttgttcccggaggaagtttcattagcccaaaagcaaccgcaatcttctcactatgagttgtcaacatatcttccttgtgaccatcagactatacgtcgtgcaacacgaagctcgtgtctggtacatacccgagtctcctcatctctttacccaggtcttgaagatagatgtaaacagcttctgc

SEQ ID NO: 29852 - DNA, 3069 bp, Arabidopsis thaliana landsberg
gatgaatctttgaagaaaacagaaagtttacgtgtctattttgctgtggtaaggtctttatcacgggtggtgtatggaagataaaagtggaacttcccgaagcttatccatacaaatctccatctgttggatttgtcaacaagatttatcaccctaatgtcgatgaatctgaaggcgacaaccattccacagttttccctttttcactgcattacatgagctgcatatgtcgacattgtttagtgttgttttgcgtactcttatactcggttatgcgtttgcggcagctctggtgctgttagcttagatgttataaaccagacttggagcccaatgtttggtattatactaattttttcacttgttttgagtgcctgattgcatccatattgaagttgtgcttgttttgcagatcttataaatgtgttcgaatccttccttccgcaactgcttctatatccaaacccatcagatccatttaatggagaagccgcttctctgttgatgcgagaccgtgcagcctatgagctcaaagtgaaaggtaaactcactctcttcttcccatcttgcttattctctttttaacctataatattgacacttcacaatctttcacctttgaagaatattgtgagaaatatgcaaaaccagaggagattttaagtgatgatgatgatgatgatgatagcatgagcgaagatggttcggactctgatgatgatgacgacgacgaaatcgttgggaaagccgatccatgactgtttacaaatcaatctttctttgcactttcattactccatcttcaactttaaaccagtaatgctcattgcaaagaggagagaagctttcctctgtaaatttgtaaagacttatcattctttaggactattgaaatctctttttttaaaacagtagataaaatgtaacaatttgctatctcacaccaatgaaacattaatccatatctcattttgtttgtcttatcctccaatttttgtttttttatacataaacatatcggaagatgcatattgccgacaaaaggacattcctctaaagtttactataaaatttcggtattacgatctaaagagcaacataaacaagaaaaggaatcatagacctacagaattatttgattactaaggtcacagattcactgctaaattgctttcacattgaatataagcaaaagagccttaatcctctcaggaaccaacaagggtccctctataaatggctaggccgtcttttaccagaatctgtccttaacctcttcaccggatttgcccatcccacagaatcaccgaccgcaccgctgttgtttggatgagtgggttggtttggccaccgctgctgttgtgctagccttgtttcccttggaactccaccagacacaggacttctaagaccacgaccaatcattgctggaggtggtgaaactgggctgctggagccaccagttcgggttttcggaccagacttctctcggtctttcctctttttcttgcagattactaattcccctggatgagctaatattggggattcatcagtgtggcttgttgtccccccaagctttgtttctttctgcggtatctgtactctgatccttgagttctcacgttgttgagatctctgaggagagcttggctcggtttccggctcgtttactaacttttgcctcttgccttggctaattcctgctcctcttggggttggtgtagacaccaaagttggggctgagccagaaaaggaaagagcattccttgcttcccggaaatctgtgtctgggaaagacatctttaatagatcaaagaacagattgtgaaccttctttgcttcagatctcacctgcgaaaattttgatcacctttaaatccaattggcttttcaatcaaacagcaaaaggaattcatttttatttacaatgcaaaaatcaaacctcatgtgaaaacccatagaattgcattgctccccttagcattaactgcacgtcagatgcgagttccataactcctgcatactctagtctttctacccggtggtctatctctcgtagttccaaaaggttatttacacctccagctgcataaccattctgaattctcttccacaaatttgtcagcataggtacaatctgctgaccttccttgtcgattctcctctggagcttgctaatcacgattttgcactgcaaagtccaggaccaaaatagttcagactaacgaaacaaaatagatgcaccaaaaaatatcaaccgaatgttacaatgaagtaaattccatttaacagaacatacccgtttctgtatgatgtgggacattcttgcaccagcatttgaagagctaataggactagttccatcccatgtttctctggaagcttcagcgttatcctccacggtaagctgtgtagcattcaatctaccagattttggtgatgagacatggagtttggaagtactagctaccttctttgcaggtacactccttagtctcgaggacgaatcactctgatcttgtcttgaactatgcgagtcaacaactgtccttaactttgatcggtagctacgatccacttgcaatggctgagctgcaggcatctcactaccgtcaactctttctgccgtctgacggggtcttagacgaatactccgtttccgttttatcgtaggttgcagaacctgttcttcatccccttcatcacggtcatgggcccaacttcctgatcgttggagatctatgtgagaatcccctgatgctgctatttccccctcttctaggtcatccagctgttcaacataacggaaaaagcaaacattacacaaacaacagagaagaagatagacattcaagatagatcaggacatcaggtacctaccagtcttttagagacagaacctggcctagtgtccaatgcagacaaagagccaaacttttgtgaagaaacaggagatgccatttctttcgatctatggctctctggagaagatcctgacgaaccagcatcatcacgaggaggattttttttataactaccagatcccggaggataatcataaccaca

SEQ ID NO: 29853 - DNA, 2016 bp, Arabidopsis thaliana landsberg
  unsure (1)..(2016): unsure at all n locations
cttgtcggcggctccgatcaagttaatggtgatgagatgatgggcagatgcatgcatgagattgcaaattgtttagttgccattgataaaggcaccaaattgccgagttactgttgtggaagaatggtaaagccacaaccatgtgcctgcaagtattttatcaagaaccctgtgctcttgcccagacttctaattgcttgtcgtgttcctcatcctaagtgttagttaatatctacagattatacatttacaacaataatatagcatacttaattattttgatcgggatttgtaatctactgatttgaatccaatctagatttaaatcaaggttttatatagttaaatgaagcacttttatacgtatcacaatatgaatgtattgtacactttgtagttactattttgtttgtttccattattaatcaaaattcactatgtaacttcattctcttaaaacacacacacatatataggacaatcgtcttttcaaggctccaaatactagaaatttgaaggattagattttacaatgccaagagataacgaaactcgtattcgtgagacctcacttctatcagttttttcaattgagattcacttttcttgttcaacccctccatcgctgtttccttgagctgaaagcaacgttgggctggtggtaattggctgcatatccattcaattaacgagccttcatcctcagcgaaatcccgtagacgtttatgcaagaatcgcggaatcacaatctttttccttcccgagacaccgatggaagcttctagatactctgttcttgctttgattagttcgttcaccacatcttctgctgtataaactctcaactgtatcatgtatataggtgatcatgaacaaagatgctttgttagttactaccgttgaagcaacacttatcatatttgaagaaattgagtgaacttactgcaggtgaagaccaatctccacgacaaagcacgaacattaggtttggctctacgcatctgaatccgtagcgtgtctgtattctcacttcgctttcaccggctgaaacctttttattcggataaaagaaacattttaaagatcagttattacaacttcacaggatgatatatatgagtacttacagattccctaggttcgcatggactctgcaagatggatccttcgatatctagagcagacagttgtgtacctcccacgtcaattgttgcctacaacacaagtcaattttgttcattaacttaagtatgcgaagtttaaagatgtttcttgttttgtattagttaccattttgagaatggtcagcagtttttcctttgatgaaggtagtccgtgttccaaaaatccctgcaaacaaacaaagttatttccgaaatcttgactttgcttcaactaaatatgaattgagtcatggaattacattcataacgcaggcgttgtaggtattgatccagaatgccatctttttcttgtggttcaagaaactcaaatccactctgctcaacttctccttcaaaaccctgcatgtgtgtttaattatacagagatcatgaaatcttgtgatctcatcaggtaaataagaaggaaatctgnattggtaagtacctcaaaatgacaagagaagtggagcaatcggataaacggctaacatcaatggaggttcgagtgatatggatgaagttcttgtattctcctatgtctctaagagaagtccccatgacagctcantatggatcaagattagatgcgttatggtcatacaccgatttgcgtttgaaagaagcgttcttgaggtgtgtgaggctcagctttgaaacagtttttgacccttctcgctcacgcgatgacctgttgagttccagatagattcccatcaagcacttcaccagatcttccgatactccatttggtgtcgtctcttgcacattattcttctcttgtgttcatgacattccatcagaaaaagtcgaagaatggattcttgatcagacctccatggtgatccaattacgc

SEQ ID NO: 29854 - DNA, 1967 bp, Arabidopsis thaliana landsberg
aaaaacattgagaactaaagttgcatataaacaaaacaaaattataagctaagtgatattctttaacacttttttttttatattaccctaaaacgaaattacttttggatataagaagcattaacaaaacttactaaaggagacccaaaaaaactgcaaaattgttagggaaaaacaaaagcacacagctaattagtttgttttcatgtcatcttcttggtcagagatcttctttgtatccacagactcatcctcacctccaaaaccaaactcgttgacacgtgttttgtccacaggataaacccatctctggtacaagtatattaagaatatcacatctgcaacaacaacaccaaatttagatcatcatcgatttttgtgaattccaaaactatcctagagacatgtatcaataaactcagggaagatggatttgtattcaccatctcggaagacagaaaggcgatgcaacattggcattttgatgacaaaagcaaagagatcgtcgatgattgtgttgaggaacttatatgtcatttgcctccatggtaaatgttctactgacttcagcttatagttgatgaacaattgaggacacatcattatgaaacctgtaaaaacacaaaacacattgatttcgactcaattgaatcaaccacacgagagttttgaactggtctaaggtaattttgaaggatttttaccaaacatgtagacgcagctcgttagtgaagataggatccatgagccccagctcttgtggcgttcataggcaagtgaatatatggagaaacccacaacaagaaggaggagcacataggataagaatttgatggcaatgtcgtcatactccttggtcttgttgcttgcataggattcacggtcgtggaacctcaatcttggaatcatcccacttcgatcaacctgggaattttaaatgtttaccatggattaacacacaaaagcaaaaaacatctgatgaacgtgtcactgatttttgaatgatgttacacatgcacgaaaatagttgactcagtgatcagattgtgtgtcatatcagatggtacctcaatgcgcatggctttcccaattttccagaactcgatgcagacaccaactccagagctagccagtatcatccatgaagtgtcgttgtcaagcaggtagaggaagatgataaactgacagataaagtttagtacgacagacttcgcagacagtccttccatagatttgttcttgttccaaaactggatatctgcaggaaaagtaacaggtaactaaagagctagtttcaagaggcattttacgaaagtagatgttctttcaggtctttaccatttttgaatgcaaggaagtcgaatacagaatgaagcatcgaaacaaacatagtgacgcccaacagatagggatttccttccaaaaacaccctctgcaagtaaattattaacaaaacacatgatcacctcagctccaattaacaggaaaaaataataatcacatctctctacctacttttagaattcatagttaagagtcgttagatgcacatcctagtatattattgaaaaatgaagccaactggaaggaccagaattacctttagttcgtcagattcaccatcaagcatgcttccatagctacggtgaatctggaaagactgatcaatctgctgaaacagctgccactttgtcatgcttatggggcttacttccagattaagtggcagctctgagaccgtctcattgattaaaatcaacttgtcccttagcaaccaaaactcattgaagaaaactgtagggtagtagtttattgtactaggttccaccagtaagtctgccaatatttaagtaaaggaaagagcagatatggaccatcacacctttagcatggcaaagtgaaatcctcataaattcccattccaaagattaacagaaaagccaaaaagaaaaaggaagcataggttc

SEQ ID NO: 29855 - DNA, 819 bp, Arabidopsis thaliana landsberg
accaagaggtaattatagaaggtaaagctctccaaatcaacggatatccgatgcacgaccttcagcttcgaagctaagatcacgggtttaaccatgcctatcattctcaccatcaacgtatataacagagcttccccttttgatcaaccatgtgattcaaagcccaaccgtaaggactcctccctactaatttatagatccataaaatcattagatagatttcacatagacacagaaaccaaacttgaagcttgtttcaacacaaacctgacccactaagaccggtgacccaaatcacacatcctttctgatcaagcaatctctgtctatcaactttctcaacagaacattcatgccactttatatttgtcgagtttccgaccgtagacaaaggtccttgcttttgtcctaattagacaattaaaaccataaaaaattggcaaaacaatcaaaggttctgggaaaaatcaggaagaacgatacatacccgtgtgaccgttaatggatttaacctcaggaatagatccatttttgttatgactcagagtttgagatccatccatagagacacatgctcgaacaacatcagcagatcttgaattactcattgaattgctatcgaaaatcccttttggagaagccatcgaaagccctaatagcgatttagctccggcggcgatcatattttacggtgggggacgataacgcctttaattagtcgcagggaagccgatggcggccggcgatacgtcctggtccgatgcggaacggagcaattcggtccgccgatcgattcggggcgtggaccgacgcggatta

SEQ ID NO: 29856 - DNA, 2503 bp, Arabidopsis thaliana landsberg
gagaatattcatcaaaaagatttaccaaaagtgttcagttttacaataaagaatcacttaaactagagttcgagcatcagtagatatactagaatcataagatagatagtaattggaaacttcggattataaatcaaacagtcaaccatgattaactaacctaaaccccaaatctcgaaactattgggttgaatcgtttattactggtaatttaactagtgatcatttggattcaaccataatttaatgaacaagtaaagatttcacaagatatacctgctctgagaaacatcatagatctggcccttgatcgccataagaaggggctttttagaatcggagccatcataaagcttaagctcctcctcagtgatttctccgagctgaaccggcggtggaagaggctccgattgaggctgaacctccaaagaacgaggtcggtgaacttcaggagaaacgaagaaaccggagacgacttggtaaacggcgaaagcgagagcaagtacggtgaaaaacgcggctggagaaagtccagtgtaagctgtgattgtttccttcaacgtctcccatatttgctgaaccatgatttgagaagctatcgagaagcgaaagagaatgagagagaagagtaacgttttgtcttttaattttcagatttatttgcgatcgaattaaaacatatatataatatcttcaatttttggtataaaataaaataaaatggtcaaattacgcaacaagaattttaaacgattttgtttaacagtcgtcgtccataatgaccgttgatgtctgaaaaatattttctttttgttcgtgtgaaacatacatagaaattttctaaacgtttttaagaatatatatcgttacctaactagtggtggctgagctcgataaaacggtgtcgttaatgccgccggagaagactggtaggtaagaactaagaagaataagatatagaccaaaaaaaaaaggtagatgatttgcaaaacaaatgtgactaataatgctaatatcaagacaaataattgtaacaatattgttttattttcctatttggtgtgcaaggttggtggtgatcaaaagttgatcactacagacattcattggcatagcctacagatatatacacataatacgattcaaatcaaaacaaacaacacaaagaaataaacaattcaacagtcaaagatgagaacaataacaagttaagtccttcacagagaatgatcacagcagaaacatcaaagatgaagagaactcacttcatcaaccttccagtctccttcctcatacttgtaccatctcacaatcccttcatcgttttcagtcctctgacacatcacacacgtcttgtgatccatgcaagtcaagaatttctttagccttgctgttttctccattatcgtcttatcgagctctctaacaatcaccttctgctgaggctgccaaccgctgtactccactaggtgagagtgtgatatgttgagcacttcaaggcttggtaatccgtcaaggattttcatcagtgcttcccgctttatcgccgagcatctgatgctgagtgttttgatgtttgggaggcaagtgatgagcgtgtttgcaaagaagacctcgaatggacccatgatcttcagctctttaaaattcttgcagttcttggcaatttctgttaagagataaggcgggtttgcgatgcttggcattgttagtgactctagatctttccagattcttatcgctttgcatataccagtcttctttattctgttccaagccggtaggacgacccgtctcaaccctggacacctgcaaaatattcagtacaacaaatttttcaacttttagcatttgcgagattcagcttaattgtaattcagcaattttgactgaaagtgggtacatgaacttaaccaaaccaaaaactgaaccaacttttgactaaaaaaccatagtttcggccatgatgaaacaatttggaagacaaataagtggaagaacgaaaaggacatacctttctgcggtgtaagtaagctgatcatcactcaagaacaagttgaaatgaaaaatcaaggtcctcgggctttctccggtaaggttcatggagagtttcaggatgcgggttagggccttatttgatcggcgttccacatagacataaggctctaatgggatcttgatgaaactagatctcatgtttgacaaatccaccgtcttccaaagaatcggatcgcaacaagcagctctccatcctctacaaacatgagctaatcccgaagtcaactcaaagacgctaaacttctggaaaattcttactaagatgtcagtgtccaactcttcccatctcctcaatcgacgactctcatactcttcttccattcttgttgtaccctaaaccagcataagaacgttaatcaactgttgttatccacaagagcttatagaaataggaaagagcacaactttaagaagtaggaaaagaaacacacatcaggtctcttat

SEQ ID NO: 29857 - DNA, 1155 bp, Arabidopsis thaliana landsberg
ggcaggcgtatgaacaaggggcaaaggaagtcgctttctctgttgtcagtggcgttaatggtttgtcatccttccctctgcattactactctttctctccccttgtcttgcatatataattcaaatgcattgttttcagctagtgtattcgcatatgggcaaacaagcagtggaaagacgtacactatgagaggaattactgactgcgccttggttgatatatatggctacattgacaaggtaaagaaagcaaacattatccttatatcttactactttacttccgagcccattatgtagttgtgtatttgctttctgcagcacaaggaaagagaattcattcttaagttctctgctatggagatctacaatgagtctgtaagagatctcttaagtacagatactagtccactcagacttttagatgaccctgaggtaaatatgatactttcttttattttgtagaactgatctttttgcaatttctcatgctgggctttttctttttgacagaaagggacagttgttgagaaactcacagaggaaactctgcgagactggaatcatttcaaggagctcctatctgtctgcgaaggtatagataatcaataatggtatactagtgatgttttgcaacaacattgacaagtgttttaaccatttgcagcacaaaggcaaattggtgagacagctctaaatgaagttagctcccggtctcatcagattttgagattggtaaggcatcttgttgatttctatatatggttcaacactgccttcttcatcatgttttaaaacttatatctttgcactcttaccttcttacagacagttgaaagcatagctcgtgaattttctaccaatgataagtttagtactctaacagcgacagtggtacatatctttgaacctcccatcaaataatctgctaaaatatcagttgaaggggatccattgagtaaataattgtcgtgcagaacttcattgatcttgctggaagtgaacgtgcgtctcaatcattatcagccggcacaaggttaaaagaaggttgtcatataaaccgaagtttgttaacactgggaactgtgatccgtaagctaaggtaagcttgtaagcacttagcttcctcaaagttttctttttttgtgccgcctt

SEQ ID NO: 29858 - DNA, 1280 bp, Arabidopsis thaliana landsberg
tccttatcctccaaccttcatttgcatccaacattttcttttgcttactacatgcataagttactaaagataggctaatatattatatatataaaaaggttatacactcaaatttggattcaactttatccatgcatttctctaaatttggttaatattgtttcatttttgttttgctatttaaggagatctaaaagggacaagtggatgggcttatgcgttttgtctaaattgttttccttaaccagaacgtttctatgcattatatgggtatttgtttctataaagacatttaatgtcttgttaattttcagacagggttaagtggagcacttgagacattgtgtggacaaggctttggtgcaaaaagctatagaatgttggggattcatctacaatcatcttgcattgtttcattagtcttcaccattctcatcaccatcttatggttcttcacggaatcggttttcttacttcttagacaagatcctagcatctcaaaacaagctgcactctacatgaagtacctagctcccggtttactcgcttacgggttcttacaaaacattttgagattttgccaaacacaatgcatcgttactccgctagttttattctcgtttcttcccttggtgattaatatcggtactacatatgctctggtgcatttagctgggcttggattcatcggtgctccaatagctacatctatttcattgtggatagctttcgtttctctcgggttttatgtgatttgttcggacaagtttaaggaaacatggaccggattttcgatggaatcatttcatcatgtagtactaaacttgacattaagcatcccttctgctgctatggtatggtaagtcagtttcataatactttgttgaccaaaatgtgtagcttagtggtttgtgttagtgtcatcattgtgtatttgtgatacactcaactctatatgcttattgaagtttaagaaactatattgttgcaacagtttggaatattgggcgttcgagattctagtgttcttagcaggattgatgccaaatccggaaatcaccacttctttggtagctatatggtaagttttttaatatcactattatagttaattaatttacatcaacaaagttgctcattgtgtgtaatgttaaaataattcagcgtcaacacggaatcaataagttacatgttaacatgcggacttagtgcagctacaaggttagctaaactcatcaatcttttcaaaatacttttgcattcctctcataattgtgtac

SEQ ID NO: 29859 - DNA, 638 bp, Arabidopsis thaliana landsberg
ttaccatatgatcctgacaaaaatgtccaggtacgatttctacgttttagtagctgttactctatattagcgtattcaagctatatattcatcactggtctggcgactaaaagttgacttatttaaactgaactgagtgacaccatttctagcatttctagcattttttctttcctgtgtataaatcagtagattgttctagtttaacacgagaaatatttagctgttgcacttctacaagctgcataaatcactttagtcatgtatttcaccgccaaagttatagctgtttaagtgataccacttacacctgcctggcagttcatcttgtcataaaaggttgccatagcgtttgtttgcttcttttagtaattgctacttttcatgtaatcttggcaggatgcgatggcacacatttggaaagcactgatacaagaccctaagaaagctgttgatgaacatttgaatcacatcttcgatgatctgctagtacaatgtggttcacggctttggcgctcccgtgaggcatcctgtttggctcttgctgatattattcaaggtcggaaatttggccaggtaagatcttcgtattttaacatacaaaaaaggaaatttcccgttgcttcggctctgcatct

SEQ ID NO: 29860 - DNA, 1769 bp, Arabidopsis thaliana landsberg
  unsure (1)..(1769): unsure at all n locations
gaggccttgaattttccttctcaatacatccactggattttgttgtgtttcaccactgccactttttcagggcaagttaagggtgaattagcaggttttttctacagttctcgcggactnnnnnnnnnnnnnnnnnnnnnnncatacctttttgtcatttgcatgaacgtcttatctcatatgattgataaagctgcggtgaaccggattattggctatcacccgaattgcaaaaacataggcttgacacatttgtgttttgcggatgatctaatggtgtttgttgagggacacgcacggtcaattgagggtataattcgaatatttcaagagtttgcgagctactcggggctaaaaataagcttggagaaatctacgatctacttcgcgggaatctccgctcaaattagagaccaagtaaccacgaatttcccctttgaaacaggacaactcccagttcgatacttaggactgcctctgctaactaagcgaatgacgacaactgattacgcacccctactggaaaagattagttgaaaaataaggtcatggactgcaagagcactctcctatgcaggtcgtctcactctcattaagttagttcttgtaagtatcacaaacttctggatttctgcctattaattaccaaacagttgcataaaggaaattgagaagctatgtgcggctagttctgacctcaattccagataagcaaagatagcttggacagagatttgtaagccgcaaagcgagggaggactgggaattaagtcactgagtgaagcaaataaagtaagttccttgaagttgatatggcagataacatccaaacaagaatctttgcgggttacatgggtgtggaagtatctaataagaaaagggtcactttgaccagttaaagaaagttctagcttaggttcatggatgtggaaaaaaatactcaactatagagaaagtgcaaaagctatgcaaaaagtggaaatgaaaagtggctcctcaacatcgttctggtatgataaccagtcacctttgggcaggttgattgatgaaataggtcctcgtatagccattgatatgggcctaccactagacgcaatggtggaaacggctctaacctctcaacgacgccgtagacaccgagtagaatttctaaacaagatagaagccgtgatacagagtactcgccaacggatccaagcaaatgagcaagatatctctatgtggcgagctgagggagataaattcaaggctaaattctccactaagcacacttggaataacatgagagtatcttaccctaatgttatatggttcaaaggagtgtggttttcctactcgacccgtaaatattcttttttttgttgttgcttggaatccataacagattagcgacaggagaccgaatcaagaagtggaacacatggctgcaggtcgattgcttcttgcgcaataacacggaggaaactagggactatgtatttttcaactgcccatactcctcagccatttggaagaacttagcacaacgtcttatcacgatcaactatttgacagattggaaccagctcattgcactgttacacagtacaagcatccctacactcatcctcttgctacttcggtacagctttcaatgtaccctctatcacatctggcgagggtacgtcacggggagcatccatctccaaaagctcggctaatcaaactcatcgacaaaacagtgccgcatagaatcagctcactcaaaacttcaaagaaccttcactatg

SEQ ID NO: 29861 - DNA, 940 bp, Arabidopsis thaliana landsberg
  unsure (1)..(940): unsure at all n locations
gttggatcaaccggtaaaagaaacttggacatagaactattaaaagaaaaggccgctgcatctttggaattcaccaatgtttgatcctctgtatctgttgtattgcagggaaaggatatgtgagagaagacctagaatgtagccattacatgaagaactttgacgctggccacgtccccttgaggttgcctagagcaaaacaactccttgcaaccattaacaagaatttctcgactctcgccttctgcagacgttatttggaccgcattggtgaaaccaaatacttaatggctctaaagaatctttgtgactctggcattgttcaggtaatttcttacacaatctagatgatgattcatttatctcggatctatcctgagatctaaatacacttaaatcttgctctctgttttatttcagccgtatcctcctctgtgtgatgtgaaaggaagctatgtatcacagtttgaacacaccattttactgcgacctacttgcaaagaagttctctccaagggagacgactactgattcagatcctctgttttgctctgtttacctttatcatctcatactgttgtcgagattgtacacttgcttgtttcttttgtcgtcgttaacacaagctttgaatccttttataaaaagcttcagtgcctctgttaaaaaaaaactatgtatttgccatgaacatgaatttgctcatcaatcttactagaagttgattgataaagctccttgctttggagaattggtaaagctactaatttgacaagatcatataaaaagatatataaatacagatatggtaaagaagagagaacactgggatcacacagagatcttagccaatagactttngagctactcgaggcatttccatggcggcgacgatagctgcttttaccggtggtctgaaagtgaaggctggagttctcgc

SEQ ID NO: 29862 - DNA, 2362 bp, Arabidopsis thaliana landsberg
agattacattaccgaagaaatgaggaaaccagtgaatttcaattaagcagcgaaaagggttttattgtaagaacctgaaatctttgagggaggacggtggagatagcgccaccaaacaaaggcctcaccgaacataactcaacagacatgttttgctacattcaaaaaacaaaatcctcaaaaaactaaactttgccagaaaaaaaaaatgcactcacaaacataacagaatcgattagggattaaagagaagagagaagagtaccaaattgatcgattgatgtatctggggaagtaaaagagaagaacaaaagtagcagagaaatcaaaaagttggagtttagtatttatatgaaagtcagaatcgaaagaagcgttgctttgacgtcccaacaagtagctttaacttaacgcaaacaattaaaaaaacaaacgattagcgttcttcaatcaacaatgtctgcactctgcaaattcacgattgagaagaatgagaattaccaagcgacatcgtttaaattaataccgtagttttttttaacaaaagcccaggcccgtctgttttatctagcccattttaaacaaatagagataatcaaaaccactgggataataataagatttaattttttttcttccgctatcatcatcaatcatcatcatcatcatcatcatcgtcttcaagacttcaaccttcaaattcttcatcacaaaccctaacctccaatttctgattctacgattgatctaaggttttaatcaattcttctatcatcatgatttattcctcgaattttttccgattttcctttgaactgattttgtggtctctcttactttttggttcagtttcattttcaacaatgagtaatcagaagaagagaaatttccagattgaagcgtttaagcaacgagtcgtcgttgatccaaaatacgccgataaaacttggaagatccttgaacatgcgattcatgagatttacaatcacaacgctagtggtctcagtttcgaagagctttacaggtacacttccatagatttcactttgattcatctcttgttgttgttgttctgctaaactttggtcgcttatttcagaaacgcatacaacatggttctacataagtatggtgataagctttatactggacttgttaccactatgacatttcatctcaaagagatatgtaagtctattgaagaagctcaaggaggagcatttttagaattgcttaataggaaatggaatgatcataacaaagcgttgcaaatgattagggatattctcatgtatatggatcgtacttacgtttctactactaagaaaactcatgttcatgagcttggacttcatctctggagagataatgttgtgtattcgagtaagattcagactaggctattgaatacgcttcttgatttagttcataaggaacggactggtgaagttatagatagggtgttgatgaggaatgtgattaagatgtttatggatttaggtgaatctgtttatcaagatgattttgagaagccgtttttggaagcttctgctgagttttataaggttgagtcaatggagtttattgagtcttgtgattgtggtgagtatttgaagaaagctgagaagcctttagtggaagaagtcgaaagggttgtgaattatttggatgctaagagcgaagcgaagattactagtgtggttgaaagagagatgattgctaaccatgtgcagagactagttcatatggagaattcaggtttggttaatatgcttttgaatgataagtatgaggatatgggtagaatgtatagtttgttccgtagggttgctaatggtcttgtaactgttagagatgttatgactttgcatcttagggaaatgggaaaacagttggttactgatccagagaaatcaaaggatccggttgaatttgtgcagcgtctattggatgagcgggataagtatgacagaattatcaacatggcatttaacaacgataagacgttccagaatgcactaaattcttcgtttgagtatttcgtcaacttgaacacacgttctcctgagtttatctccctgtttgttgatgataagctacgaaaaggactaaaaggtgtgggagaggaggatgtcgatcttattcttgataaggtgatgatgttgtttcgctacttacaggagaaagacgtttttgagaaatactacaaacagcatctggcgaaaaggcttttatctggaaaaactgtgtcggatgatgcagagaggaatctgatagtgaaactgaagacggaatgtgggtatcaattcactttgaaactttgaggtatgttcactgacatgaagaccctacacgacacgct

SEQ ID NO: 29863 - DNA, 2761 bp, Arabidopsis thaliana landsberg
  unsure (1)..(2761): unsure at all n locations
gttccgaagacttgtctctaaatgttctccaaactgaagacatatgaatgagggttctatgattttttcgttgataatccgaaaccataatgagtttctttaacaatttnnnnnnnnnnnnnnnnnnnnncgcaaaaagtattttattataatcgaagtgggtcgatttgaagcttcattaaaacaaaatattagttgatttagccaatgagattaacgcacaaaatgaatcgatgttagtggaaattttatacaagtattgattattacttgtaataaaaagggaactcttattagttttttatttgattacaacataattatccacaagacacatacatacaacataaaatgtccatatctatcattaggatcaacttgagaagtgtcggtgatcagtacttctcggttcttgttgtctgctccaatctttctatcttgatgtacacgtatttcttataaccaactattcaatattatgagtgaatctattgacaataattttgttagtttcatgagcaacaactaaaaatataccaattgattaacggtacatgtgtcgtgtgacgcaataatactcacttccaagttctaatcactaatttaaatttatattaaacaacataaagcaatggcttagtatcatgtctgccattttcgaatttttctttcatgtccaaatttgctcatgtcttccacaaaatcactcaactttttctaccccaccatagttcctaaacatgcatacagccacgtatgacgtatccattttattcactcaatctttgtttggtataaaatctatatatatataacatatgctttgcgtgtatcatagaaaactatactataatttgcatatttcaaaaaatgttgaccaaaatgtctctccctatcccgcagaaatttcttccaccgctaaaatctccaccgattcatcatcaccaagctccgccaccgcttgcacctccacgagccgcaatatcaatatctataccagacaccggtttaggacgtaccggtaccatcctcgacgagtccacgtcttcagctttccgtgattaccaatctttattcgtgtcacaacgttccgagactatcgaaccggtcgtaattaaaccaatcgaaggttcaataccggttaacttcccttccggtacatactacttagccggtccaggactatttactgacgaccatggctcaacggttcatcctttagacggtcacggttatctccgtgcgtttcacatcgacggtaacaaacggaaagnnnnnnnnnnnnnnnnnnacgttaaaacggaagctaaaaaagaagagcacgatcctgtaactgacacgtggcggttcactcatagaggtcctttctcggtgttgaaaggagggaagagatttggaaacacgaaagtgatgaaaaacgtggctaatactagcgttttgaaatgggctgggcgattgctttgtttatgggaaggtggtgaaccgtacgagattgaatctggatcgttggataccgtcggaagatttaacgtcgagaacaacggttgtgaatcttgtgatgatgatgattcttccgacagagatttatctggtcatgatatatgggacacagccgcagatttgttgaaacccatacttcaaggtaatgtttatgttaaagtagtaaagtttaaataacttaaagtatgtagtcctttattcagacagcggcgtaaaattaattaatgcaacaaaactatatagtaaaactttttattcaaatatgtaggtgtatttaagatgccaccgaaacggttcttgtcacattacaaagtcgacggtcgaagaaaaagacttttaacggtcacttgcaacgctgaagatatgcttttacctcgaagcaacttcacattttgtggtaaataatcttttaattctttaaaaacattatgaaaatagtattttattattattgtagttgtaatggcaattaactatttacagagtatgattcggaattcaagttgatacaaacgaaagaattcaagatcgatgatcatatgatgattcatgattgggcattcacggatactcactacatactctttgccaaccgagtcaagcttaatccaataggtaaagttatcttgatagtaataagttctgtttcaagtcatttacgtacacgaagaataatacttgcgttacaagaaatctgatgatgtaaaatatacacacgcaggttccatagcggctatgtgcggaatgtcaccaatggtatcagcgttatcgttaaacccaagcaacgagagttctccgatttatattctccctaggttttctgataaatattctaggggaggtcgagactggagagttcctgtcgaagtgtcttctcaattatggctaatacactccggaaacgcttatgagactagagaggataacggcgatttaaagattcagatacaagcttccgcttgttcttaccgatggttcgatttccagaaaatgtttggtaagttaagaagtcaccaaatacaaacctatataagactatttcgaaataacctctttcacaagttagggcttttagggtgttcaaacgacagctattgaacattttttcaaaaaaattcttataggctatgattggcaaagcaacaagctggatccttctgttatgaatctaaaccgtggcgacgacaaactactccctcatctagttaaggtgtctatgactttggactctaccggaaactgcaatagttgtgatgtagag

SEQ ID NO: 29864 - DNA, 2443 bp, Arabidopsis thaliana landsberg
  unsure (1)..(2443): unsure at all n locations
gacagatctatcttttgttaattccttttattttctactgtgcatcacgtatatttgattaactacaatgaaattcgtttaattaaaatagttgaggggacaaatttaactataatataaaaaaatctagtgtaaatcactaatagtacggctaattttcgaaatctaaaatagttaaggggacaaaaccgtgaactttccataaatagtttggtaagaaaaagcaaataaatatagtttcattttttgtaaattaaaaaaaagaaaaagaaacagaatctccccgtttctcgagcactcttaagttctctctctctcacagagttagctttacgccttcaacgagaaccacacaagaacacaactacccaaaacgctcattttctttttccccggagattttagctccgtcgtcgtaacggacccataattcccggcgacggattctaatctcattttcagctaattataaactatgcttcctgtctcaaatccttccagtcctgaacatctcctcaaaaaatccagaaccccagactccaccacctccattgatcgtaagaactcatttaactcgcttcactcggtcggaaaccgctcttcctacatcgccgcttctcgtagccactgcacatggctgatcctctctcttctatctctccaactgatcctcttcctcactctccgatccatcccttttcctcaccgtcacatccccgaaaacttcccttctcccgccgccgtcgtcaccaccaccgtcacaaccaccgtcatttctgccgcctcttccaatccccctctctcatcctcctcatctgacgaacgatgcgattcaggtcgagtcttcgtctacgacatgccaaagatcttcaacgaagtgattctacaacagtgtgataatctcaatccatggagctctcgctgcgacgcactttctaacgacgggtttggtcaagaagcgacgtcgttaagcaacgtgatccctaaagatttggttcaatcatggttttggactgaccaattcgtaaccgaaattattttccataaccggattttaaaccaccggtgtcggactttggatccggaatcagctacggcgttttatataccgttctacgctggactcgcggttggtcaatatttatggtcaaattacgcagcggctgatcgtgaccgtcattgtaagatgatgacacagtgggtcaaaaatcaaccttattggaatagatccaacggttgggatcatttcattactatgggacgcatcacatgggattttcgcaggtctaaagacgaagattggggatctaactgtatttatatccctggtatgcgtaacatcacgcgcctccttattgagcgtaactcttgggatcattttgacgtcggtgtaccgtaccctaccggattccaccctagatcggactccgacgtcgtgaattggcaagattttgttcggaatcgacgtcgtgagacgttgttctgtttcgctggagctccacgcgccgggattgtgaatgattttagaggattgcttctccgtcactgtgaggaatcgcgtgggaagtgtcggacggtggattgtaccgtcgggaaatgctcgaatggttcgtcggcgattttggagacgtttctcgggtctgatttttgtctccagccacgaggagatagcttcacacgccggtcgatatttgattgtatgttggccggttcgattccggttttcttttggagacgaagcgcttacatgcagtatcagtggtttttaccggataaaccggatagttattcggtttttatagaccggaacgaggtaacaaacggcacgacgtctataaaggaagtgttggaacggtatagcaaagaagatgtgaggaagatgagagaaagagtgattgatttgataccgaatttggtttacgctaagtctccgaatgggttagagactttcaaagacgcttttgatgtggcgatagatggagtttttaggagattcaaggagcaagagaattggtacaaatggagatgatgattggataaaattatttatttatttaataaggattttcaaagtttttagctccagtanagttatgattacacttgtaaatttatgatttttgttttgagagatgaataagttgtgttagttgaatttttggtagtagtcaagtaagtaagttgttctatgtgttgaattctcatttatatattctcttttggagacaatttatagttttctttctgattcctacttactttacagtctcgatgttgataggctaaatagtttttgagtgttttatatatctgtaatctcttgagctaatttggtaggtgggaagtgaaaaatcaaccagaggcccgcatctttgcacgtagaagggttattttattaagtaagttgtacgatgataaaaaggtggtaggtaggagaagtaga

SEQ ID NO: 29865 - DNA, 1755 bp, Arabidopsis thaliana landsberg
ttccaagcacgttaccggaaaatctaagattgcgggagaagggttaaagatacttgtagagattctcaacgaaggagctaaaacagagacgagactatactctgcttctgctctgttttatctctcttccgttgaagattacagcagattgatcggagaaaatccagatgcgattccgagattgatgaatatcgttaaaggagatgattacggcgattccgccaaacgtagcgcgttgcttgcggttatgggtttgttaatgcaatccgataaccattggcgtgttctcgccgccggagctgttccgattcttcttgatctgttgagatcgggggagattagcggcggactcacggcggattgtttagcgacgttggcgaagctggcggagtatcctgatgggacgattggggtgattcgtcgtggcggtttgaaactcgcggtgaagattttgtcttcgtcggaggattctccggtggcggtgaagcagcattgtgttggtctgattttgaacttgtgtcttaacggaggacgtgacgtcgttggggttctggtgaagaattcgttggtcatggggtcgctttacacggtgttaagtaacggcgaatatggaggaagcaagaaggctagtgcgctgatcagaatgatccatgagttccaggagaggaaaaccggttcggttgaaccgaatcttcaaagaggacggttcgttcacgcctggtgattttggtacacagtaactcttgagtattttaaagagttatttaccataaagaaaactaaataattttggttaagggtgaaattcttttattaatttttatgtaaagggtttagtgtttgtatatttagctcgggttttattttcataaaccaaagagctactgggatggcaataagctccagtttttttaagaagctgtgtccatattccataatgtaattataactgaatcaataaaaactattacaattaaaaaataatacctaatttttaaattttgcatgtttcctaaaactaacattacaaatttcttggtccaaactaaagacaagaaaagtacctagctttctttgaggtaagtcctattcactcacatgatgcactaggttggaaacgcaaaatggtgtttgaagcagtggaactcgtttgtttgcaataacagggataaggttgtttaatctagttgaagtcgcaaaatgttgtttgagatctttagaattagcatctagaaatctcatatttcgtgtgacttacataaaaacttattttatgtatataagtttaatcaaaactacgtcgttttaatctttttaagacaataaacaatgttacaaaattttaatataaaatgccaattgagtttatgctataaaattaattcgatcgtttttatgttcgattgattttgaattggaagcatgctattagtctacatataaacttttcaaatgtagttgttaattaatttgaatttgaaagcccacaattcaattcgaatttagttagttttgagttggaagcccactatatcgtaattatattacaatttaatgtaaaaaaagcgatgaaaaaccagaaagatttcagaccgaaacctaaataatattgagtaagtttattcgaagaagagatgaagagacaaagagcaatcgagttagatcgagtgaagaagacaatgttgaacatagattgggacgatgctttgggcgatgaggaagttcccgagctcgagatcatcgctactgacaaat

SEQ ID NO: 29866 - DNA, 2231 bp, Arabidopsis thaliana landsberg
tactcatcaaatcatttcctgatgaaaaggggtactacttagtcaaggccatcaaatctcgaacaaaacatttactgataattcactatcactttgaaagattagaccaccaatctccagcgttgagcagagagttgtttttcgaattacgcagcgtaaacgataacttcgagattattgaatgtggtgccagattgattgaagaagagagcattgaagataactatgagtctggatcagaccaagcctccgaagaagatagcatcgaagagaactatggatctggatcagaccaccaagcttccgaagaagatagcatcgaagggagctatgaatctggatcagaacaagcgtccgaagaagacagcatccaagaagagaactatgaagagagcatccaagagagctatgaagctggatcagaccaagtgtctgaagaagagagctatgaatctggatcagaacaagcctctgaagacgaaaatgagtttgaacacagcgaagaagcctctgaagactacaaatggagtaatactaatctgtgactcccaaagtcgaaggagagagcaagtgccatacccagacaaacgcacgagcaatctccttcgcaatcatggtgaattcttcctctgaaacattgaattattttcttgctattaactcgaacagaaatgaataatgatatgatgattttctcgtgcttgcagattatctcagagaagaatcgccgcgagatctccaaataccacctcttcaaaggtacaactctttttattttgtttgcgaatcgtcttaactttgatctgtatacgtgtaatcagatacagtacgtagatattctgaatctcttgtacttagcccatcgttttaactttagctgtttctgaattcgatgccttacttactttgaacatagttagcaagaacaatgtgattcactaggattacttagaaatgttacttttatttcgagaaagttttgtatgctaaaagaggacttgaatttgccacaacatcccttgatcgagtgttccgaatcctgcaggtgattaagcttatgaagagctttttgtcaaaggagtatgtcaaagagacttttacttgggtacattactactggttccttaacaatgaaggcattaacttcctcaagactcacctcaatctcccacctgagattgttcctgcggtcctgccaccttaaaaagcagccttctttttttttccacgactgagaccttaattaaaagcagccgaataagcgaccaattttctgtaaaacgcacttactagattactttgttaggctttcccttttgtgtatttttgtatgtctctttaaaaagataaggcattcacggtaaaacaaaacaaaaaaatcaacgaaaaataattacggaaacacaaatatttaatgaaaataaaaaaccattttaaacacttttatgggtcgatttttatttttaaaaataaaatcctttaaaaaaaaaactaaaaaaggagaaaaaaatcgctttgattttaaaaacaagtgatcgaattcaggagagggatcagatgataaaagaaggagagtgctcaatagtcgtaacaggctgagcgaaacactcttctcgcattaagcgagtttaataaccactcctcatttcccctttaacttgcctgaaggatcatatttattcattgcaccacctttaatcttttttatagccaactaatcatatccctcccgtctcttctaaccgatgtgggacaaatatctcttcttcagtttttcaaaaccctaattagcctaccgaaaatgggcttaggcctggtaaaaattacaacggcccaacaagacgacgatttttcagtatgacgattacgatttctgttgacagagaaactttttgaaatgatgactactacgacgacgacgatttctcagcataacttctatggtgctggagattcggaaacttgcatttctattattgaggtattaagctctcactggtaaacaatggcgatttctaatcgagctttcttctttcgcgttttgttttttccatcgtttgtttgtgatttgtgtgtgtgtgtagaatttgaaggaagagtatggattgtttgtttggccttgtagcgttatcctcgctgagtatgtttggcaacacagatctcgatttcgtgattcttcgatactcgaggttaatttctatttcaactactctttgctaaaatcccttgat

SEQ ID NO: 29867 - DNA, 2576 bp, Arabidopsis thaliana landsberg
cgtaaggaaaacgtgtggagaagtgtgggtcatccaggaagtaacatcgccactagaggaatgggcacaaacctcttcgacaagccttctcacccaaactctcccaccgtctacgattggtacgtactcagtttctgttattattatgtgatcggacggcgtacatcagatctaagatggtttgaccgttgttgtgatcccgcaggctatacagcgacgacactaggagcaagcaccgttgagccgagagggtagagtgacatgagaatgatgtaaaatattatgttctttacgccacgtgtttatgttctgtttcgtctattttggctatatgtgtaatcttttatttgcttcttgtcgattgtctttgatagtgaccgatgatttccaccaactgggttagtttttagcttttaacggtggcgatgcgtcttcagtgtcttgtaatgtttctactgttcggtaatattacaattagcttctctaatgatttagctaacgatataacttaactagaattagcaaaatggaatttaacttaaccacggttgatctcatatcattatttttattttatattatttgttcatcattaaatatcttaaccatgcatggtttgatgaattcggtgtgtcaacaaacaatttttgatagtgatttgattaaagtttaacttaactatggttgatctcatctcattaaataacaaaaacataaccatggttagatgaattctttgtgtcaacaaagcattatgatagtgatttaattaaagtttatacatgtctttggatacagttgtaacttttttattttttattttgtcatctgatttgatataattatacaaacttacacaaaaagaaagaactaatccaaagctcaggatcaacctattttaatcaccatggttgatctcatctcattaaataacaaaacataaccatggttaggtgaattctttgtgtcaacaaaccattatgatagtgatttaattaaagtttacacatgtctggatacaaatgtaatttatatttattttttgtcatctgatttgattaaagaagaagatagaatacaaggttacacaaaaagaaccaacccaaacctgagtcctgagggatcaacctattcaaagcacattttcaatacaaggggaatatacaaaagaagtgtctccacctacacaaaaacacacaagttcaaagagaagagagagatctttcaccaataaacacacgttacacaccttgcaaccaagagctacatacaaatggagccgtaaaagtcattagttatactttgtgcaatgagattagctcctttataagtcactttggattcactgccatcactttggattcactgccatcttctattcaaaaccttaaaacgagatgataatattaacacatataccacataaaagcattgaccatttcacatgccattcgttaatcaattgtaaacaaattttatgaaacaatctacctaaactatcataattttgtcacgattagaccgaaactatcattctaattagttcacactacacaatatagaatctatcatatatatgtagcaaccaattctttatctaaaaaaaagtaaattttgtaacacccatataaatatttaactttcactctgaattattcatttttttttgtagaaagcaaaagacaccgtagtgaagtgaataattcttcttctgctcggtggcgttgtgggaatgggagagagtaagacgacgacaggagagggcttcgggttttacaaggaatatgtcgccggaatgatggctggtctcgccactgtcgccgtcggccaccctttcgacaccgtcaaggtactcaattttcaatcctagttttcgatttttcttgtaaaatatgtgtttatcagagtttacaccaaatgggtatatatgtgtttcatcttccaatttgagaaattatgtttcagtacttcaattctatacttagctgcagagttttgaattaaggatgcattggtgtgagaaagtgttctacactggaccattgatatatattcacttatcagttatgtgttgattgtttacctctatgcgtaaaactatcgttaagcaaagaagatataaaaccatccatcatatatctcaatgaggtttcttctgatgctgtttgggacttaaatgggttttttttgcttaggagctttctatgcataaaaatcatttcttgttttaggctaaccatttttagatagtttatcactggattggcatcactcatgtttggaagtaatgattctaactttggggttttggcttttgtttcttgtgtcaggtgaaacttcagaaacataatacagatgtgcaagggctcagatacaaaaatgggctgcattgtgcttcgaggatcttgcaaactgaaggagtatattttcactgcactctttttgttatgttttcaagactttagcatcctgcaaacagttttagttattgaaagtctggatttttcagtgtcaatggaatcttactagatccatcatcacctgtttggccagatacaagggtttttttttttgct

SEQ ID NO: 29868 - DNA, 1567 bp, Arabidopsis thaliana landsberg
atgtacccagacacattcttacattctttcagcattgtataacagccagacgagtccttcatgtaaaccatcaccagagaatgctttatgttctctggacatgcctagcaagcaagaatcaagggacagatcatcagaagaatcgatcatattcgcaaaattagagacttgaaaggtttttcttatcttcttaccagtttctctgccagtttttttgacgaagagaagtgagatcaagcttgttactgatctcagaagcagacatagcaccaggaacttcatgcttgtttccaaatacaagaacagccacattgtccggtacactcccttgtatctgttatacacggcatcaaacattagattatttgacttgctcaatgtttagagaagtcaggtcttgtttgttacctcatcaattaccgcattaagaaaatctttcgcatcttctattcgatctctgtctgtgctatcgactacaagcacaagccccgctatttcttggaagtcatgtttcgtcattggaaaccactgaaatgtttttttgaatcacccataatcagatatgatcttactgtttataaaaattaacaactttctcctaccttgtaacattgttggccgcccatttcccaaaagcgtaagtttgaatccttgtattttacactttccacatccgttcctagaaacagtgattcaggaattcatagagaagactagattcaatatcagaaagaaaagaagtgataatgagatttaccaatagtaggcatggttgtggtaagggtttctccggttttgagtttgtgcattattgatgattttccggcagcgtcgagaccgaacaacactatcctcgattcttcttggtggaaaaaaccggcaaatggctttcccagagctgtccccatttttttctggttcttgcaacgaagttgactttgtttgtttcgctttggaaaatctgaatcacaaggagagtccttgagagagtttttcaaagtcaagtggtggttaaagcttaagagttaagagttgtctagtctgtttcaagatccgaggaatcaaaataaaaagttaaccagttgacttttgaattattagttgtccgattcatatttgtttatgcaactagttgcgtatttgttataatctttatatttgactagataacaaatctggtcagcaaaaaaggttcatatagtttggtttcagatgtgcttttggatttgctttgtgacttggctaaagtcgaagaagctgagaaatgtttgcttgagatggttaagaaaggtcatagaccgagtaatttctcgcttaaaaggatcaagttgttgttggagctagcgaataagcacgatgaggttaataacttgttacagaagatggctattttcggtacagagattccgcgttaaaaatcaggactcgttcttacattctttcagcatttttcaacagccagtcgagtccttcatgtaaaccatcaccaggagatgcacatgagctctggacatgcctagcagcgaaagtcaaagtcagatcatcagaagaatcaatcctattcgca

SEQ ID NO: 29869 - DNA, 2979 bp, Arabidopsis thaliana landsberg
ttcttgtttaaaaaaaaaaaatcaagacaaaattgtcgtccctcatatctatattcaattcatttcaaaacgttatttatgtcttaaaatttggaactaggccacaaagaatgactttggtcatcacaaaattataaatttaataaaaatttggaccactataggcatagctattgcctattataatctctactattactttatgatttatctactattccgaaagtgtcattgtttaatacgtcatcacattgcagcaatccacacacaagccacatcattcatatgccgttcgtatttgctttcgtcacttccttccgtcatcaatagtgacggctatttcttaatattaatcttcttgacttaatgctatttcgtgacggcattaattggcatatcattacaagttattttcacctaagaaacaaattaaaactattgaataatatgatgtaaataaaaatatattaatgatgtgatatatcgcagtcaaataaaaatagtgattttgatgggaaaaaaaatatgtgtttatccatagatttgttaaattagagaaagatgtggaaaatgttagtgagtggcgtcatacacggagaacctttggcatcatacacggatttttctagtctttgttttctatttgtcaactttcatttgagtctttctttatacactttattagaccatgtttttaattctaatgcttattaattcatattattaaatttacaaaaaaaaactattatattaactctcttgtttcctctgtatcttccttcacattgaagctgtctctttctttcaccatcacttgcacctgttgtgtcctgtttgttctcaatttcatcatcatttatcctttatatacctctctttctttcttgacttttcctctaaattctcttcctttttatctctttgatacatctcaattttgttcttttgccttctctttgatcttatctcttacgattgtgcagatctcaatctctatatccttggttgtgtcagattctcttagggtttattttctctcccaattttgtttgattccttgtccaaagtttcttcctttccttttgacttctttttgtggtacattgaatcagaggtgtaagagtaatagtttcataactcaaatccccaagtgtacaaattttcctcttttggttctgggtttggttgattccttgttagaaatgtaaatttagggcttttgtatctgaaaccgatcttcagacttgtgtaatcttcttgatcttcatgcaagattgatggttctaaaagaagtagaagaagagaaaatggctactttgactgagccatcatcatctttgagtttcacatcttctcatttctcttatggttctattgggtccaatcacttctcatcaagctcagcttctaatcctgaagttgtaagtctaaccaaactcagctccaatcttgagcagcttcttagtaattcagattgtgattacagtgatgcagagatcattgttgatggtgttccagttggtgttcatagatgcattttagctgcaagaagtaagtttttccaagatttgtttaagaaagaaaagaaaatttcgaaaactgagaaaccaaagtatcagttgagagagatgttaccttatggagctgttgctcatgaagctttcttgtatttcttgagttatatatatactgggagattaaagccttttccattggaggtttcgacttgtgttgatccagtttgttctcatgattgttgtcgacctgccattgattttgttgttcaattgatgtatgcttcctctgttctccaagtgcctgagctagtttcatcttttcaggtgtgtgaaaagtcttcttttttcttctgtctctttgtttcttaattcatagacctcaatgagaactaaaaggtttgtgtgcttgcagcggcggctttgtaactttgtggagaagaccctcgttgagaatgttcttcccattcttatggttgctttcaattgtaagttgactcagcttcttgatcagtgtattgagagagtggcgaggtcagatctttacaggttctgtattgaaaaggaagttcctcccgaagtagcagagaagattaaacagcttcgacttatatccccgcaagacgaagaaaccagtcccaagatttcggagaaattgcttgaaagaatcggtaaaattctcaaggccttggattcagatgatgttgagcttgtgaagcttcttttgactgagtcagatatcactctagatcaagccaatggtctgcattattctgttgtgtatagtgatccgaaagttgttgccgagattcttgctctggatatgggtgatgtgaactacaggaattcccggggttacacggttcttcattttgctgcgatgcgtagagagccatcgatcattatatcgcttatcgataaaggcgccaatgcatctgagtttacatctgacggacgcagcgcagttaatatattgagaagactgacaaatccaaaggattatcataccaaaacagcaaaagggcgtgaatctagtaaggccaggctatgcatcgatatattggaaagagaaatcaggaagaaccccatggttctagatacaccaatgtgttccatttctatgcctgaagatctccagatgagactgttgtacctagaaaagagaggtaattgactgaaaattgctaaattcttctgtatctatacgacatttttgttaaagcttctaccttttttgcagtgggtcttgctcagttgttctttccaacggaagctaaagtggctatggacattggtaacgtagaaggtacaagtgagttcacagggttgtcacctccttcaagtgggttaaccggaaacttgagtcaggttgatttaaacgaacctcctcatatgcaaacccaaagacaaaattaaaagtatggtggctctaatgaaaacaggtaacaaaaagcgggctctgtgt

SEQ ID NO: 29870 - DNA, 3101 bp, Arabidopsis thaliana landsberg
  unsure (1)..(3101): unsure at all n locations
gtagatgtctttttttttcaaccaaaactcccaacttcaaaagggtatttacggaaagcaacaagatttgacatttcacaatctccacagcttcaaagaccaaaacccaaagagaagaaactgatgaaaagatttacctgtagttagggtttaggtgaggaagtaaagagagggactgagaacagacatggcaaggaggatctgacggctggagtaagcatctgaaatcgggaactgcaccggagcagcctgttccaagaaagatcagagccgtcccatcatcatcagattgattcttctccatcttctcaagattctgatcttctggttgnnnnnnnnnnnnnnnnnnnnnnnnnnnncgtatatctttgtttattgtattagttgagattatatgcgatcccttacacaaacttgtctttttcacagtatatatattccttttattaacataaaatatctaagccattactttgagtctttgacactgatatatgtagtcataatgatattgactactaattttccaaacaaaatagtaaaggattaatgacttaccccgcaaatccgccggattgtgattttttttgttgaatatcattgtttgactcctctaaataagaaaaaaatcttctacatttctttttctgtataacaaaatcttaaatttaaatcgttatggtaacgaaatcttttcttttgtttttccagtttattgattaaatatacttccacagaatttaaatttacttaattattaaaaacaatgcagtcacaatctttccaattaccatttcattatctcacaaattcgaccaaatgtttttcatatttcacaaaaaaaattatattaaagcgcgtgtgaaccataaccacgcgattgccagctcaaaaacaaattcacaaagaagcgtacacgacacgcgctacgactgagtgtaaggattctcataaactgctctattttattttgctcagtcgcagacaaatctcaaaacagattcgatcgataagcaagaacttccaatctctaatggcagatcaaacagaatctccaagatcgtatcttatcttcatcacaatcatgagtaaaagacggacatgggtttgtctcttcatcgctgtctacgcaattctcgtatcttcttcatggaacctcctgagatcagttcttaactggtacaagcttcaatacacgtcatcaaattcagattattctccttcaagattaccggcggtatacgcgtcggtggtgctcggtgcgatgtttggagctatgtcgatggtggcttctatgacggtggcggttccggcggtgatggtgatttggatatcgatggtggtgttgcttgccttctttgggaaatcaagaagagttttagtggttgaaggaaggaagattacgagagaagttgtcggatttgtgtttaaggttcttttgaaagaaggcaatgttgttactgctttttgtgctgttttagcttattttctgcttattagaagagattttgactcatattaaggttcttgatttttagattatttagggaattttgatctagattatcttgagtcactcccgaatgtaaatgtaaagttaatttagaaaatcaattgttagtagtagaatgaagaagttcatgatgcattggctcaattttttttgtttgtggttagataatttttcttgatgacagcatttagtatctagaatggatcgtcccacagcttctcatttgagatattgaaaatcatgatttgttatccgtttgtgggttcattgccacacaatttcaacacatggaccaataaccaagtgatttacatatcctattaagtttgttatcagttttcactatttaagttacccggttattattttagtagcttaaaactacatcaactagttgaagaggcatgttttgcgaagataagatcatataataatgggttacacaacttctttcttactcaaattccttcttgaggaaggtgtaacattccaacattgaagtagtggatttcacacactgatacttatttttataagtacctttcttgataaaaagaattctaatacctcaactaaaaactctaatttggggaaaaaaattaatgtctgcaaaccttttataacaaaaaattctaagaactcaaaaatcatgaaaagccgtgaatctttttgtctttggaacatatattgttgaacttttctttttaactgagcaaaaagaagaatttttttttgaaagaccaaattggatgatagttatgttaaatttcacatgtttctaggacaataaggtaatttaaacaccatcgctcggtctagagaattacatcttaggattttgggatttcagatagaggattagggtttagtcgatcatcatggtcctcaatcagtgtgcaaacgtgacgatgatagaagaaaatttgagcaagttgatggaagaaatcgaatctgtggaagctgatgagagcgaagataccagtgacgacgaagaagccaaaacagacgtgcatgaggctaattttgatatgttaatggcgcctgaatgggatgtgcatagcttcgaaggtttggagtattatacatcttcaaattcggaactttccttcgatgaacagtcttattccgacatggaaaaagctaataaatactatcatatctataaactatatatcgttaagagcaaggtatgtaatccaaactctgttttgcgtttgtttgattcccaagacttgaccaatatagaagactcgaaggtatgttcttctatgcgttggttttgaaaattatcaaacaaaaagattaggtctgtccagtaaagaacataaactatcttatctcgtattcatccgagtttttgtcatatacaatacccttttttctgtcaaataataatcttgtttttaaaatgtttaacttaatgtaacaagtatgtctttacgtatgtcccaaaattttccatttttaatattatttaaatatatgaataattgtctcaaatagacctttaaatatcccaaaaaaatagaaccaattagctagaattcgaaaaacaaaatttaaattttcaatcttctcgtgtcgaagt

SEQ ID NO: 29871 - DNA, 1891 bp, Arabidopsis thaliana landsberg
ggatcctaacctcaattgaatgaagaaagttatgtattcgctttagaggattctccaaaggtaaaaagctttctgatttataaattttggttttttttttcaatttttagagctcttgtgtgtggttaggcagcaagcaaattagatcttctcttatggggtttgttatgatttatttgaattgaaagttttattttttacttgattgtgtcatttaggagtcaaagatataactttgcaccttcttcgtttggtgcggtcagtaaattagaagtatcaagtggtggtgataaagaacgggtctttaaatcatttggattgatttatagcaaacctcaaggtttagtcagactttattccgcaagagatgtgttttcacggttctttggcatccacaagctttcttctatagctgatgctaaagataaaggagatgaggtagttagggaagaggagctgtctgaatcagaggaggcggttcctgtttctggggatgtaccagagggagttgttgatgatgattctttgttcgagcctgaacttggtagtgacaatgatgatcttgaaattgaagtgaagcattcgaaagatggtgggaaaccaactaagaaaagaggtcaatctgagctgtacgaatccattgttgcttataaatcagtgaaacatgttcttgaaaaatgggtcaaagaaggaaaagatttgagtcaagctgaggttactcttgctatacacaatctgcgtaaacgcaaatcctatgctatgtgtttgcaggtaaatatgttctcattttacactttgccaaatcttttattgttctgtctctatcaccctcttaatgtgtatgtctttgcttgggctttggcatttgcagttgtgggagtggttgggagctaatacgcagtttgagttcacagaggcaaattatgcttctcagttggatttggtggccaaggtacatagtttacaaaaagctgaaatctttttgaaagatattccagaatcttctaggggagaagtagtatacagaaccctgctggcaaattgtgtacttaagcatcatgtaaataaagctgaagacattttcaacaaaatgaaagagctaaaatttccaacaagtgtgtttgcttgcaaccagctgcttctcctctacagtatgcatgatttgattaagataagcttatgtccaaatcttccatatcctttagataactttatatcctaattggttatgattttgatttggggcatcaattcagtgcaagactccatgagcttggaggttaagtgtcattaacaacattacaacagactaatggtcaaaatttggacttggcttctctacgtatttcttttaactaacaacagagtgaaactttcaacacacagattgcagtaataaaaagaaggtcaagatgaagagttacttaggttgtgaactcgtaagcgtttgggacatcatgaactgggtgacctttctcatttcgctcaattatcctccgtgccaaccctacttgcttccccaccacaaagatgaaagcctttccttttcccctagcccctcttgctgttcttcctacacgtctcacgtattcactggggtcacgtgggaagtcaaagagcaccacatgatcaacaccagagaaatctatcccacgggaggctctgcaattgtttcggaacgaaaaaggaagaaacaaaaaattaacatcttcaatgttcaggcaatataacatcataaaaaacgataacagtaaccaaattgaggtacctatcagtgcaaaccagaaacagtgaattttcttcgggctgagatgatgtgaattcttgcatgtttgtaagccttgactcttgtgagagtgcaacatgaaaaggtaggacgtgcaactgtctt

SEQ ID NO: 29872 - DNA, 2008 bp, Arabidopsis thaliana landsberg
  unsure (1)..(2008): unsure at all n locations
ttttctgattcatggatccaaaccgagaagtaaacgggagaagagttctagaaagacttgattcggatttacagaagctggagaatcttcagatcactgtagaagatttgaaaagcaaagtcgaaacagtggagaaggaaaagacgaaagtaggagaaaacgagtataaaacgctcaaaggacagcttgaagaagcagaggaagcaatagagaaactgtttactgtcaatcgaaagctgaccacaaaagccgaatcagagaaggatattgatagaagaaggagaatatttgaacatgcgagaagaggaacagagaagattgggaggttacagtcagagatacagcggattcagtttctgttgatgaagcttgaaggagagagagagcatcgacttaggtcgaagatttcagataccaaagttcttcttcgagactatatctatgggagaactagaagcgtatcgatgaagaaaaggacgaagaagcggtctgtgttttgtggttgcgttcagcagccagagtctccttgaagttattaaaactgttgttacttcactcgcaagtaaccaatgttaattgtttaactgcgtttgcgattatgtttttgaacgcagacgcggtagtaatagtgcgtttaataacaacagactcttgtttttcaacttcttatttcttaatgacaataaaactttttagaaatgtgaaattttcaatatgaaatcttaaacgttgttaaattccggtaccggcgagtcgggtttagccgtgtggagcatgaaatcgcaagccgcgacggcttctgccaccgtgagatagatccgttctttaccaatgctctcaatgaaggtggacttgcttagcttcttcatcacctctgctcccgggttcgctatcactagctgagaaaattagaagaccaaatcgtatatcaataaatgtttaggtacttgtcttcaaaaaatattaccgctcgtgtcgatgtgatgtgtatgattgagtataataccaaatcgttaaatcaataattgggggatgggaccttaagctctctacgtcccaggattttgttgagttcctcaagcatgcgtataccgctcgtgtcaatgttccccacagctaattcatttacgtatagaaaccaatttatagtactcaacgttgtatagtttgaaatccaacatttacactaaaatttaaactaaattgtaggatacattttcttaaaatcagatttggaatgtcacaataatacaattatcaagaggtagcaaaatttgcttgagactgattctatgatccatgttcatcctatatggctatattgtaaagtttctgacgtaccactcatgtcaagtacaatgtattgtagactgatatctccgctagttctcaatttatcttcctcttcatcgatccaccttccaattctatcaaaatgttatacataagaaaaagattaataagtcacatacaaatataactaagattcaacaatcatataaagatatatatcaatgtataaataacctgtcacgcaagtaggtagagtcgtcgaagtaaataggaccatcgatgtggggaatgagaagagaagagcgagtgatggcttgcgggtaatgctcaatgttcctatatatttctgagttttgaatgtttcccattacataaatctttggtctccccacgaacaacactaacctcatcactgatattcccacctattgcatgattgtattattttgttgggagtggcacaaaagagtaagtaatgaagaagttaggatagatatacgtacggagaggataagaccaatctcgatggtaccaaaaacaacgcccaagtaagcagagagacaaacgaagaaatcgaacttgtcgagtttccaaagatgaatggctgcttcgtagtcgactaggcctagcatggcagcgattatgatcgacgacagaactactaatggcgtgtagtagaataacggtgttaagaacagtaacgtcaccgncactg

SEQ ID NO: 29873 - DNA, 4005 bp, Arabidopsis thaliana landsberg
taaccttaaactggaagaaatacaacttaagatggcaaattagtgacccacatactccaaacgaagcagatcttaaagagatagaagaaccaaccaaaaatttttatccaagagccaatggcaaaaagcatcgagtccgtctcatcacaaggagagattttccaggaccatcgatgtcaaacacaacaccaaggtagacaaagcagatggctagaaccgaaacttcattcaaacaagactcaacctcagaacagtcaaagatccgcaaaagagagactccgaaaatccctaaacaaatctaacgcaactcgccaacagagacacattggaggaagacgacgagggagataccacgagcctatctgatgttgcatagattcaccaagggaagaagataaacgaatcaagaaggaaagccagagccttcaatggaggcgttgactcaacgaagagaattctcagacagaacagaagctacttgtgactccactttgaggcaaggagcggatccgcaactttaagcaccatcgaccatcagaattaacggatctaaacactcaataccatgtcttatcagatatgagacacgaaagcaaaccaaaccacaacgttaaaactctacgattccataagtagaaaagacaaatacaaaattgaaaatctaaacaagaaaacaagggaggtgatcgacgttgacggtgtatgagccgccacgcacgggtcaccagctaatcaagtttgtatctatctgatgtataaatatctacgactatttatagcatataaatggtatatttgacagacaaaatgtggtgatataacattagccagttgattgagtgtaaattgcttatggtatcatcaatcaactggtatatgcagactttgccaaatccgattttagacggtgatccaaccaaaaccattagctgcaatgttcagttgctatgatcgatcactagtattgttgttgtgccataaatatcaatctttattttcttatgttgccaaggcgatcacacaccacttatccactttgtgtcgcagttctgtgtctgtttattatttcttgtctgaaaccaaggaaaaggtaattgtacgatgaaacattctgacctataagtattgattaaattgaccctatcgcagagaccaagagtttgtgtatgtgcagcgaacatgaattcaaaattgacatatagttaatcctagcacacagtttagtggattagactatttcagtaacaagtggagacacatgactaaattagcaatgaaattgtaacgagcttatctccccccaatttgacataatttttgccctattgtcttcatcaaaaaaactttctttaagttcatctaaaagtcaaaacaatataattattaaccttttgaagtttattcgggacagctatatgcttctcctctctaagtatataaatcatatccttcgtatctgacatattttgcgtctaacaagtaacaccctaataaacatttgcatttgcaagcagaaatctaattcatcgtggataaatctcagccgttaatatctttccggcgtcgcttcgaacgaccgatgatgacacgcgtcgagtgttttaatcctcaccgttggattatcttacacgtggcaatcatcatacagagcaaagccaatgcccaatctttctcaccgagtccacccgacttgcaaacgggtcacactccgtcgaagaccaccgtcttcgccgttctcgtaaccctcttcttcctcaccggattactctccgtctatattcgccattgcgctcgctctaatcctgattcctccaccagatacttccgcaaccgagctaacgacggcagttcacggcgaggcggtcttgacaacgccgtcgtcgaaagcttccctgttttcgcttactcctctgttaaagaatccaaaatcggatccaaggatttagaatgtgcgatttgtctcaacgaattagaagatcatgaaacagtgcgattgcttccgatttgtaaccatttgttccatatcgattgtatcgatacttggctttactcgcacgcaacttgccctgtttgcagatctaatctcaccgcgaaatcgaataaacccggcgatgaagacgacggtgttccgttagcagcgatgagagaccacgtcgtggttgatattgagaccgttgaggtagcgaaaagccaccaccgacggttgagttctgaaatctccggtaagtttccgagatcgaattcgacgggtcattcgatggatcgattcagtgacggcacagagaggtttactctgcggttaccagatgatgtaaagatgcgattaatggcggtgaaaggacgtaggttgaaacgaacgagaagctttgacgttgatttgacggcggaacactattgccggagcggtgaggaaagcagtaacacgatcgggtctggtgcgaagtcgggtcgggtcaactggccggatcgatggggtttgactttgttcgtttcgaagtcaaactcgggttccgttagatcacagaaatctaacggtgaaccgttgaaatgaacgacgttatattttgccgtgaaagtggtgaagatatgaatggtaaaaattggtttgtaattttgtatacacaaaggtccagcttgtttagcatctcgctaaacatgtttttgaacttttctaagaatgtttcaaaattaatatatgttttcttatacgagtggtaaaaagtaatttcaaattggtttgtaattttgtatacaaaaaagtccagcttgtttagcatttcgctaaacatgtatttgaaagtttcgaagaatgtatattattaaagaagatattgtttgagttttagatttcatttattggttcattgatgttttcacaactttcatgatctgatgaaagcatgtatcctctttttttgggcaacaaacaacttcattagagattaaccaattagaagcatacaaggatagagcgttttttgctagggattcagcttccacattagtcttacgagcgatgggagtacaatgaaagctattaaaggaagaacaaacgataaagatatccgctagaacttcatggatctcagtgaggatggaattaatgttgatcgctttgacaagcgcacaacagtccaactcaagatgaatgcgcgatacacaaagggttcttgcattttccagagctgtgcgggcagctaaagcctccaccataagaggaaaggccacattagtacatagagaggagaagttctcagatgcaccagtacctgacaaagacaaagtccaacccaatcccgcaacacatagattttttctccaccataagggatcgatcgagagtaggttctataaagtaccaatttatttcacatttagtttaaacagtttatcattaaccattcgtgttggtttcacaatggtaatgtagacaatattgtttttataatattaatttacacaaattaataaatagtgcattaaaaattacatgactagcaatttagaattctcccgtcaggaaacaaaagagtgtcacaagtcccagataaatagatcgttacctgattattacgcgttattagtagttgtgaatttgatgattgtgggctctttacttgttacaaattcagtaaacataatgaatatcttgttttttgcttgcgactctcgtcccactccactcatccattgagtgatggttacaaagtctcttattagcttttcttttcgctatggattcttatttttgtaaagtatgaatgaccttagtgatagtttataacaatttatttgttttggtttccttacaatcaaatttctccactaactaagcgatatatatatgcacagaaactatatatattttaatagatcggcacccatgtttacatatttcacgtttcttaaaattattaatcgtagttgacaaaagatagtatcttcacacctcacaatcatagcagtaacaccgtaccatttattcactagtcttggagtatattt

SEQ ID NO: 29874 - DNA, 1060 bp, Arabidopsis thaliana landsberg
gtacaacacccctaagtaccgttttgttgttcgatttaccaacaaagacattgtggcacagattgtatctgcaagcatagctggtgacattgttaaagcttcggcttacgcacatgagcttcctcagtatggactcactgttggtcttaccaactatgctgcaggtattgaatcagttctatacttttgttttcccaatatttgattctgtgtgtatggtttcttaaagacttattgtttttgtcatgctagcttactgtactggccttcttttggctcgtcgtgttctgaaaatgctggaaatggatgatgagtacgagggaaacgtagaggtatgttgtgatcttttatttcatcttgaaaataaagaaacttgagagttttcatcttttgattaataactgaatcaaaattgatgaatcaggccactggagaggacttttctgtggaaccaactgattccagaagacctttccgtgctcttcttgatgttggacttatcaggactaccactggaaaccgtgtgtttggtgcactcaaggtattgtgttttaatgtggttgtctgtgttcttatctgttgtatagtgtgttcatgatttgaagatgatgctagcaatcctttaataccctgttggtttgcttcatgaaactatagggagctttggacggaggtcttgatatccctcacagtgacaagagatttgctggtttccacaaagagaacaagcaacttgatgctgaaatccacaggaactacatctacggtggccacgtctcaaactacatgaagctgttgggggaagatgagccggagaagttgcaaactcacttcagtgcttacattaagaaaggagttgaagctgagagcatcgaggagatgtacaagaaggttcacgcagctatccgagcagaacccaaccataagaaaaccgagaaatctgctcccaaggaacacaagaggcaaaaacaaataaacattactgcctgtaatctttattggtgcgattgggttggcctcactgggtttctggattgattgggggatattcaacaaaaca

SEQ ID NO: 29875 - DNA, 1967 bp, Arabidopsis thaliana landsberg
ttacaacagagctaagggaactctttatgatggtgaaactcgtctctttttgcggcatgatggtaattgaagactttttaaacatcaggtggcatattaggagaactgtgattgttttacctaattacatttcttaatttctggcagattcaccagtgtatatgtatagtatgggagggatggctgagtactgtgttacaccagctcatggtttagctcctctaccagagtctttgccctactctgaatctgccattctggggtgtgctgtttttacagcatatggtgctatggctcatgctgctgagatccgtcctggagattctattgcagttattggaattggtggtgttggctccaggtaattttaaatatgtgcgtttttcgtttttttaccggattggtttttattgcttcttgtatgaccataaccatctttgagttgttgcttcagttgtttgcagatcgcaagggcttttggagcctcggatataattgctgtggatgttcaggatgataaattgcagaaggccaagacacttggtgctactcatattgtcaatgctgctaaagaagatgctgttgaaaggataagagtatggttgagtcaagacctcttatttgtgaagatgaaccatcaaccattgattgatataaatatgaaaaactgtttcttcttcgtaggaaataaccggtggtatgggtgttgatgttgctgttgaagccttgggaaagcctcaaactttcatgcagtgcacactaagtgtgaaatttggtgttttagctgtgatgattggactctcacaagctggttccgttggagaaattgacataaatcgacttgttcgtagaaaggtttggggttcttactctctctctcggccttgttagaagaaagtctctggtactgagattgtcttttaagatcatgatattgaatctctttttgttctgtttttccaattttttgtgaagataaaagttataggatcttatggaggaagagcaagacaggatcttcctaaagtagtgaaattggcagagtcagggattttcaatctcacaaacgcagtctcaagtaaatacaagtttgaagatgcaggaaaagcatttcaagatctcaacgaaggcaaaatcgtgagccgaggtgttgttgagatactataaccaatagccttttgattctggtttgtgaatgactgcttcacacctgtttcactgaggtctatttttagttgctacaatcttcagacaaggtcattgttaatctgatatttgtgtttgtttagacagtgaaaaggaaaaaaaaaactgtagtaactggacaaaatttataattttactgtttttcatttctttccaacatttattgtttttctatactgttaatatttttaatttcttccctcttttcacaattttctactttctaaaaatattaataactgacatatatataaaaaaacacaatttatttctcttttgataaaattatctataaatcattaaatctttgatgagaaatatccaatctactaatgtatatcgatgatttaaatgaaattacttatttgaacacaaaaataaatgaatttactaataaataaatagcgtagttggagcaagtggctaaaaaaattacaaatctagtttccattctcagcgtcggctgcttggaacgtcaccgttttttggaaaacgcaatcttctcccttccgtgacgtctcaccggaattttctcgcttttgtctactctcctccatctccgaggttctccaagctcagctcctcttcccatcattcatccgaccgccttatccggtcagatcctttacgtatttctattttcctgatcgtcgatttttgagaaatgtaaaaacagatcgtataaggctacgaagtttttaatttgaaagtggtatcgaaaatttttggtctttgattaggttagggcaccgtagctctgg

SEQ ID NO: 29876 - DNA, 3086 bp, Arabidopsis thaliana landsberg
tagaattcgtcagctataaaaggcgcccgcgactaacaaactttccagtctccaaagtttccgaatctttcacttccacaagtcagagaaaaatcgaactctccggcgatttgtctcaactgaattttcctccgccaccgcttcttcttcgtctccttcgttgcctcctcctttgcgctctcacgcttcaggttttttctccggctcgtacgtaatcgccgcctcgtacttcaggatttctctctttttctccgatttgttagaacagagttcggattttcgtttcttaacttcaatgcattactgtatatgaagttgagaatggtttttgatcggagaaacgattaatttcgttcgccgtcttattgattttctgcatgaattaggcataatgacgagttcaccggaaacgagatttcctctggttgcgaaagattacgagattttagaagagataggcgatggtgtttacagagctcgatgcattctacttgatgaaattgtagccatcaagatctggaaccttgaaaaatgcaccaacgatctggttcgtatcttcatctttgttctttgtttgttcatatttaggatctatcatcggaaattgatatttagtctgttgttggagataaattcaggaaaccataaggaaagaagttcatagattgagcttaattgatcatccaaatctattgagggtgcattgctctttcatagatagtagcagcttgtggattgtgatgccttttatgtcgtgcggctcttccttgaacataatgaaatcagtctatccaaatggtcttgaggaacctgtaattgctatattgttgcgggagattcttaaagctcttgtttaccttcatggactaggacacatccatcgaaatgttaaggtacttttaatctcaattcacgttatgtacttcgtttttttccgatcatgttttgatagcagaatgtatccttctttctaggctgggaatgtactggttgactcagaaggaactgttaagctcggtgactttgaaatttcagcatccatgtttgatagtgtggaaaggatgcgtactagttctgagaatacttttgttggaaatccacgctggtgagtgcttaatccgactatagagagtagactttccattctaagctgttttctttagcttgaggatatctttgctctttctaggatggcacctgagaaggatatgcagcaagttgatggctatgatttcaagtatgtctgctgttttctagtgtagctgtactgccatcttaaaggagtgacttgcctaggacttattagttttctattcaactttttagagtggatatgctggtcgtttggcatgactgccctggaacttgcccatggtcattcacctaccacggtgagtcttaccttataagattaaagttccatcatgcactgtattttcccctttattttcagtctttttaattgtttacctgaatcctactatagtatctgtttctagaatgctctgtttttcatgattgttttcaggtgctaccattgaacttacaaaattctccctttcctaactatgaagaagacacgaaattctctaaggtcagtggaatggaatgattacacctgagaaatgttgatttcatctttcactcattaagaaagatactatatattgttgcagtcttttagagagttggtcgcagcttgcttgatagaagatccagaaaaacgtccgaccgcttcacaactactggaatatccgttcttacagcaaactctttctactgaatacttggctagtacatttcttgatggcctctctccgcttggtgagcgttatagaaagctgaaggttagatgaaaactttccttctctgttggtggtatcaccattgctttggactgtgtgattgaaccttggcaacactgcaggaggaaaaggccaagttggttttaggtttagatggtaacaaggagaaagtatctcaggtgtacgtctggacatacaaagataacttttctttcaaaccattttagtgtaactaagccataatcaactcagttattgttattttaaataaatgacccggtaatctggattagtagaaaataactttctatgatccttcaacttctgactcttattgcaatcctcaatccctctgatatacaggaaaatgttgaagcgctgctgatggaacctgctagtcttgtgaaccctgtttcttgtgatactgctcaagtcctcccaatcttacagaatatcctgatccaaaatgatatccaaagggttattgccatttaaaaacgtttcttgttgatatttcactcatgaatatcgtttgggtttccatctcctggtagtttcacacaatttctctttgcacaatcctcaatccctcttatatacaggaaaatgttgaagcgctgctgacggaacctgctattcttgtgaaccctgtttcttgtgatactgctcaagtcctcccaatcgtacagaatatcctgatccagaatgatatccaaagggtttgccaacgtttcttgttgatatttcactcatgaatatcgtttgggtttccatctcctggtagtttcacactatttctctttgcttggcagaaaaggttaatcggtttaatgcaactctgtgatccaactgctggtaagtttgctgttctgtcactagaatttgcatcttctctgtgttacaagttccatgacctgatcttgatttttgtacagaaatcagaattccgattggcaatacagaagttgggcaggttgggtttgcttctcatactttgctagtgacatatgcatagagagaggccgagaactaagagccaaaagttctgaattcacagatatcaacaacagagacagatctattgtctgaggttcacgttttgcagcagaggtaatgataaattccacaagctttaaatctcttaaagaaggaacgtgagaaaaatgcttgattgtttcattggtttcaaatgctacagcgttaacaatcttgaagaagaggttgagaaacacaaaaaagaaaatgctcaggtttgtaaaagagagccacactcacacgtct

SEQ ID NO: 29877 - DNA, 591 bp, Arabidopsis thaliana landsberg
tcccttctctttaacagtgttccaacccgatgcagctgaatcattaagaacatcaactaaatgatcatccaaaagattaacttcatcaacataaagaatccctctattggctttagctagtagtccaggctcaaacgccttaacaccttcggttaaagccttttcgatatcaatagtaccgcaaactctatcttcagtagcacctaaaggaagatcaaccatattgattttggtttcaataacagacaattgttctcccttttgaactttctctcttacttcctttcccatacactcaggatctctagggtctgagttatacggatcaccagcaacaacagtgatctcaggaagcaaatcaactaaagatctaacagttgttgatttaccagttcctctatctcccattatcatcacaccacctatcttcgggtcaatcacatttaacaaaaggcatagcttcatctcatcttgtccaactatagcagcaaacggataaacaggtcttgcactttcctttgaatcaatcttctttgcctaataccaaaagaaccccactttgtaaatcttttatactaaccaataaatcat

SEQ ID NO: 29878 - DNA, 2991 bp, Arabidopsis thaliana landsberg
ccctctaatgtcgtcgtcctccatatgctttgtcctggttaaccgctaatatctctgctcctcaaatgatggaccctgaagttattgagaagcttgttttgaacagcttaagtaagtacaaactacttaacattgtcccaaccttctggacatttttactactaggcataaccataacattttccctggaacctaaaacaggcacagtaccagtgaagcttctcttgcagctaacaacagccgtggaccacggtgggttgcgtgacagaaccggtactttctgttacaaggatcatatcagcaaaacaaatgtgcctatcttagctcttgcaggggactgggacataatctgccctcccgatgcagtatacggtagttttctttgaaatattcttaccgcaaattcaagatttcattctcttatttgttgtaatctataaccggtgtgcaattgtgttgatctgatgaggcagacactgtaaagctgattccagaacatctagccacttacaaagttgtaggatcacccggaggtccacattatggccaccaggatctaatttcgggtcgaacggtatgtactatgatcaacacctcttcattcatttacgagtcatatcggtcggttttgtattcaacctttcattctccctacaggctcggaacgaagtatatcctctgattactagatttcttcaacaacaagatgagagttaagatcaacaagaatgcaaatgaattttgattcttgtttctgtacatataacactccttatgtacatttatgtacacaaatcttcacacagttaaactcacaagcactgtatacaaattatatacaaatgatacctttaattgatctcgtgtatgtgtagattacactaaagataaacgatgttacttgcacgtaacaatctcatcattttcatgtgactaatataaatactagatctacctaacatttttgtagtagacgacctaattatcaccaacaaaaggtgaacaaacccacacgcaatgtggggttcacaatgtctccgagacttttccataggtaatacaaaggtctcaacagtttttcctcagaaaaatagcaatcatgaataaaaagccaaaaaggaatcttaacataaaatagtgatttggttccaatcccgaaatcaagaatcacatcacaggaagagataatatctaactaagacttattgtacgccatcgttttacagaccggacaagagttcttcctcactagccattgtttcacacagtcgatatggaacctgtgtccacatcgtaactcccctacctcgtccttcgcctcatactcgtcctgtcaatagccaaaacatgaacattctaggaacaactctgtattctttacttgtgattacttgagcaatgaagccaaatctggacttacttgacagatgatgcactttctatcagcaactggtgtatcttgccggagtggtttgactttccgaagacaacttttgatctgtttttcattaagtccagtgttcacatgcccaattctttcaccaagctccaaaagttgctgtttttttaacaacaaaacaaacacaacaacactcaagaacctagtgaaatcatcatcagcttcttttactagtactttgtgagaaaggcactaccaacctcgtatgtcatgttatcgacattaagcctcatgtcacggaattgatcgaatgagcttaatactcctcccatcacaaaaccattctgcatcatcatcatctgcaatgaaacacccatatgtaagaaaaatacatattggcacaagcaccatatgaaacttaagtcaaaagcaacactctacctcagcgagtccatcagggtaaggcagtcttagatgacgatgatatctatcagtctgttcagcccgcgatgtcaaaaaactcgaatcagaatcaaaataaggattagactcttgattgagagatcgtctaggaagaagagaagaagaaccctgcaatgtaacagctgtgttgaaaacttaggaacacaaaattccaaacctcatactgaaactactacaaaaacttcatcagttacaaacagtgtgaaaaaaacttactttactccacaaaagattttgatatgatatcacttaagcagagtatatagatcaaagaacaaagcctaattttgctatagatacgaaaagacgataaacctaaatcaaaacgaaaaaaaaaaactgatgctttctaagtgtgctaactactagatagaggcaaatcaaatatctaaagatattataaactaacttaagatattaaaaacccctaaatatttaagctaatttcaatagatatactcaaaatcaaattaacacatacacacgcaacgaattataaaaatggaaactttaacatataaggaatattaaaacagaaaatgtaaatgtacccctcgctgattattattactgttactattggttttatctccatcgattttgcgtctcaccggaatattccttcgcggaggatctgactcgacggtgttattggaggctccaacgacagcatccgtcgaaaacccaactccaggtccacaccaaacatcaggaatcgcagcgcaagcgacgctactactactactactagcctcgctcaagatcttaatcgaaccaccattgtagctactactacccttgttcttgttcttcttcttcgacttcttaattttgaaattactcgcgtcccaatcagcggaggagcgaatcaccgccgggaccgaaacttgctgagatgcggaggttgtgcagcctagcccacgaaacgacgtcgttccgttgggtttcttcttagtggtttctggcaagaggaagaaggaagacatggcggatttagagacgcggctaggtttggggattagaggttcgtcggcggtggaaatgggtgggagatttcgatgattcctaggtcgttggagtctcatgtgttgaccgattgttgttgaaga

SEQ ID NO: 29879 - DNA, 2834 bp, Arabidopsis thaliana landsberg
aacattcgttgaatggcctcgttaataggcgcgatatatttcagtacatcgaagcccatttataaattggtaagtaaaaaaataagtcatcttaacccatctacacttttattagttgtttaatccttgtcattcaattatagcataggcccattttaaaaagtaaagcatacgcccatagttactacatattaatgtttttaattgaatgacaatactccatcacgggtttatgggctatgggattgggtccgtcaaagtccaaataaatgattttgagcccacacgttatcatcgggacactcttctactttttaacccacgcgcatcaatcgcgcgtagatcgtgtgtgctaactccggcgcgtgatgctttttataaaccaacgaacgattatcttattttaatgattgatttgaaattttgaaatcaacaactgatagtgtacaaaggagaccaaaaaaggaagaaagtttaaagccgcaaagcaccctgcattaagccttctttattgaagtactttgctttgctttttgacaaatcaaattttttttgacaaatcaaattttaataaggaaaacaaaattaaacctagaataatagttcgagggctttagaagattcagacatcttaggaataaagcatgaagctgatgaaccagttgctaataagaatctcttcttgttcattgttgacttcaacacgtactcttcttcttctgaatcttcaatttcttcttctctcttcaagaattctttgaaccacatcgccgacattttcgggaaacgttttagtccattgttataatcgacgtagaatagtccatatcgaactccataaccggcgttccattcacaattgtctagtaatgaccacgcaaagtatccttcaactacaaccccatcctccctgaccaaaacaattttcatcgtcagtatgaaacaaagtatatggtttcaacacagtaaagtttcttgtcccacaagaaacttataatggagatgtttagaagagacacttactggatggcttgttggatgctttggagatgtttcttgtggtactctgtcctttggagatccatcaagttagaaagtttaggctttttctcataatctatatcacagtgtcctgaacaattttaacaaaacaagagttagtaaactatatcccggattaaattgagtaagactaattaaagaacttcttataaaattattaccgctttcggtaatcataaatttcgggctttcatatttattcttggcataatttagaaactttctaaggccttgtggatatagaaagtcccattccgaaccacctcttacacctaatgtttgccctgcgttgttttcttctgtaccaatagaaattgaaaacttgtgagacaagaaaacagtaacaaaaagcttggagccaagaaaccctaaaatgatataaatattatacacaactccacttacttctccattcgatgcgtgcgtctgatctccaattgggcttgtcatgattcacttcatcaatatttttgacgtagaaagcactgtaataattcaccccaacgaaatcaaaagatcctctaagcttcttggattgtgctgcggtaaatgatggtaatctttttccgatcgattttttcatgactgcagggtaatctccatacaccgtaggatccatgtgcctgttaattaaagaaagcacccaaacaaaaataattagaaacttaacaaaacatatgtactagttttattttgaaatatgtaacctttaattaagatataaaaccactcaccatccaaacataaactccatagctcgttcgcatgcttctatgtctttagggcagttcgagtcataaggctcgaaccatacgggacaatgagcgataccgatcttgccatctttacactgtaatccaaacaataaacgtcgtatatctcaataagtatgtttttaaagacaaaaatgctcgttaaagtgaaattaattatccttttccgtactttgggattgttcctgaagacctcaacagcttcggcgtgagccagaagtagattgtgactaacagtgtaaacctcgagaccagattctcctgccacggctgcttcgttcatgtatttggaggcacgtccgggggcttttcttcccgtgtcatagccaccaatactgtacacccatggttcgtttagtgtgacccacaattttacacggtcgccaaactcctcaaaacataaggccgcaaaatccttgaagtcatcactgcaagatagtatatttatatgcatatatgttaggaacattaatttatccgaaaagtagtcaaaaactaatatattgattgttaataatcacttacacagcttcttcgcttaaaaatccactgtattcatcttcaagtgcttgaggagtatcccagtgaaataaagtggcgagaggtgttattcctgttcatacataatatggaacatattagaatatgtcaatccataaggttaggttatatatgtaagttaaaatagttaaataactaccgttagcgaggagttcatcgatgagatcgttatagaattgtattccttctttgttcactcctatgcttttctttccaactatatttttagggatatgaacaaaacaaaaggttaaatctattgaattgtatgaagagcactgatcaatatctttaatcgaagaaaatagtggtatacataaacttatgagctaagaacttacgaggaaaaatcctaggccaagagataaagaatctgaaagcatccatgtaaatatccttcattctctgcatatcgtccttgtaatggttatagaaccg

SEQ ID NO: 29880 - DNA, 1449 bp, Arabidopsis thaliana landsberg
  unsure (1)..(1449): unsure at all n locations
ggatcccggtactagcaattggaccggcactacacaaagcctactccatcttagagaccaacattctgagctccaagctgggaaagttagttctgatcagttttatcgtcaagttcttcaattagttctaaattttgaagactagctaggctccaactcacgttttcagagatcatataccaaatgactgcattcatgctgagaccaatcatttttgattttacctttcaccgaatcaaacttctgcacatggcctatgacggtttggccatcatgaccgtgaatagttgtagcatttggtacaagaggttgcctttttaaaaaaaaactaatttattgaatttttacttcttcttaaaattagaaaaactttttttaatgcatttttcacaattgtttttctttttggtatcaaacatctttcaatttctctgcaaaaccaaatttatattaaatttaacttttgaaactatataaaaaccaaacaacgaaaattaaatcaaaatatagttttaacatgtatgatgatttatatttcggtgaaaagatgatgtgattaaggtccaaattttgttgtctagtaaagaaaaacaaaaaaaggtaaaaatatgcttgtgactgaggaaataacagcacgtgtggaataataaacatgacttacttccgcgttaccacgtaatcatcttcttcaacaacgcgcatacaagctgcgaccttcttcttcttcttcttataactgtacttatcgcaaacacatgtatatatacactcacaagccgccattttcactatactgtcagctccaaaacatacctgaataagtgaatatacattaaaacctaatctatcatcatatccatctctttccctctctgcatttagagatatggatgcatccccaaagtacacaggtgtacggaagaggaagtggggaaaatgggtggctgagattcgtctccccaacagccgtgacaggatctggttaggctctttcgactctgctgagaaggcggcgcgtgctttcgacgcggctctttactgtcttcgtggccccggagcacgcttcaacttccccgacaatcctccggagattcccggtggtcgttctctgacgccgcagcagattcaggtcgtagctagccgtttcgcctgcgaggaggagctactaccaccggaacaacatcatccgtcaccgccacgtggcgaccataataccgaggaagaagtgataatttcggcacgtggggaaattaatagtggtagtggtgggcctacgttagggcaagttggggaagataataacaacgagggtaatagtaatgacacgtcgtcgtattggcctttaatatgggaggaggagaattttgtaggtcctcctaactcagatcatgagttcggttttttcacagatgattcaacacaatttgtacttnccgacacaacaacaac

SEQ ID NO: 29881 - DNA, 1414 bp, Arabidopsis thaliana landsberg
ataacaaagacaaaaagttaaagctaagtaaaaatgtacatcgctctctaaaatcccctccggtattacgccggacgacacagaagaaaccgcttctacttttttttttttaactctctctctctactctacatgcacattctctctctctctactgcaacttttgtatctttttatagtttaaacaaataaaataaacgattttattttctttataaatatacgtctgagacgttccttaaagagcttctctgcttcagcttctttttagccttcattcaaatctcagacacaccagtgtgtatacatgcatttgctctcttgatctccttgaaacttttgttttattccaaaacacatgcaaagtagataaagagatcttcttcttctgataataacctcgtgattatcgttttctcaagtcttcttcttcttcttcgttaccacacaaatgcagaagtactaatatagtgtaacgcttaatcaggtttgtatttatacaaagtaaaaaaaaagaaagaaaaaaaagacaaacctttatttctgggtttcttcttaaatcttctttgtccttttctgcacattagaactttgtaggcgttcccattctctttttttcctctcctaataatttttactttaaaatataatctcaggctcagcaaagggtttaccaaagaagaagaacaaacaacaaacaagagagagaaaaagtaaaattgtttttataagaaagtttatgatggctccgatgacgaactggttaacgttttctctgtcaccaatggagatgttgaggtcatctgatcagtctcagtttgtctcctatgacgcttcttccgccgcttcctcctctccttatctcctcgataatttctatggtacccttttctttcttcttctctctccaaccaaattttctcttctttttttctttgtacgacacatacgaatgattgtggtctcaacagtacatgctcgtgtaactaaagcctctctgattgagtactaaccgacttcgtagcttatcctctataaccgagttatgcttaactcagcctccctcgtgttttctctctgactttgtctctttcccaagagaggcaaacccaaaaaaaaaaaaaaaatctaatttttatatcttctcgtgatctctcttctttgatttttcgatattttcgttgttgttaatcttctgggtatctaaatccatgtactttctccgtcatgaaactcaaagtattaatctttttctcgttttccttcattttcccggaaaataacttgttcttggtgatgaagaactaatgatgatgttttttgtttttgtttatctaaggttggtcaaacccaaaacctcaggagtttttcaaagaagaagctcagttagcagccagcagctttaatggcggat

SEQ ID NO: 29882 - DNA, 1499 bp, Arabidopsis thaliana landsberg
atattattgaaaaaaggcatgaaaaggctacttttaagcccaataaataggcccaaattgtatatttactaaattttgttaacgcgcttacaaaaccctttggaaagtatttcatcaaatttcagattcagaaaccctaatttcttcacaaagcaaaacacagaaaaagccattctttttgccccttgagtgctttcagctcttcgcacaaggtaggtcgcaaccaagtttctttatctccttctcactcttaattgtggtaacgttgatccgatctgttcaaatttgatcgggtcacttggtggatctagtgactctgttttttttctctcgatgaattcaaatcctttcgaatgtttttgctagaaaagatttagaattccgctatgttgacattggtttattgtgccattgacaggttacagaagtaatgtcacgtgtgtacgtcggaaatttggacccgcgagttactgagcgtgaacttgaggatgagttccgtgcctttggagttgtcaggaggtaagaatcaatccaatcaatcagttcgcgctacaattttgtcacttttgaagttaaaagtatccaattttgcatctctctaatgttcatatgtaatgtgcagtgtctgggttgctagaagacctcctggttacgcttttcttgattttgaagattcaagagatgcccgtgacgccatccgtgaagtagatggtaatgatacattcatattctttctattttgctctgttctcgtagaagttgatgttttgatttggattggaaaataagtttggtggaatcttttaaaggagataaatttgtggtttgcaattacttttgacttgaaacttcacaatttgacatggatactgtgataacggataggcaagaatggctggagggttgaacagtctcacaatcgaggtgagcgtggtggtggcggtcgtggtggtgaccgtggaggtggtggcggcggccgtggtggtcgtggtggctctgatttgaaatgctatgaatgcggtgagactggtcatttcgcacgtgaatgccgtaaccgtggtggaactgggaggtgtcgcagtaggagccgtagtcgcactcctccaagatacagaaagagcccaagctatggacggaggtcagtgatgctttttattttgttaccttagtaccttattttgaacggattaagtaaccttgcctttttctggttttaggagttacagccctcgtgcaagatctccccctcctccaaggcgccgcagtccttctcctcctcctgcccgtggccgcagctacagtagatcaccacctccatacagagcgcgtgaggaagtgccatatgctaatgggtaaatttctttttcccaagtctctatatcattatcagtgtttaggttttggttatagttcttagagataaacatttacattttcttcagatgctaattcaacatctggtcgtagtatcttcagaaatggcctgaaagatagacgca

SEQ ID NO: 29883 - DNA, 1235 bp, Arabidopsis thaliana landsberg
gcggtctcacttttctcttcccccacccgcaaagatctctcaaagaatggcttccgcggctgttgcatcgatggttcttgaccctaaagcatcaccggccttgatggatctatccaccgcagacgaagaagatctctatgcccgcctcaaatcgcttgaacagacaactagagttcaccgatatccaagaagaatatgtgaaagacgagcaaaagaatctcaaacgagagctgttacgagcacaagaagaggtcaaacgaattcaatccgtgcctttggtgataggtcagttcatggagatggtagatcagaacaacggcatcgtcggatctactactggctccaattactatgtcagaattctcagcacaatcaatagagaactcttaaagccttctgcttccgtcgctcttcaccgtcactccaacgcccttgttgatgttttgcctccggaggctgattctagcatctcccttctcagccaatctgagaagcctgacgtctcctacaatgtaatgtttccttttttccaaatctcgactctgttttctgaattaaagttagggtttttgaaacgatctttggtttcttatgtggtgctttatctttttgtgtaggatattggaggatgcgatattcagaaacaggaaattcgtgaggctgttgaattgcctcttacccaccacgagctttacaaacagattggtattgacccacctcgtggagtcttgctctatggacctcctggtactggaaagactatgcttgctaaggctattgccaaagagtcaggagctgttttcattaatgttagggtttcaaacctgatgagcaagtggtttggagatgctcagaagcttggtaagtgcatattattattttgtgtgtgataaaggaacacactttgagtaggcctgtcttcatgctcgtcgtgttttcttcctgtgcttttatcagcttcacattgtgcaactttgttggcagttttttgttttttgtgtgtggttattatatcaattacactttttttggtctgttgatggtgtttctaatctatgagctgctctgttctgtttcgttctctcagtttctgctgtgtttagcttggcctacaaactccaacctgctatcatttttattgatgaggttgagagctttcttggtcagcgccgttcaacacatcatgaagctatgccaacatgaagactgagtctatggctttatgggatggattc

SEQ ID NO: 29884 - DNA, 2474 bp, Arabidopsis thaliana landsberg
ttgaaggttttggcgctcttaagcctgatggctttcccagtcgtgaaactgcggactgcgtgcttccagttttattgcaagaactttgagctaacgaggtgcccagagtaattacattagagtctggaataactgatgcatgaccaagcatagccacatctgatgcagtcatagggccaacgttggattttgcaacaacagaatgctgtgagtatgatactgtcggaatttctgaagatttgctgatctagagttcaagaaaatgcaataggttactcttaataggaagaatattggaaacaaagcatttgctgcaaatttttagtgcataaactatttgctatattggtttgcagagggcagcatagctttaccacatttcttctagcttgcttaagagagggcttaggaattgaagatttactcgccagactggattttgttttactcttggtgcttgaagtgtttttagagaagctttcagatcctaagctcctctgagaattctctgtcatatcagacaaaaaaccatgtagcaatatataaacaggatgaaaagtaacagaactaaaaaggatatgagatgaatagtttttatttgctaactgaagtgaacatacttaattgagtaggttgactgtttttcgctttgattggactttgagtagtccttttcatgttgtttccaactgtaactgggtcagatttggtagtaggaactttagatatgctcagctccctgcaacgtgatgttgttgtatgcacatttgcaggtcttttcagggtgcaagatggttaaggtaaacaagcaaaaagaacaaaaacaagacctgcaaaggatatcaagattgcctatacactcagtactcaaagtaagaaaaggatatgaagatgaaggaggaggccggggacagccactgcgcttggaaccactccttaaatcctgagctgagataacttttttctgggcctataatgcagatattcgacatttagatagactgcgcctcaaaatatatatatttacgcaaggaaagaaacgacttatgaccctcattagctccacaatatttaggtccagtaaactcaccgaggaagattgggatttagatggtgatccgtacttgggcattatgccactgacaagcttcttctctctgtttttactattcacaggcaagtcgttaaataagttttcttcaagtgcttgtagtcctggtgaaacattacatttggaagctgacattgactctctgtactcttcctgaatggcagctaaccgatctccaccaagatggcaagcagttccagttattttagataactcagatgaatccaaaacacctggttcatgaccatatcacacatcttaagattcttagtaacatagaccaaatctttgacctttactactaacaggaaattggtaaaaaaaagtcaccttcttccgttgaaaaagctctatcccatgctaaactcttgcgcaaattaaaccctgcattctttttcttcttcttcatctgttgtcgctccacactcaatttgggcaattcaactttagcattctcctttcctacactatctgtatcaactgaagcgcatggctgctccctgttgttgctggtgcctgttactcttcctgcaaaaagtattaaccttcatatatccgcagaatacacaacatttatactaatttgctattttatcaaattaagatttaaacaatgctaattcagatgcttaaacactctaacaaagggagagagaaattatcagaacgaagctcggatcgagaacgagaaattgaagcgcttaccaattggggaaaaaggaggccgagtaggaacgatacgactagatctagggctttggagaggtgagcatttcaaataactctttcctcggctcgaattagttttcttcggcgtattcttcagaagccaattatcttcgtcgtcttctccagagatatctaagagatccttatccatttctagcttctctttcgagcccaagatctgacgattaggaaatccggaatcctatagctaggttttttcaaacttacactgagaaaatctcttcggaagttgtaggcgaaagtcctagtcggtaaatcggaaattgttcggccgatggaagagacgactgttgatagaatatcccggcctcgtaagcgggaagaggttgaaaaacttgaaattgaaagaagatcggaccaacgttctctataatctcaggttattattgtcatttaaagcaaatcgattgggccggactttaaagcccatttatttgaattttaaattctcgttcaccctttattggtttggtttggttaggataatattttttcggtttgattaaaatcatatcggttcggttcatggagcattgaaataaaagtagttagcacatgttttatttttccatttgtagcaataagcctagaagacaatacagtctctgtgtta

SEQ ID NO: 29885 - DNA, 581 bp, Arabidopsis thaliana landsberg
actattgtacagaggccagatagaagggggctgatccagttgcggcggatctatagattatgcagcagcgcgatgcggctgaaaaacataagccccattttcttagtaagatgagtaaggtataggtttgggaaaactccaaaacaaaggttccaaaaaaaaagacattaatcaaggtgacaggattcgaacctatggccctctgtacccaaaacagatgcgctgaccagactgcgctacacctcgcgtctcactgtaattgctttttttttttcatctgcctcctgcactatacggctttttgccttcttccttctttcacttgaattttaaaaatccggctcgctctcggctacgtgtccaaaggaccaaaaggccattcttcatatacctcagctccgagaatagaagtggttgtggattcgaaccactgacacaaggatttacagtcctttgctctaaccagctgagctgaaccacttttccaaaagtctcttcttttcttcatcgaagagcgccctaccttaccacttgactagtaagggaaaagccctttactaatctaattaaaagggaaaact

SEQ ID NO: 29886 - DNA, 3440 bp, Arabidopsis thaliana landsberg
attacattagatcataacatgataacatccggaggccttccatcaacttcgtttcactgcatggacatggaatgttgctctcatgattgattcatcctaacgaaactccatttgctatgttagctgatataccattacattagatcataacatgataacatccagaggggtttgatcaacttcgtttcactgcatagacatggaatattactctcatgatctatcagatcggtttcattcttcagcatttcccatgtcgatcattctctgttcttacttaggctgatgaacaagcacatccgttttgtcagaagttgacagctgatataacatttgaagataggcattccattacattgtaggtttattatagttgagcaaacatatatacattcccagctctggcttggccttatgcagggacaatccgtaaagagaaagcccaagctctccaatagagatgcgtttcacctacaaagttgaggtaaggtcatcttcggacgtccaggaacagagccaggagttcctaagagccaatccaactatctcttttctaactgatgtttctgtacggctttgggctacttgactctggatgtgaaaaccagaagcgaatttagtgattcttcaaattagaaagtttctcttccattttcaagaacaatgtgtgtataattggtcgcttacttatcagattttgaggtataggatctctagggcctagtttcatgttttgtttctctgaattcgaaccatggtaaatttgctgtaaagagaggtaggtaatataattaacccaagagacaacccaagaagaatcgataaaggagtgtctcaactctcaagtaagaaacatgttttcattattatgattggcgagtctcaagctttcatcactgtagacaacaaagaaaaagattcgttgcacaaaagggtttgtgcattccttagaccaactttccagagaagcaaaacatctaaaaccacaaaaccatggtcttaaaagaaaattcttaaacgtcaggtgtgtctgagcgcagaactgtcaagaaaaacaagataaagagttaggaggttaataaaaagaagaaaaaacatataaaacggaactaagaggtaaaagattgaaacccctcttcaagttgttcaagtaaagatcatcaagcaaaaggtagagatgtcgatcaaattggtggaacaaacgcacggagagggaggagaatcgtgagtaacgtacctggtttctgaggctttccatcggaccattttggagagggagaagtgaaccttgtcgcgattgattgtttcagctttgaatggttctttgagacggatatacgccgtccccatactcgttctcagcccattttaggcctttctgaattaggcccaaatacgtttacgtgtttttagaggaaaactttcaacgtgcatgtcaaagacaaattgtttgtttattttctcatcaagcaagacagagactactattttgctttttttaaaagaaaacgatgtagcattttccttgtcgagaagctaaggaaacctgacaaaaatgcaagggataacaaacgcattaaccaaagtatcattttttccaagcaaagaaacatttgcacaaaacccatgcatataaacctcattatccaataattagcaatgctgcataacacataatttaaaaaccctaagaaaaaaatcggaagtttgtggaagcaagaagaagaaatgatgaatccagaatccgatcatccttcatctcctcgtcaacgtaagattggaatcgccgttgagctctctgaagaaagcgccttcactgttcgttgggctgttgataactacatccgtcagggagacgacatcatcattctacacgtctctccaaccgccggtttcgttggagccgattggggatttcaccctctccaaactcaacctccttccaccaccgcttctatttcctccaaagtagcggatctcgggaagccattgaaggaagctggattccctcacacgattcatacagccaaagattacgataagagagagaggctttgtcttgagactcaacggctcaatctcactgctgtgattatgggatttggtgatggctctgttagtgatttctgtgttcaccactgtgtttgtcccgtcgttgtggttagataccctgatggtcctggcaatgttgaaggtactcgggcagcgcctattgtgactttcaaatcacgtacggatgatgacgaagagatagattataaggctcagactgctctgactgcttctgttcatcctcaacacatcaaaggtttctttccttgtggttttcatatttacttgcaaagcactctatctattcatcataaaaaatttcatgtccttttttttttttttccatcttagccatggattcggtgtcaaagcagcctcttctcttttgccctcgtgcatcttttactaacaatgaagaagagtttcgcgcgatgcaattcctagagctaccaagtctttcatcttcatcttcatttcacctcacctccttagatttgggcaacaacgttaacctaacacgcagatactactacagagatggcaagcctaaacctaacaaacaatgtgaaatctgctccatgtcattaatccctaccacgttttattcctgcaagatatgtgtccctcttcaatcttcagtattatcacgcttttcaggctactaccacgaagcttgtatcgagccgatatcaaagcacccatatcatcctaaacatgctctccgatttagttatcaatcagatcagatatgcttatcttgttcaacttttaaggattgtgcttaccattgctctatatgcagttttaccatgtgtcaagattgtgctagagagccaccactccttgcaattgactatccaaaaaggcatgagcatacactcttctactttcataggaaaggctccttgatttgtgacgtttgtgggttgagtgatggcaggtctttgctgtattcctgtgtcaagtgtaattttgtagtccataaagagtgtgtctattttccatgcatcataaaaatatcacgtcatgaacatcgtctctccttcagttcttcacttactcctgaacaatggttatgtggagtgtgtcgcgaaagcatagacacaaattttgcaagatattcttgcgtaaagggttgcagtttcgcggttcattctaaatgtgcaacgcgaaaagatgtatgggacggaaaagaacttgagggagaaccagaagaagatgaatctctatatatttttaagtcgttcaatgagataagtgatggaattatagaatattttcgtcaccgaagtcatcatatgagactggacgtcgattccatcagagcatttgaggaggatccttgttgtctagcacgatcgttcaatatgtgtgatgatcttatttac

SEQ ID NO: 29887 - DNA, 2615 bp, Arabidopsis thaliana landsberg
  unsure (1)..(2615): unsure at all n locations
aaggaatgataaagttttcgagttatgcatattataagttatagatggaatatctattcagataatttggataatgggtttgatttatagctnnnnnnnnnnnnnnnnnnnnnnnnnnnngggatgaaaatttttatgtgtggtggcttttctgatggcaaagatgaatattagtttgtagcatgaatagaatgaaggtgttatggtagtgaaacttgaaaacacactgtctgaaattgtccttttcgtgaaaagaatgacactggtgctgaatttaaaatctcgctaccagttaatgagtcttgaaatcttggctttttatggacacttttagctactgaattctggtatgttattccaggttttctgcttctcttctttctagccactggcatgtccagataacataataaatttggattagcacacatgactggcctttcatcgttgacccggatatgagaggccctactgctggggctagattctaccattccatgggaattggtcacaagttcccggagcaacctctgaaccaacgggtttttgaagccaaaaaactgtaacaaaacaaaaaaatcatagtcattttaaaccgaagtaattaattaaccccatcacagtggtaggattagaataaattacaaaccaactgatagttctagtgaccaacaccgaaggaaagcaaaacatttgaaaaaaatcttagttaaagtagtatgctcaacttgtctggcgggtatatcccaagtactatggttttgcctatgaatcaacttagaattgagaagtcagaaatgcagtagaagacagtaagaggccttcttatcaggaagaacagaggtatgatcacaggttatagatccgcacatcttaactatatcttcttggtccgtttactacttatactatattgttccatgacttcaacaaaatgcagattaaataattgtgcctatgaaactctcaagtacacagatagtgatcatgttgccagcaagtgtcttttcaaaaaattcaccaaatcatcacaataggatgcaagaacattcttggaaaggcaatgacgaatgtttgactttgaattggttataaaagtagcatgcaagatggtctcaagaaggtaacaaaaagaaactgagatgcgtacctccatgccgcccatcttacatgtaaaccgttttccatgccatatttttaagtgagagaagtccgtcttctggagctttccccatgcaatatccggggtctgtcccgtccatgattcatccaaatatctaatctgcaacaatagagtaagactttgttgcattctaaagaaagtatgcacaatcttctataatttatatggaaaaagcaacgcaccagaaataaaggtcctttggcaccttcttcaatctccatgtaatatgtgttcccactgtgagctcgaacagctttgtagcctacaggataagggaaacgatcttttccctgatgaacaaaaagaagctaaagtaaatagaaattctgagacaccatatgcataagttgtttcaatagatctagtgttgttcactgttgaagtaacgagaacagtcaaacccaatctacaccctcagcttaaggatctagtctctactctctaccctatgcagtatcactgaacgtatatatttaaatcaaaaatattcagaaacagagaatctactgatcatcgatcctgatagttgcaaatgtaccaatctacacaaaattaatcgcgattcattgcatcgttaggcatatcagccccatccaaaataattcaaattacagtaatcgaagtcaatctgattctatatttcttctcaatttctaaggaattagaaaagtaacacagaaagagttgaattgagctatcgactgacgaatggaggatagagagcagagaaaaccaaccctagatgaactccagtacttcttatcccatgagccggtatagagagctccgacggagacgatttcgatgtcaacagactttctatcttcagatacgactcttggactcgccattgaaattccggaaacacgggatcggagcaccggtgaaaaatctcgcgacgccggagacaaattcgaggaagaggtagagagagagagagaggggttatgctttcgcgggaaataaaatgattccctccataactatatcaaaacttaaaaggccgcatattaaaaaaaaagcacttaatgggctttgggcctattttaaaattacaggcttaaccactttgaaggtgcgtatttggattaatcactttaatcaattggactaaatcatgttaacaaagttagaagctcaaatggtgagaagaattctaattgttttgtttaatattgacatcggatttttttgataccataaagccgagactttatacaatgatacaagaaccctaattaaaatataacttgatagttgatacgtctaaaaaacaaaaaaaaattcgtcccaaaaaggttgaaacgtctcaattttaagttaaaacaaatgcgattattatcccatgtgtcaaggaaatgacttgtccgaacaaaactanaaacaaagaatcataatctacttttcaaagacaacaccatataatatgaac

SEQ ID NO: 29888 - DNA, 940 bp, Arabidopsis thaliana landsberg
atctttttttttcctttcttatatcaattcttgcctgctttttgttttctagagatatgtagctccatatatgtctgtctaaatcaattaaaatagtgttgtactggctgatattattaaaaagtctagccatatagtcatgaggttcaatctgcaaaaaaccacacagaacaatcaatcagcgatgatctttatgaattggaataggattgttggatcaatataaactatattacctgagtcacgtatgggttgaatgttaatccaagagaagtaacaaactcctcggaaacatgaggccagtcaatattcgaatatgcggaaatatgggcgttgtagctcccaacagcacctgcaaatttccccttaatcttagtttctgaaagatatctcctttcttcgcttaacctcacagcaaaattcgccatttttttccccaaagttgttggcgtagctggctgcattacaattcatagtaaacaaaatcattagtaaagagatagatacagataaatagggaaaggtaaaatggtgaaggtcttctctttggacattacctgcccatgagttcgtgaaagcatggggacataagcaaagttcttagctatcagagagattgacttgatcagctcatccatggtaggaagtataaccgaactaagtgcttcttgaagcatcaaagcatgggaaagattgttgatgtcctcagacgtgcaagcgaaatggaaaaactcaagaacctaactcagtaaaaagacatccaaaattttagttacagggcatcaaagcatccaaaccctaagaacttataagtgagagaaaagaacctaaaccttagcaatctctggttgtgattcacacttttgtttcaagaaatactccactgctttcacatcatgatttgttactctctcaatcttcttaatttccaatgcatcgt

SEQ ID NO: 29889 - DNA, 1612 bp, Arabidopsis thaliana landsberg
atggtttgagaatcattgcccacacacaacttatataattcatgacgcttaagatcaaaacgaggctctagattaattgaaactcaaaaaagaaacataacacaacgatcaataaactgattcttgttttcccattggatttgggaaaagaaaatcataatacaacaagcagaatcatctacaccaatatgatcatattattaatgtcccaagtgcacagcatcatccacggctagtgccaatgcagcagcagcgccaacatatgtgtgtggagttagcttcaaaagttggtcttttgcttcttcaggcaattccaaacttttaataaactttctaatgctttcttcattcacagctcttcctcttgttagctccttcagcttctcatacggctctggaacaccatatctcctcatcacctgttttttttattccttcagttaccaatgtacatggaataataacttgatcattataataagactagaaagtttcgagaaatttacagtttgtatcggttcagcgaggacttcccaagtatgatccaaatcgtcttttaaccgagcttcattaacctatatcaagaacatccttagtctatgacaagtgaagacctttctttcttagggcaacggaaataataatacctgaagcttcccaattccctgtatcgcgctcttgtatgccagaagagagtgtcctaaagctccacccatgtttctcaagacagttgaatctgttaaatcacgctgcagatatgtacatttcaatttcaggcttacttacttcttcaccattactgttagcagaatctagtggagtatgaaaaaaatgctcaaacctgcattcgtgaaatgggaagcttcatgctgagaaaagcaagctctgcatttgctttacctagattcccttcgctgttctcaaagtcaataggattcactttgtgaggcattgtcgatgatccgatttcacccgctttagttatctgcatcaaaatttcaaacaatgagacagattttcccattccttttcaaatgactcggacatacttttgttaatacttgcctgcttaaagtaacctagagatatgtaactccatatatctctgtcaaaatcaatcaagacattgttgaattggctaattgtattaaaaagtctagccatatagtcatgtggttcaatctgcaaaaaccaccagtgaggaactttacaaatcattccaccaggaaaattttgatcaagagaaactatatatatacctgagtcacgtatgggttaaatgttaatccaagagaagtaacaaactcctctgcaacatgaggccactcgatattagagtatgcggaaatatgcgcgttgtagttcccaacagcacccgcaaatttccccttaatcttagtttctgaaagatatctcctttcttcacttaacctcacagcaaaaatcgccatttctttccccaaagttgtaggtgaagctggctgcattataattcatgaccattgcttcaacaaagataaagatagaactgaaaataatacttctctttggacattacctgcccatgagttcgtgaaagcataggtacatatgcaaagctcttagccatcag

SEQ ID NO: 29890 - DNA, 2420 bp, Arabidopsis thaliana landsberg
  unsure (1)..(2420): unsure at all n locations
gatataaacaaatcagtatcaaatatagcagtgcaaatacatttacagaagcctagagcattaagagcgagattaaaagctttaccgttccatcacaagttgggcagtcttttgatggcaatggagcactatggttgaaggaggagggaagatgaactaactcagctcgattctcaactatagcatctgcgacacaatctgctgttggtttctctccactacaagtaaagacagaaaggataaatctttaaatccttttatctgttagaatatcactaggatagcttaagcattgccaaatggaactgtcgacattaatatacagagaacacaaagagaccgtcagaataaagtggatctattcatgaagcctagtagtttaagcgatatagcttgggttaaacaagagataatcccaccttctcaagttgtaatctttgatttggtaatgaacactccctgttcctttgcacatagnnnnnnnnnnnnnnnnncacccattacaagttttgcaatccctgaccaacaaaaaatgttttcatctcatcggatgaactcaaacagtagaaccaaaaacatagcgaggaagtgtgagaactgaggtttctcaaaaattctctgacccagaataaagcatcaaatcttgaagctgacctttggcatatgactttctttcccaaatccaatgcaatgtcataagttccaagcgtagcaaccgcctgcaatcaatggaactccaatgataaaaagattccatatagaacaagtaaaacatgcattttccagtttcctaaactgattttgatcttacaaaacttcgacttagaaatcaagttgacaaactcagacagaaattcagcacaatataggcacactcaaattaaagctcaaaactttagcaaacattcgaagcgtaatttccccggaaacatcagctaccaaaaacccagaaagaaaatgatagtttcaagctagaaactcagcaaaaaccaacaaaagtttcaacctttaagacaactacatgtcaagttctaaacccagaaccatataagtttcaggagaaaccaactcacaaaaacagagagatacgaaattttggagatgaactcagggatgccaaaaccacgaggtgcagagccagcgatatcaaaggcgagagtgaaaggagacaagacgagcttgattggaaaatcgagaatgtctataacttgttgtccataacgagtagagaattgtttgaattgagcatcagcgaactgtgtcacgttctgtattaaacgacctggtcctctcgacattggagaagatgaagaagataagagcttttctcgctctctggtatttttgaagaggaggtttcaagagtggtttttacactattcttatctcggttttggattagacttattctttgttaccaaacatgtaccttctaattagactacgtgtcgtttctttgtaagaaaaacgacaaggagtttaatttgagaaatccccaaatcgagcgtcttttctatatttgcggcgatgacggcgaagatacggcggaggaagcgccgtggtatagaaaaaaaatattgaaatttgctatgaaagttttttttttttttatgtttgttctaactctaaagcaagaaacatgctgtacttaaaaatgcaaactttacgaaactttggacctttagattaaataaaaattaagggaaattgtaaaaaggaatcatattctgggaaagcagccaaaggaaagctcgccagataaacctgcgtttcattcccctacaaagctctaatctttcaatctctatacctctttctctatctctgagaatctatggcggtggctgcagcggcgatgatcgggttgccacaggcgtatctggaagggaaggaggtgaaggagacgagttcgttggttactgaactctgccgtcacttttatactcaaggttgggtgtctggcactggcggtagcataacgatgaaagttcatgatgcttcgattcctaaaccggagcaacttatcgtcatgtctccttcaggttctctacatcttaaagtcactttctttctccttgattctcattttgatgcatctttgaactgatgtatgtgtcgttgctctgttgagttgatgtgtttgttctcgtggacctttaatttgctatatgagctatgcgtaatgcgtttatcagttaaagtttctgtttctagagatcatctttgtgtatttaaaatcactggtaacactctttttgtggagaattggtttggtctttcaatgcttagaagcgttctctttgtgtatttgaatcattagcgacttaacaatgcaagatgttgaatggaaaggaaaatcttgcaatgctgattctaagtgttattttatttgcttcacggtttactgattcttggtgtgt

SEQ ID NO: 29891 - DNA, 1622 bp, Arabidopsis thaliana landsberg
attaattgtccgtcggttcaggcgccaccgccggtgagatcgtcgtcggagagaggcggagagatgatggaatgtgtggcggcagaagctaaacctaaagtcacggaagtggaaacggtgagtggggcctacttttgtttggtaatattgtgataattggggatatccatcattactttttcatttttgctttttttggctctctttttcttcatctttttggctccctcttttttttaattctctcctgtgtccacactaatgcatgtagcaggaagcaaagcctctgcttaaggaagatagaagtgatccggcgattcatgattctcaggagaagaagagacctagaatggttgctgaagctgaacaccataagtttgagaggaattgtgaactcaaactcgacttggataaatctgatcatgtgggtttagtaaacaagcatcatgttcagaaaccgccaccgcaacagcaactatctgttcctgataaaactggtaggcctttttcatctttcttgagattcattcttcttactctgactggactagtttcgttttttgtatactgaattaactgggcctctttttaaaaaattccagctcaagctagccatttgcctctgcatatgtctatgcctggctggcctgggggccttcctacaatggggtatgttttctttgtaatttaagcatgtgatacttttcctaagtctcctttttattttttggttgaactaatgtaaaactctgtgattaaacagatacatggcacctacacaaggagttgtgcctacggataccagttccttatcagctgcagcaatgcaggtaattttgattggatgtgccattctaatatttctctttatatttttttgcctttactgatttaaattttggtcttgtgcagcctccacctcatttactttttaatcaaccaaggccgaagcgatgtgctacacactgctacattgctcggaatattcaatctcatcagcaattcacaaagatgaatcctttctggcctgcagcagcaggctcagctccaatgtatgggaccaaggcctgcaatctcagtcttatgcctcccacagaacttcaggggagtgttttgggaagaagttccaaccctgttcaagataagaattctcaatctacgtccaaaagctcagagacagctcaaagaaatcaattaatgcttcaacaagctttgcctccaggagcagctaatagcatcttggttagtttttttagtccatgtatcatgtttctcatcaggttttgtcgtccttcttataagctgattgtttttttactttcattgtagcatggtccgacattcatattccccttgggccaacagcctcacgctgccgctacaatagctgccgcatctgtcagacctcctaatagtggcgtcacatcttctggatcaacagctacttctacctccatgaatggttctgcatcagctactccagctggtgccccaacaatgagcttcagttatcctgccatgccggtgaaatgcaacgcagtacctggccattttgcaaaatagaagctatccatttccagttccagcacatgttggtgcacaacctgcttatataggtgctc

SEQ ID NO: 29892 - DNA, 1277 bp, Arabidopsis thaliana landsberg
cacatgttcatcagattcaccatccacttctttttcttcttcttcttctccaatttctatgtggttctcctctctaaactctgattctgatgctttgattgattttggttctcttggagggcgtccgtttctttgctttattttttgttccgatttccttctgtaccgtgaccgctgtgtatagttatggaaaggatattcaccctacaagtggaaaaaagcagtgccaatgaagcaaaaatgtaacaaacttgaagtctctgataaccaaagaaacgatgcaaagaccctcacctcaaattcttttaaaatttcgttgaaatccgtaatgtgatagtcaatctcatctgaagtaaagctattcttgatcccaagaacatcaacagggaggaggtaagaatatttccgtagcgtacactctcttcgaggatcaaatctcctgtgaagatacaaagcttttaattgtaaatgatttaagtatgagcttgcaacctatcaaatgctagaatcatattgcaccaagctcaggacatgataaaagttctcactgacctatttgacggtaaaacactgaaaactctaatattctcaggaaggtgtttgctaatgcatttagcaagaacagtgccttgaggatcatccttccacgctgtctcagggatctccattttcagcgatattgacgttgccaaagaatgaacctataaaacaacttatcaataaacaacaatccaagacatacacaatgcatcagaagacaatcattacttatggaacagagcaagaaaaaaaaagcttactcctttatcagttcgactacttctagcccaaccaatcttatgaagatcaccatagttactatctctaatcccacctgccttgtatatagcaacttccaactcaccctcaatagctacaaattcaaggtgtacataaaaacatgatcttacagggatgtacaagcgaaagaagaaattgcaggaaccaacagaagaattggggtttagggtttatgctaagattcattgtagaaagtaaaaatccaaactttacgacttgaaacttacttttgatagaagggtcgtctctttgaatctgtaagcctgaaaatggagaacaaagtcacaaactttatacagaagaatgcttcaattcataattaaaaccaatcaggaactaaacattcttacctctgtaatcagtaccaacgtatccaattcgaatgacgaccttcttcttccgatatgattcccatttatcggcgagaaagtgtgtcg

SEQ ID NO: 29893 - DNA, 3782 bp, Arabidopsis thaliana landsberg
  unsure (1)..(3782): unsure at all n locations
cgtaatatatagtttgatcatttatgcgcagctggtggtatcattgacgcaagaagctgtgttaagagaagctgtgactattaagccatccttcggcgccaagctatgaagccataggattttgatagtgagagaattgctgcatctgttactcctcacggtcacattccaaagagtcgtcacttatactacatttgcatatgtttttcgatccacaattattattttcccctctaaaagggtctacacatatgtttgtttgtaaccacgctaaagtttcaacagcaatgaaaaagcaaacagtggttcattttacaggttaacgacgtcgttttggatacaccctcttttaacgttattatcattttannnnnnnnnnnnnnnnnnnnnnnnnnnnnnnnnnnnncaattttgaaaaaaccctccatagtatctcttctacagaaccttgagttttcggagaacctcgaatctcaatggaatcaatggcttcagatcccgaacttgacatggatgaaggagatctggagaaattggagtcagatgtgaagcagatggcaagaagatctccgagtacaggcaaaccctaccggatcatctcaggaacactcttgattctgcgctatcttcccacatacccgttttccccaacatcgattccgggtcggatcgtcttccgtcgtcatgcctcactatcgcaggcaggttccttctttgttccttttttttttggtttttgcgaaatcactttttggttagagaaattataagcaggtctaaatttagggcttattcctggaaattatgtgtcttttctcttcgtgagaattggtgatgaatcaactacactcactagaacttgtcaaggttaaagctaaaagctagagtcttttttgtagttttgaagatcttgtcaagtattcacagtatcgtagagaaacataagcttgcagtgattcttttcttcttcctctcttatcagtatgatatatcaatcaatctgctgtgttttatatttaatgcagaaaataggcgcataataatgttgtagttcataagagactttgcttgagaagagttcatagtattgtagagatacacaagagcctgcactgatctttgtcatcttcccctcatatcagtttgctgtattaaccaatcttcggtgtttttcttttaaatgcagaagcacaggtacctggtgtgttggaagagcaagactctgaagagaaatggattcagctcaaggaaagaatgtcgaggaacgctgcgaatatacctaaagttgtaaagagaatgcgagaatgtatagagagtatcgacaaactcgattctttggaagttaccattcacccggcattcaaaaggcaaagaattaactgactatttctccttcatgcttaggctctccatagtattttcttaggaaagatatgtgtgctgatttgtgaatatgtaattctagattgatctggcatgtacattggtgtcgtttgattcaaaacattcacaacatgatatttgattgtgcaagtactagggaagagattaagacttgttactggaaacaaagtcaaagtaaagggttaaaccatagttgttgatcacaaaagtagattgacaaacatttctagctaacatgttcatgtagcagtgtcagatggttctttaccagatggctctccctttggtccaaagatgaattgcttcacagaatcttgtgctgctaatatcttccttttgatctgcaaatacacccaaaaaaaaataccattaagacctaaatggctgagaaaacgcacccaatgttcaataactaacatgaacagatgtaacataacccaccaataactaaacctgaatcataacacaaacaatcgatcgatcaagcaattagttccacattcgtattaccaaaacttcactagaagaagtatcatagaggaagataaatactaagaagaatcaccctaaatcgatcttctgattccaaattttgtcaaaaactaatcagaaacgagtttcattatccagattttcatggaaactaaataatcaaattcgcagaaaggagaaaatgggggaactaacgggatcaagaacgttgggttcgggaccgtaatcgccggttaagagaaagtaggaagcaacagcagtcgccaccatcgtcgttcttctcaccactttatcggtttgaggattcattatttcgtctcagcaaaaatgcagcagccaaagcaagcaagcaagagaataatacaacattcatctcctagtaagtgtataaatgttgatagtttcggtgccgtttttaagttttactcagagactgcaatacatgctttcttcagttaaacgacacagcgtacgacttagttaagcataaacgacaccacaatgcatagtccaccgcttcaggccgtttgtaactatccgagtaaaaccgcttcgtgcctgatactgatttaaagtatccggcccatttctatcaattttcctctttagtttgggcccatctaaaagcacctgaaaggctgaaactgctccccgccttttaatattcaatactgagactgaattatagtatccgctatcaattttcctctttagtttaggcccatctaaaagcacctgaaactgcttgccgttttaatcttcaatactgagactgcattacgtttttttttctagcccattacgtgtcacggtgtgcgtatcttttgataatgtctcaatcaaaacctttggattatcttttgaacgtaaacacacaacatctttttaacataaacgttaaccgcaacaattttgtgatatcaacactggttgattttaccaaaaaaaaaaatatatataattgtagaatcctttattatagaaaaagttgttggtttggatctagacatctagtttttaaattgtgtagttacactacttaaaaatatattaacaacaagtccaaaaatctaaatgtaaattcgattttactgaaaaaaattatttttaatgagaaaaataagcaaattgtaatataacaattttcatctatttacttttctttggttgattattgtcatctattttaatgtttcttttttattgcctcaaacaaattagccaacagagtttatttcactagaccgaattaatgcaaatcagagaaaaccataataataataaaaatccgagtctgatccgtaacctaagcactaacgtaaccaaaacggacgcacaagaccggatttaagatcagatttgtggggcagaatcctaacggagaaattgacaatcccgtttcttcgaccatgttcgtcccacaatctgtaactcaaacagtgcataaatccctccggtgcatattctcccgtaaaatcctttaccggcacacgtgccgttcccacgcgcttatccttccctgaactccgacataaaacctggacgtacatcacgcttgtcgctttttcctccgacgaaaactccgtctctagctcatcctcccacatcggacaattcccaccggccacgtcgacacttgtcctcattggctgtttccaatagttcccggccatgtcgaagacaacgaaggcgttcttattcactggttttctaccgtcgaccagattttccgccgatacggccgtgatttggatcttacgactcattacttagtgctgatcaaacagagagagaatgctttcaagatataaagaatgtgcttccttttttcttttcacgagaggaacttgtatatgtatatgtattagggtaacattttgaaaggc

SEQ ID NO: 29894 - DNA, 3680 bp, Arabidopsis thaliana landsberg
tcttctcttctttttttatttggctacttattggtgttgagtggtgataaatttggtctctttggtgctgaatgatttagttagaatggtgtaaagatttaatctttatgtctttggtttctttcaggtaaaaagatttggggattttcgaggttcactagtgactgtgcatcaggttatggaagatttcttgctggaacgaattcggataggaaagatgatattcatgagtcatgttctcagatgatgtttcagttacacaatgtttatgatgcagagaaggtagagaaactcacttttattcatgtagatttaaaaagaaacagcttttttggttaatgagattataaagagttttgtttgctttgataataatgcagataaatgtcagaatcaaaattgtttttgcttcacttgatggagttattgctgctgaagctaagaaatccaactcaaactgggtgattttagacaggtaaatactatgcagatatacacgtgtgtgtgtgtgtgttttgaaaatgcatagtttagtgattcttgaccttttgataattttaaaacaggggactgaagtatgagaagaaatgctgtattgagcaattggagtgcaatcttgtagtaatcaagaagtcacagccaaaggttcttcgtctcaatttggtgaaaaatgcagatacagagcatccagaagctatatcaaggttagcttcaaagtctgtcgagtctcggagaagctcaagaactggaaaaaagttgagggaaccgtttgtgactacagctacgcttccagaccaagaagtttctttacatactgatatagggtctgtatgaatatctagctctgatgctggagcctcaccgtttttagcttctcgagtctttgagggtctcaagaaagagaatttgtgggtcaatgatggaagcaagagtttctttgaatccgattctgactcggatggtgaaaagtggagtcctttatcaatggcatcctcatcttctcatcctgtgacaacagctgatcttctgagtcctagtggggatttatcgaaagctcataccgaaactccgagaaaatcaagatttgcggttcttaggctcgctttatcgaggaaagaacctgaagcaggaaaggaaatacgtaaacctgattcatgcttaaacaaaagcgtgagggaagtggtttctttatctagaaagccagctcctggaccgcctccactatgtactatatgtcaacacaaggcacctaaatttggaaaccctccaagatggttcacttacagcgaactggagaccgcaacaaaaggtttttctaaagggagtttcttggctgaatgtggttttggttcggtcacctaggaactttaccagatggtcaaattattgctgtcaaacaatataaaattgctagtacacaaggagaccgagaattctgctctgaagttgaagtcttgagctgtgcacagcatcgaaatgttgttatgcttattgggctatgtgttgaggatgggaaaagattgcttgtttatgagtatatctgcaatggatcattgcattctcatctttatggtaaagtttctactaatggtatacaaagaagaacattcttgttttttgttgaaaaaatgttatagatataaaagtttccataggtatggggagagagccattgggatggtcagcacgacaaaagattgcggtaggagcagctcgtgggttgagataccttcatgaagaatgcagagtcggttgcatcgtgcatagggatatgcgtcctaacaatattctcctcactcatgattttgagcctttggtaaaaagaatgttaaatctttgctcaagctctctctctgtctttccggtttgtgctaagcttgaaacttttgaacattctaggttggagatttcggactagcgagatggcaaccagaaggagataaaggagtggaaacccgagtgattggaactttcgggtaatcttacgccatgatcttgagagatatattcttcttgatttacatgtagaacacaataaccaatttctgtttaacttcaggtacttggcacctgaatacgcacaaagcggacagattacagagaaagcagatgtttactcatttggggtagtcttagttgagcttatcacaggaagaaaagctatggacataaaacgtcctaaaggtcaacaatgtctcaccgaatgggtaaaaccaaaaccaactacagtataacaaagttttagtctttaaagctctgaatgctttactaagaagaaacatttttctgcaggcaagaccattgttgcagaaacaagccattaacgaacttcttgatccgcgtctaatgaattgctactgtgagcaagaagtttattgtatggcactatgtgcttacctctgcattcgccgtgaccctaactcaaggccacgaatgtctcaggtttgctcacatctcaaaaacacttacaagttaataacttacaatcgaaattttctgagtgttaatatttctttttgtctatggaatctgtgtcttctcattgaaggtgttgcggatgttagaaggagacgttgtcatgaatccaatatagaagaagcttcacaaggaaaattcttcttagggagtttgtacactatttagggttactattacagctttttaaatgagttttgcttttgtatatgtaaaaatttgttaatgagacaaagattcaactaaagtttgttgagatttttacatttcatagattcatggccggttaaagtctgaataattgaggttattggttgaaccgattggttgactggtcaaaattcaaacctttcagcggggcaagagggtttcagactgcattttgccccatccaccaaaaaatcttagaaaatatactatactatagagatgtcatgtctgttattttacaaatatatccctatctttgaaagaaatagaattggtaaacgcaagagctgatgggtctggttaatgggccagtttgagaaaaccagttcgtaattagggtttatatcaattctcaaatgacgaattggtgagagtgggacttgttcgaatgtgaagagacgttacaagggtatgcatgcctcagctttgatacaaagctgggaaaagtcaaaagcttaagagagttgatacgcaacacaacggtcacgtctttattccaacaacacacacatctcttagcataaaacacatattttccccaatttttctgccatatatatgattttagaccataataatttcatcaaaagttacagtttgacccacagctacagttgtcgcactccttgttgtagttcttctcgcaactataccacacacaaattaatcaaacaaacaaaaaaattagtaattaatatgatgagattaaagattagtcaaccacatgcatctgattctgatcagcatatatgcagaacaggccaaaatgtttttgtgtctactcactaacacaattgtaaacgtaagtcataagaagagtttattgaattttgtaccatgaagccattaaaggtaaagacaagagagaggatcaagggggttacctgcaagagtcaccacatttgcaggaggagccacatccacaattagaatcatcctggttagaatcagtcccatttctcttacttgtctttgattgattaacttctgtagtt

SEQ ID NO: 29895 - DNA, 1745 bp, Arabidopsis thaliana landsberg
agatgagttatacacgcctgttcagatgttggaagtgggtgactcaagtatggtagttgactagttgtgttagattattaattaagaacttgtaccaaaagaaccttttcctgatagaaaaccaaatccaaaactgaatacaaaaatatcaaaaccttatatctcatgtgtaacagctaactgttttaaaagaaaaatataacacactttggctgctgtaccacctaacacacagcgaagagagatgcatttccagaaaaagaaagatttaaaataaggaaaccattaggaacttgaattaagaagagttagttgctgatagaccatgtcttacaatatgcaattgaccagaccagagactgctaagttttttcaaagatgaatattataaaaaaaaacggctgcaaacactacggacgaagaacccgttacctcctctcaaatggcgctcactatacatttcttcctccgtttggttgcccaaagcttttcttttgcggtttatcatgtctcagtctgcactctgaaggttttatttgcacccatgagagtgccttccatccccagccacaactaaagagtccagagtgttaaaatctcaggatccatttacagtcatttcaggtgatgattttggagctactaccagagattcttccccatttagctttccattgtctgatgtttcatgttcagaactcgatactccatcatccttatgattctcatcatctgaactgctgctattattctcttcactactttttgaatcctcagctcctttcgctactattgaccgggctgctgatccagcggtgcctggacttttcttacccgtaagcactgcatggctcagtgtcgaacatagcacagcaaatacattttcccttttcgaacttttccccagccgtggtttcttggacggctcttgttctctttctacaagagcggattttcgtttcagcctcaggagctcgccttcctcatcctcagaggcttctggctgtttccgcggaggaggtttatagtcttcatcatcttcatcgtcctcataatcaaccaagcctccagacctcggactatagaagcaataaatccattaaaacatagatgttgcattatatacatttcacaaatttccatacatacatttcacaaactactataccttgaagaagtagggcttgcagccactccattggagagatgaggcttaggttgttctttctgtatattagaagcaggtttttccttttgtgtattagaagcagaggctgaatcttcttcatcgctgtcagtatttaaaaaagtgagaaaaggtgaagagtaaagaatatacaataaaaatcattgttttaacacccagtggtaaacctgtcttcattgaaataatcttcttcctctttctccaatgcccgctcgtcaactcttcttcttggatcaaccgcatcagcagtgctttttggtccggcactttctaaacactgtggacacattgttacaaaaagatacagacagaattttcctaagtataattcaagacccagaaacagtacctgttcatacttaaccttgaaagcctggatggaggtcaagcactgaaatggggccaactggtcccagaacgtatcaactatgtatttgagcaacagagttgcatttccctacacaaaaagaataaacgataagtaaatacaattaacacccccaacttaataaatcaaaggggaaaaaggtggaaaaca

SEQ ID NO: 29896 - DNA, 1679 bp, Arabidopsis thaliana landsberg
  unsure (1)..(1679): unsure at all n locations
ttgatatacgtatttattgttatttagtcatacgtatgaacgtaacacgttacaacaatatatatctctactacatagtattatcttctgtttttatattaccaacatatttttgcttaaaatcattgcctaacatatgttcttttttatatggattggtttgttatacatgatattatgtcaaattagtaatattattactgaaaataccaatttacaaacggattgattgatttgtgttatttcaaatgtaaatttgttaacaatttgttatataaaaaaactgccaaattattttgtttgtgaataatgattttagggtcgggttcggacatttaagaataaggcttcactcggactcggacatggctgtcccctgacacttacgtgataccaactgatactttctaacatattatctatcttatataatgtttattgggggaatactgtatcactttcttataactctagagataaaacattacgaaaaatctctactagttcttcaaaaaaaattcggagcgagaacatggatggaccaagtcatgaaccatgactattaattaagtcttcattgaaaaatctacatcaaagttttaaataaataatatcaagcttaaaatgaaccaccttccattatgtgacgatgatgtggtccaacaaaagaaatataccaatctcagagaccagtttagtcccaaatctaccccttatcacttttttatagatcatttccattaatttcacaccaatcaaaatggtgtatgcgnnnnnnnnnnnnnnnnnnncctccgagggagaaagcctcctcaagatccgcattgagaggatgcataagaagctgaaggaaccaccacggttgctcagttcggccgccgggaaacctacttgctccatcttccgggtacctcagagcatgattgattgtaatggaagatgctatgagccacgagtggtctcgattggaccgtaccaccgtggccaaacacaactcaaaatgattgaagaacacaaatggcgttacctaaacgttctgctcactagaacccaaaacctaactctagaggattacatgaagagcgtgaagaacgttgaggaagtggcgagagaatgttactccgagacaatccacatggactcggaagagttcaacgagatgatggttcttgacggttgctttctccttgagctgtttcgcaaagtgaacaatcttgttcctttcgaaccaaacgatccacttgtggccatggcttgggttcttcctttcttctacagagattttctctgtcttgagaatcaaatccctttcttcgttctagaaactttgttcaatctcacaagaggagacaacgaaaacgagacaaacgcttctttacaatctctagcgtttgcgtttttcaacaacatgatgcacagaacagaggaagatctcgccaggttcaaagagctaagagccaaacacctcctcgacctcctccggtcaagtttcatcccggagagtgagcttcacaccccgccggcaatgaatccagggaaggaaaagatgccgtcccacattatccacagcatttcgaagctccggcgagccgggatcaaactccgagagctgaaagacgcagagagcttcttagtggtgagattcagacacggaaccatcgagatgccggcgatcaccg

SEQ ID NO: 29897 - DNA, 2089 bp, Arabidopsis thaliana landsberg
  unsure (1)..(2089): unsure at all n locations
aacagaagcatgaagagtgggcaaggtgtcgttctgattttgacaaagtctgggctgagatatatgctaagaattactacaagtcgcttgatcatcgaagtttctacttcaaacagcaggattcaaagaagctgagcatgaaaggtttgtccgtaacctattacacacattattctattatatcaagcaagtgactttatgtactatattttttctgtagcattgttggcagagataaaagagattactgaaaagaagcgagaggatgattcacttcttgcatttgcagccggaaatagactatccatttccccagatttggagtttgattatccggatcatgaccttcatgaagatctttaccagctgatcaaatattcgtgtgcagaaatgtgctctaccgaacagttagataaggtaatgaagatttggacaactttcgtggaacaaatatttggtgttccttctcgcccnnnnnnnnnnnnnnnnnnngaagacgttgtcaagtccatgaaccagaatgtaaagagcggtagttcaagtgctggcgagagtgagggaagtcctcacaattatgctagtgttgccgactctagacgctcaaagtcatctcgaaaagctaatgaacatagtcagttggggcaaactagtaattcggagagggatggcgccgctggtaggacatcagatgccttatgtgagactgctcagcatgagaaaatgctgaagaatgtagttacgtctgatgaaaagcctgaaagcaagcaagctgtttctattgagcgtgcacacgattcaactgctctcgctgtggatggattattagatcaaagtaatggaggaagcagtatagtacacatgaccggtaacacctcaaaatcttgcttagaagttagttctcttggaatttttcattttctttgtacagttaatgaatagtttcctctttacttggtcaggacattgcaataataatctgaagcctgtgacctgtggaacagagttggagttgaaaatgaatgatggtaatgggccaaaattagaggtatagtttcagtgaagcacgttttagtcccatcatcttatattttgatctgatactttctatatagatgactcatttcaaatgaaggaccgaattttgttgatatggaacaatatctcccattgtttgcacttggtgcttaggtccttcatatggaacttagatagttttaaaatttgaagttacacacccttagttctgtgttaaccaagaggtggtactgataaactttgtctcacaggttggtaacaagaagttattgacaaatgggatcgcggtagaaataacaagtgaccaagagatggcaggaacatccaaagttgaaagagaagaaggtgaactttctccaaatggagactttgaggaagataattttgcagtttatgcaaaaactgattttgagaccttcagcaaagcgaatgatagtactggaaataacattagcggagatagaagtagagaaggggaaccatcttgtctggagacaagggctgagaatgacgctgaaggtgacgaaaacgccgcaagatcatcagaggacagcagaaatgaatatgagaacggtgatgtttctggaacagaatctggtggtggtgaagatccggaggatgatttggataacaataacaaaggagaaagcgaaggtgaggctgaatgtatggctgatgcacatgatgctgaagaaaatgggtctgccttacccgtttcagcacgattcttgctgcatgtaaagcccttagtaaagtatgttccttcagctatagctttgcatgacaaggacaaagactctctgaagaactcccaagttttctatggaaatgattcgttttacgtgcttttcaggctgcaccgggtaagagctaaagatcatatacagtttgaaaaaattataaacagtataatctaaagtacaaagagttttcactagctaactttacgctattactcttgacagatattgtatgagagaatactatcagcaaaagttaactcatcatccccggaaggaaagtggaggacctcaaataccaaaaatcctactga

SEQ ID NO: 29898 - DNA, 1845 bp, Arabidopsis thaliana landsberg
aagaagtaagcgaatgaattgattacgaagtagaagaagagaagtgataaaaacctatgagaattatcgtctctgtgtgttgatggagattatactatgacgcaattgaatcaaaagagagtaagaactgaggaaaaaaaaaaaaagagagtaagaatcgtcgtcgtcattatctttttccaagtttatatactcgcggcacgtgtgcaagcaacgccgctgagattgtgtttttgtttttttttaaatatgacaaattcttaacataattcgttttttttagttcccttaaatttcgttctacaaatcttcagcataaaatacgaataagaccgagaatattatatccctctccttaattaatatttcgtatagatttctctatttagggtttttattggataactattattcgaagcaggtacgtttaaataacaagtcatgcaagaaagcaagcgcctggctcttgtagcacgtttggtctgcgatggcactgcaaagtgcaacgtgtgactggttcgatgctcgagccaggcatcaacagagagagagagagaagagcaagcaacaccaaacaacaaaaacaataagtcgataaatataaatcatttgaggtattcttaaatatctcttttttgtgttttagccgacaaaacgaatgcaaatcattccttttcagcacagttataattttaaatgacattattttatgaagataaaaaacaatgacattttaatgtttactccataaaatatttttctctttttatctttattgttattgtggtaacaaatatagtttttatttagtagtagtaacacaaacagaggtgatgtgaaaaaatattacaaagcaactctgttccggcaaagatagttcagtcttgttgctctattcgttagctgcttcctctgagatggaggtgatatctgacaaaatgtctgcgtcattgtcttcttctatcgttaggctcgagacttcattgtcttcttctatcgttaggcttgagacttcgccatttaaagaagagacttcgtcttcacccgtgacagatggagctggtgaagcatcagtgctcgtgcatgtgctagtgcatgtcgtcgtcgtgctatgagttgatgatgagtctgaactcgaacttgaactctctgacgatgatgattgttgttgaaggctccaatacattatacttgccgttaggattagtatcatcttttgattcacctgcaacaaaagacatttaaaaacatcagatttacattttgatgtatgttgttttcttgtttttttagatttgattccgttctttacctccacgatatcttttggcaacaagaaaaccgagcaaccaagctttcttgctacgctgacaatgtatgtagcattcaatctcttctcatcgtctgttacaaagtttccatagcgaaaaaataacgattaaacaaattcagtttgaacagagaagagaaagagagtgaagaggttgtgagtgtagttagagagagtaaggacctgattcacccttggtgacaagattccagttaacaactcttggctcaaccgcccatagaagatcgaggaagaataatccgctcgatagacttttatcctattgaagtttagcaagacagattttgttcaacataagcttgttcagttgaactttttttttttgagttttgataaaagtaaaagatggaaccttgaagctttcgatctgcgatttccgccccatgattctgactttcctgttagcccagcttatgatttctgagtcggtcatgtcttttcctcgagtccgagatcttagactcttgagaagttggagcatatgtgttctcatc

SEQ ID NO: 29899 - DNA, 2700 bp, Arabidopsis thaliana landsberg
gggcgtctttatctggtattgagcggattagaaaaaaacatcctgcaaagtgcaagtgtacatgagtccaatgcccttgagcaggcactagcagcccaatctgttttccagttaggttttctgatggttctaccaatggttatggaaattggcctagaaaaagggtttcgcacagccttgggtgatttcatcataatgcagctgcagcttgcctctgttttcttcacgtttcaactgggaacgaaagcgcattactttggaaggacgattttgcatggaggctctaagtaccgagcaactggtcgaggttttgttgttttccatgcgaagtttgcagaaaactatagactatattcgcgaagccattttgttaagggactggagttggtcatactactagttgtgtatcaagtttatggaacttcgtaccgtagctcaagtacttatatgtacatcacattttcaatgtggttcctggtgacttcttggttgtttgctccatttatattcaacccatctgggtttgagtggcaaaagacggtggacgattggactgactggaaacgttggatgggaaaccgcggtggcataggaattgttcttgacaaaagttgggaatcatggtgggatatagagcaagaacatctcaagcacacaaatttaagaggaagggttctagagatacttctcgctctgcgttttctcctttaccagtatggaattgtctaccacctcaacatcgctcgccgccacacaacatttctggtaaagtatttcggcatataagccatgatacttccctcttcgatagctttgaaaattttaacaactttgcccttttcttctctaaggtttatggactctcttgggctatcttgttgtcagttcttctcgtgctaaaggtaaggccctgaaactaatctgttttaagcttttacccacatcaaaaccagaaaagaatcttcagccaactctattagatagtctttgaggttttaggaaaaggttttgtttgtctcttgacatttatgattgtgtcgtttaatcatttgacagatggtatcaatgggtagacggaagtttggtacagattttcaggttatgttcaggattctcaaggcacttctcttccttggtttcttgtcagtcatgactgtattatttgtcgtctgcggcctcacgatctcggatctctttgcctccatcctcgctttcttacctactggctgggctattcttcttgtaagcccacacaactttcttaactgcccataaataatctgttctttccatgagaaaaataagtttgtaatccgttgctatgttttgaagatcgggcaagcgctgcgtagcgtgttcaaaggattaggattctgggactcggtgaaagagctagggagagcttacgagtatataatggggcttgtgatattcacacccattgctgtcttatcgtggttcccatttgtgtctgagttccaaactagattactgtttaatcaagccttcagtcgcggtctgcagatctctatgattctcgccggaaagaaagacaaagagacaccttccaccaagtagtgaggctcaaaccgctctcttcttcttcttcttcttgtccaatttttctttcatctccattctttttcatctgttattactgtttactagatatgtctttgagaaaatagaaaaaatgtttagaccacctgagactgagagaagacctcatactcatagtaaatgttgttcttcagcctaggccatacggaagagtcctttggacttgaacatgatacaaatacctttaaccattattacctttggagttgaacatgatacaaatacctttaaccattattaatctgtctatgtaacataagatgtgtcactctattcttctttttttcgttgtctcttttatatgattaaacaatgtattgaggtcagtggaaattacacttcgatccttgtcactgttctaaaacatcttaaaaccaactattgaagaagatcactgagaaagtcagaaaatccatatagaccaaaggagctatttttggtatgtatgcattgcctctgttatctatttgcgaaaatctgaagattggtttctctaccgagtgttttatactttgatacttcatctaaagctctaggcttttcttattttccttgtttggattgtttgttttcgctctagggtacgccaaagaggacgctctctgaaaaaagaagaaggtaatcttcgattcaatgcagagagttttatcagacgcatgaaattagggttttagtgccacaattgggtatgttatacagatgaaaattggaaaaggtctggacttttctgaaattcataacgtttgagtcgtttagggaactgttatctaggctgtctaattccagatctagttccttacacattgattccaggaagtattgagcctctatgttttgattctagaggcttctgggtctaattcacagatgtagcaacgttcctgtattatgtctttgtactgttgatatttgcgagaccctcttctctgtgtggtttggttttgttcaaaaagaaaacattcaagtcttcttcttgatataatggttacaactggtgcttactagtatcgttttactttccctttgattcatgattctcttaattacagtggttcgtaacataatctgaacccgaggaca

SEQ ID NO: 29900 - DNA, 2679 bp, Arabidopsis thaliana landsberg
cttgttcttctctagacatatctgcattctcgccactagcattatcactagacatcatgttcttattcattgcagctcgctttccttcagaccttacaacttcttcaacaacaaaatgaagtaaggtagttttcgcatcaacactcttcacatcagacaattttcttaaagctgtcagattaaaagcctgagcatttcccctcgcggttccagcgttcattctattacctgctttcaagattgcttctagcagcttcatgaacagcccacgagcacggagctcgttgcacgcggattcaagtgttagtaaagatcccttttgttgagcaacctcagagccgtagttaatcttgaaaagcataacgttgaaccggttaaacgcggaaggaactgcttttaagatgtgaaacagtagagaatctgcataagccaatgtcatcggttcaccatcgaaatctatgatttctgtctgttcttctggcgttggagctattcctgcaagcttctcaagggtatcagactcagcatcatggccttctgttaacaagtcaatgatctcttctttagtcatccccaaagatttaagcacaattgctttgttctgagatttccgaggatcaaggatataagtctgattatgcggtacactgtttgagactgtctgattctgcggtacactgtttgattcacttggttttcgagcaacgtatccaaacaaagcctccatgagatcaccatcaaagctacccaagaaacaaatattataaccgcataagaactcaaaatcatacagtacttaagaatatcacattccacattatatagactttaatacttacttgaaggagccaccatcaatcttgtgccacaccatagaacggcttgcatcagggttcatcttatcccaatgtaaaggcttgagcttcggctgcgtcggatcctcagttttgcctacggccaatgaagtctcacctgactttgttggtccttttggattaccagggggtttaggtgggcccttcttcgacattggaggaggtggtggcggtccagctcctttcttacctggtggaggaggtggtggtggtgcagcaggtccttttttaggtggtggtgggggaggtggagccgcagcagatggtggaggtggtggtggtggtgaagtttggtttgctggaccaggcggtgctggtggagcatttgccgtggtgaattgacccggagtaagcggtgtcgatgctgacaatgccgcattaccgggcatgtattgacccggaggaagcgatacaggctgtgtggatgtcgaaaatggcgcattcaccgcagtgtattgacccggaggaagtggaacagacggtgaggatgtagacaattgcgcattcaccgccgggtattgacctggaggaagcggtgtcgatgaagaaaatggcgcatttcccgccatgtattgacccggaggaggcggtgttgatgaaggaaatgacgcatttcccgccatgtattgacccggaggaggctgtgttgatgaaggaaatgacgcatttcccgccgtgaattgacccggaggaagcggaagtggcggagaacggccaccaccactatggatctgcgacggagaagagggaaatgaaccgccgccaggagcttgaaatttggattgagattgttttccaccaccaccaccaccataatcactaccggcacttgtagcataggaagttcgcgacggcgaagcagcagatgcagaagaagaagaaggtcgtgacggagaagcagaagaagaagtatagtatcttcctcctcctcctcctcctcctccaccaccaccattattactctgatctctaatttcaccacctgacgatgacgcagattgagattttttcacatgaaacgaaaacgcctcttcgatagattcatctcctacttcatcatcaccatcatcgttatcgtcttgatctgctccagttcttctaaatccgtcaccggatttgtctcctcttcttctaggtttagggttttttctaattttcccgctattttccaactctagaagcttcttccagtaaatcacatctaatccttcatcatctacaataacagctttgagattcccgtcgattcttacaaaatcctccgggaagagaaatccccaaggagacggtggtggaggtaaatcggagccggagccgccgtatctctcatcttcttctctcttcccacctcgatctgagtgacgaccacggagtttttctttgatcttcctccgtgaactactaccgttcttacggaaaagaaacgacatcgcggcggttactttaccggagaatttatcggcgttgacggagataagagtcacgcggcgaaatcagaacgttctgatgtatttttgacaacgaagaagaaatgtgttgggaatgatttttgaaacatgacaaccattaatgatttaacacattaatgatttggtttttatgttttcctctcttattttttggtaaagcaacaaaaataaaaatgaagcttttcttacatgagatatggtccaatgtcaaaagcgtggctaatgttacgaaaacaacctccatttactcggcatttacacgtggaacgacaagggcttttttgtcattttttattaatccaaaacggtgaccaggttgtggaattttgggggta

SEQ ID NO: 29901 - DNA, 3508 bp, Arabidopsis thaliana landsberg
tttttaattatcaaaaagagttgtgctagtcatgatcgtttatctgatggattattattcacctctgcagcaaggactttgtgatgcatgttggaggctctgtttgggcaatggagtggtgtcccagagttcatgggaatccagatgctcaagctaaatgtgaggtgattaggtcatatttttttgtttcattactccgtagaaatgggaatcttaggttttcattgttgtgaactttactgttgcagtttctagctgtggctactcatccgcctgactcatacagtcacaagattggtattcctcttataggtcgaggcatcattcagatatggtgcattataaatgccacttgcaagaaagatagcggccaagtttcagataagggtaaaaaattgacaggaaagtctcgaaaacaaccatctggtgaaactactgaaacaacagaacctaagaagccgagaggcaggcccagaaagcatccagtagagacaacagagcctaagaaaccaagaggtagacctagaaagaagagtactgccgagttacctgttgagcttgatgatgacgttctgtacgttgaagctctgtctgttcggtatccagaaaattcagttgttcccgcaactcctcttcggatactacgagaaactccagtaacagaaactaaggtcaacaatgaaggttcaggacaagtgttgtcttcggacaatgcaaatatcaagcttccagtacggagaaagagacaaaaaaacaaaagtactgaagaaagttgcacacccatgatattagaatatagtgaagctgttggaaatgtaccgagcaaaccgtcctctggtatttctgaagacatagtagctcttccaagggttgtcttatgcctggcccacaatggaaaagttgtctgggatatgaaatggcgtccctcatatgcgggtgattctcttaataagcatagtatgggatatttagctgtcttgctggggaatggatctctggaagtgtaagctagttacttcttctcttctttttatcctaatgcattctgtgccctgcacgatttttcccttctgctttgatttctatcaccgtatgccatctgcaatgatgtagcacctttctagactgcatatactctgcaaaataatgaacgaccttatgcaggtgggatgttccaatgcctaaggcaacatcagctctatatttatcatcaaagaaagctgcgactgatccccgttttgtgaaactggctcccgttttcaaatgttcaaacttgaagtgtggcgacacaaagaggtcagtaaatttcttcaatatttccagtttttgcttgtttggtggaatgaaaaacaaagcagtccttctatgtttttaagagttgaatatataattgattttcagtttccttatgctttatctattggctttctcttgatatggtgctcctctatttttatacagtattcctttgacagttgaatggtcgactttagggaaccctgatttcttactggctggttgccacgatggcacggtaattagtaaattatttcactttcttcactgactctatcatatttttgtctctgttttcttgcatatgtgtaaatgtattcaggaacaagaattgcagtgcttaattgcgttgacccctttatttttgttatcttgcatcaggttgctctctggaagttttctacaaccaaatcttcagaaggtaagacctgatatgtttgtcctgatgccagatagtttcttttcacacggtggccagagaaagtgatttcatctgttgatttcatatttacctttcacgtttttttgtgcagatacaagacctttacttttcttcagcgcagatacagctcctattagggcagttgcatgggctcctggtgaaaggtagtgacgtaaaatcacacccataaaatcaaactgtgaagaggattcgcttattaatcaaaagtaatttctgaaaattttccagtgatcaggaaagtgcaaacatagtagcaactgctggacatgctggtctgaagttttgggacttacggtacacttcattaaccttatcagctattacataattttctttaaactttgatgctcatgcaattaattaacaagactgcactgtttattgttttatttggctctccatagcttcttgcttacttcctatgttttttctgcagtgatccgttccgtcctctgtgggatttgcacccagtaccaaggtttatttacagccttgattggttacaagatccaaggtatcaatcactgttctatcctcagttgattatacagtctttagatcaatggtttgaagtcctgcttaaacatgtggtttcaaatatctgtagctgcgttctattgtcctttgatgatggaacattaagaatcctaagcttggtgaaggttgcgtatgatgttcctgctactggaaggccttatcctaatacaaaacagcaagggttaagcgtttataactgttcaacttttcccatctggagtattcaagtatcaaggctaacaggtaaatgttctttatgggcttgtctttgtgttcaaattcgtaatcatcggttcatcataataaataagtcaaaatataacttctcaggcatagcagcgtattgcactgcagatgggtccattttccatttcgaggtttgcataaactgcacaattacttcacctcttatgttctttgtcaatttctttgagatttcatattgtcttgttgggattccttacagcttacgaccaaagcagtggaaaaagacacgagaaatcggactccacactatctctgtggacagttgacaatgaaagattccaccttcatagtgcatagtccagttccagacatcccgatcgtattgaagaaaccagttggtgagaccggtgaaaaacagagatgccttcgaagtctcttgaacgaatctcctagccgatatgcatctaacgtttcagatgttcagcctctaggtcagttgaaaccagtctaaattagactgtctaatagatcaatctccggaatcacttagtccttaccttgaactggtttacttgatctttttcagcttttgcacacgttgaggatccaggtttagagtctgaatccgaaggaacaaataacaaagcagcaaaatcaaaggctaaaaaaggaaagaacaacgcaagagcagaggaggacgagaacagcagagcactggtctgtgtcaaagaagatggcggagaagaagaaggaagaagaaaagcagctagcaacaatagcaatggaatgaaagcagaagagttcccgcctaaaatggtggcgatgcatcgtgtgcggtggaacatgaataaaggaagtgagagatggttatgttatggtggagccgccgggattgttcggtgtcaagagattgctccaacctcagattgccaacctcggagataacaattaagtcccttgtaaaaatacacaaatataacatcttcaagtgtttattccaaaaag

SEQ ID NO: 29902 - DNA, 2876 bp, Arabidopsis thaliana landsberg
tgcttattgttgtttcaggggttaattccgcgtgctaggatcttgctgacaattggagggactttcttcttgggcttttgggccattgatagtcttaactcttggcgctttctctgctctttaccttgtaagtatttgataagatcaaggagtgtacttttcttcattctagtccttgaatactaagaaagtggcaaatgtattttggagactgtaaagagatctgttagctcttccaaccaaccacctagttaagaccctcaactctgatccaacccaagtcctattcacatttatgcttatcagtattcttccacgttcttctcgcacgccgtagaaagtgttttggaatgagtttttaaggttcctttcttctatggatttgataaggtttcttaccataaactgatttttcttgttgaaatgctagtactttggagcagatttcattcatgatggaagtagaactccggtttcaccaccaccttacatcgatccatatgctctgttggaggatgagaggatatcagggatggatcctcgtctaaattagcagcaacaagttgttctttattgcataactagtgtagagcatatatttgctcttaagtatatatttttatttacagcctttccttttatttattttccttacggttgtaaaaagaatcgttgcttctctattgcttctctgttccaaaaatttcaatctttcaccactcaaataacaatttgacgtttctatttgtttagattttggacaatcgatttaaaccaaacccagcttaaattcagttcttggagatgaaaatattatcagaaacaaacgaactagaacaaatggctaccgccacaagcaagagatagaaatatggtttttgaaaacacaagtacgactcgtaagagtttcgagcctattcacacaaacacgagataatagaaatcccacataaaaccgacaaccttcttagtactcctctcctttatcattctcatcgcaaccaccttcagcaccaacttcttcgtagtctttctccagtgcagccaagtcttcacgtgcctcagagaattcaccttcctccattccttcaccaacgtaccagtgcacgaatgccctcttcgcatacatgagatcaaacttgtggtcgatccgtgagaacacctctgcaactgctgtgttgttactgatcatgcatacagctctctgaaccttagcgaggtcaccacctggaacaactgttggaggttggtagttgattccacatttgaacccagttgggcacctgcaaaacaaaacccaagccaaaggagttactatataataacaacataaaggtagaaaaattagcagctatatccatttctagatcataccagtcaacaaactgaacagtcctctttgtcttgatggtgccaacggcagcattaacatctttgggaacaacatctcctcggtacatcaaacaacatgccatgtactttcctgccttgggtcacactttgccatcatgctcgctggctcaaacacggcattggtgatctcagggactgatagctgctcgtggtaagccttggcggctgagatgactggtgcatacgatgacagcatgaaatggatacggggatatgggacaagattggtctggaactcagtgatatccacgttgatggcaccatcaaacctcaaagatgttgtcaaggatgaaatgatctgtgatatcaacctgttcaagtttgtgtaggttggcctctcgatatctagggatttgcggcaaatgtcatagatggcttcgttatccaagaggacagctacatccgtatgttcaagaagggaatgcgttgagagaacactgttgtaaggttctacaacagcagtagaaacctgacatcacagaggaatatgcattaaaaccaagtttcatccaaattagaccactatagaaacatgtcatgtaagagtttctacttcagtgtctagcaaaagaaagagtacctgaggagaagggtatatggtaaaaccaagcttagacttctttccataatctacagacaaacgctctagcaacagagaacccaatccagaaccagttccaccaccaacagcattgaacaccaaaaacccttgtaagccagtacagttgtcggcaagcttcctcacacggtcaagacatagatccacaatttcctttccaactgcaattacaagaagcattctaaggaccatttcaaaaaccctaacaagttagaacaagcagaaagtggattctcaccagtgtaatgtcctctagcgaagttgttagcagcatcttctttcccagagataagctgctctggatggaaaagttggcggtaagtaccagtacgaacttcgtcgataacagtaggctcaagatcaacgaagacagccctaggaacatgcttccctgcaccagtctcgctaaagaaagtattgaacgcatcgtgtgcaacaccaactgtagtatcactgtaacagagtaaaacattcgtctctcaaaaaccttcagatccacagaaacagagtataaaagagagaattagggtttatacctcggcatcattccgtcgggctggattccatgttcgagacagtaaagctcccagcaggaatttccgacttggatcccggcttgtccgatatgaatgctaatgatttccctcatcttctctcagcagaaaccctaattcgagcgatgctctgcgacagacggagaaggaggaagacggagatcgagcaaatgaaggcggtgagagtgagataatctttttttggtttaacttcgttggcaaattaggtttatattttgtgaaaggaaaatgattaatttattgaattggatttgataatttgttggggt

SEQ ID NO: 29903 - DNA, 2176 bp, Arabidopsis thaliana landsberg
  unsure (1)..(2176): unsure at all n locations
cacgctctctccaatacctaacatttctttacaatcactcctccttcaaaaccttctttctcattcagagactccgaagaaccttcttttagaaggtcttcatcaatcacttccatgtgtttcccttctcttgccttcatcttcgaccaacctactaaattcgtatcaccaaactcttctttatccgttggtcttttcccgcttaagatctcgagcatcactactccgattgagtacacgtcgccttttgcggtacatctgaaactttggtaatactctggtggtacgtaacctggcgtgcctgccaaggtacttacactcaaatgtgtgtctaatgcgctgatcagtctcgccattccgaaatctgaaactcttgcttccatgtcttgatcgagaagcacgttgctcgatttcatgtcgcggtggattatgtgagggatacaattgtgatgcaagaaacaaagtccttttgctgctccttttgcaatctttttcctctcttcccaacctaaaatcctccgtttttcgcctgttcttggtccgtgaagcacctcctcgaggcttccgtattgcataaactcgtaaacaagcaatctctcttccccgattttacagtatcccaagagcggtacgaggtttcggtgtttgatcttccctaaggtttccatttctgccatgaactctcgatctccttgacaactaagtctaatgagcttcttgatcgnnnnnnnnnnnnnnnnnnnaagcgtcggcttaaaaacctcaccgaatccgccgtgtccgatcatactcgcggttgagaatccgtttgccgcctcgataagctgcgaaaacttaagctttctcaactgtcgctgaaacgtcgctacattaatactcaacggcatcttctccttctctatcttccatgtagtggcggaagtaaccgtctgcaaactgtgaagcatcttcgcataatccgcatctgtcctgctcgcacgaaccggaaacgcccaaacgattaaaatacaaaccgcagcagtggaaatcaacactcccaaaacaatgctattcgcccaagaagctgccctagttccgtgcttagcacgtttcccttcctctgttccagcaggaagctgattgtttccattcttacattccggtaaaggaacaccgcaaagccccggattattcgcgtactgagtcgccggaagcgtgcttaactgacctctctgaggaatcggaccagttaactcgttattcgacaaatcaatctgcaccaagaaagacaaattcgagaaagattcagggatttgaccctgcaaccgattatccgaagcatcgaaaacaccgagattcttgagctgaccaatcgtaaacggaatctcgccggagagttgattatgagaaagctcaagaacttgaagagcaatcatttctccaatctcatcagggattttacctctaagctgattataagaaagatcaagatactcaatggtttgatatcttgtgaatagactcaaaattggacctgaatacattcttgtgaagtcacagcttttaagagatggaatctgaagaagcctctctggtctgatccctgagaactcaaccaaacctccaacacctttacatgagtttccaacgtttctaacaaaagccattgtgtttcctgagagtaaaccggaaagtgcttttgaaccgggttgacgacctaaccggggagggatttcaccggttaagtggtttgtgttaagatcaagccaaaccagagttgtgcattttcctagctccggtgggatttctccggtgaaattgttgttaccgagctgaagaacggctaaccgggaaaggattccgaaatctttaggcacttctccggttaatctgttgcttgtgaatgagacccattcgatgttactgcaattgaaaaactccggtgggatttctccggtgagttgattgttgttgaggatcaaatcttttaggttttgtagttttccgatctccggtgggatttttccggcgatgttgttgtaccaagctatgaattgctcgagtttctggaggtttccgatctccggtgggattgtaccgttcagataattgagactgagatcaatcgttcgtagctcagagcattgagatatcgccggtggaatctctccggtgacgagattatccgggagtctta

SEQ ID NO: 29904 - DNA, 3747 bp, Arabidopsis thaliana landsberg
  unsure (1)..(3747): unsure at all n locations
tatcaaacgcgttaggtcggtttgaccggtctggtttggtgagcgctggtaataatttcaccatcccaatcaatcacagacaaaattgaaaaccccaattaataatacataaaatgaaaaacatgatgaattataaattaaaactctgttctgtctcaaaaaactcaaaaggagtctctctctcacctacaccacacctaaccaaaccccctacgattcacacagagagagatcttcttcttccttcttcttccttcttcttccttcttctttcttcttctagctacaacatctacaacgccatgtcctcttcttcttcttcgtcaacctccatgatcgatctcatggcagcaatcatcaaaggagagcctgtaattgtctccgacccagctaatgcctccgctnnnnnnnnnnnnnnnnnnnnnnnnncctctatgcttatagagaatcgtcaattcgccatgattgttaccacttccattgctgttcttattggttgcatcgttatgctagtttggaggagatccggttctgggaattcttttgttttgtgcctcttaagcctttggntattaatcctcgtgaggaagagattgatgatgggcgtaagaaagttaccatctttttcggtacacaaactggtactgctgaaggttttgcaaaggtgaggactttgtgttttggtttgttctgatttcgaatgatgaagttgaatttgaatcagtttgatgtttttgaaatttgcaggctttaggagaagaagctaaagcaagatatgaaaagaccagattcaaaatcgttgatttggtatttattttgttccatcaactttttagataaagtttgatgctttaagtataatctgattctgagtttattaacaggatgattacgcggctgatgatgatgagtatgaggagaaattgaagaaagaggatgtggctttcttcttcttagccacgttagttttcttagctgatcttttgtttgggatcggtataagtattaaatttgatttgttcttgtggctgacttggttttactatctggaatctggatgtagatatggagatggtgagcctaccgacaatgcagcgagattctacaaatggttcaccgaggttagtctctttttttggcttggctcaactagttgttgtaacgtgtgttgtttttgttttcttgtttctgaagttgtaaacatgtgtttacaggggaatgacagaggagaatggcttaagaacttgaagtatggagtgtttggattaggaaacagacaatatgagcattttaataaggtttataaatgaaatctttattccccttttcttaatggttttgctcttgtcactattatggtctccttccaattactttggaccgagctaatatgcagatttgttttgtaaattttgggttgcaggttgccaaagttgtagatgacattcttgtcgaacaaggtttgttttgtttctttctttctttctttctttcatcatccgttttggatcgctctgatccggtcttaatgtgttgtattttggtttctaacttcattgagtgggttgttcaggtgcacagcgtcttgtacaagttggtcttggagatgatgaccagtgtattgaagatgactttaccgcttggtattttacatttccacttctcgtggcttatcgtgtacaatgctgttttggtcatttgttttttggggggctaaatttgctacctcttgcaggcgagaagcattgtggcccgagcttgatacaatactgagggaagaaggggatacagctgttgccacaccatacactgcagctgtgttagaatacagagtttctattcacgactctgaagatgccaaattcaatgatataaacatggcaaatgggaatggttacactgtgtttgatgctcaacatccttacaagtacaaaatccagccgcttcttttctttttccttataatcttgtcttgttacttgatctaatcttgctttttttggcttttaaagagcaaatgtcgctgttaaaagggagcttcatactcccgagtctgatcgttcttgtatccatttggaatttgacattgctggaagtggacttacgtgagttctactgctatatgaatgtttacttaatcagagggaaatattattggagaataacatgaatgtattttttgtatcttgtctgtcaggtatgaaactggagatcatgttggtgtactttgtgataacttaagtgaaactgtagatgaagctcttagattgctggatatgtcacctgatacttatttctcacttcacgctgaaaaagaagacggcacaccaatcagcagctcactgcctcctcccttcccaccttgcaacttgagaacagcgcttacacgatatgcatgtcttttgagttctccaaagaaggttggttggattcatttaccattagactggttataatcagttttgtttctcttcatagagattcaaactcaattattttcatgtttattttcttgcagtctgctttagttgcgttggctgctcatgcatctgatcctaccgaagcagaacgattaaaacaccttgcttcacctgctggaaaggttgtggctgaaccttttgttggtttctactcttcattttccatttctttaaaatggaatctgacaatgtatttttttgtgtcctttcaacaacaggatgaatattcaaagtgggtagtagagagtcaaagaagtctacttgaggtgatggccgagtttccttcagccaagccaccacttggtgtcttcttcgctggagttgctccaaggttgcagcctaggttctattcgatatcatcatcgcccaagtgagtaccttcattgtcttggtctttttgtcttcaagttgttcgcttgagacttatattgtgtttttagtgtattgagcattgtcccgtttacttgtataggattgctgaaactagaattcacgtcacatgtgcactggtttatgagaaaatgccaactggcaggattcataagggagtgtgttccacttggatgaaggtaaatataaaaaacttaaatctgatagcttcttgcaaacatattgctttggaatctttttactgtttgtgtcatttcttatccattgtcttggtgtttttgctgggtactgattttttgcatcgtaatcacagaatgctgtgccttacgagaagagtgaaaactgttcctcggcgccgatatttgttaggcaatccaacttcaagcttccttctgattctaaggtaccgatcatcatgatcggtccagggactggattagctccattcagaggattccttcaggaaagactagcgttggtagaatctggtgttgaacttgggccatcagttttgttctttggatgcagaaaccgtagaatggtaataaagccattactcaaaactcaaacctttcattggttttgtccagtttctaatcatatcttctcatatatgtaggatttcatctacgaggaagagctccagcgatttgttgagagtggtgctctcgcagagctaagtgtcgccttctctcgtgaaggacccaccaaagaatacgtacagcacaagatgatggacaaggtatgagcttatagaaacccaaaactcagatcttcatatagattcaaattcagattcttgagctgacaatctttctgcaatgcaggcttctgatatctggaatatgatctctcaaggagcttatttatatgtttg

SEQ ID NO: 29905 - DNA, 2811 bp, Arabidopsis thaliana landsberg
cggcgcaaagatccaagaagatttatgaggtaatgggcctattgttttgttttattatgggcctattgaattgtttttagaccaggccagtattacgacatattaatccaccgggcttacttgtaaataatacaaagttgataaagaaataataaaaagtggagatgattgaaggcttgtgtcatgtttttcctttgtcccatatgtcacgtgcaagatgatagattcgtggacttggagtcagtaatatcaatcaatctaacaaaacatttgtcccggaataaattggaaatgcaaattgtcatcatgttactgaaagttgtcctatattttaaatttagttttaacagttttattttatttttatatgaacgaaataaaaataaaataaaagaagtgagagccactctatttacaaaccaatgaaaataaataagggtggaaatatgggaaaaatggaaagtaacgttttaattgtgttgatggataatgtgtattttatgatagaaacaaataaaatcaccttgttataagttgtaaggctccaaaatcacattaaaacatatgctagtgaattaccaataatttgacaaatatgttaaattcacataatttattgagagaatggaaatcatgactcgtgactcatgactaatgactaatgagtgagtcttgttgttgtatatagagactatatattcatctgaataataagtttctagaaggctgaattttgataagaggagcataaaaatgactgatcacacatcgcccactaaatacgcaagtgagtgagtgatcggagatatttacggaggaaagagcgggaagggagtgggtataaaattggtggctcgttcggtggttgcattattctgtccatgtgggccaacgtaccgcactttgtctctgtatccgtcattgaggattttttttgtttattttattttcccatctcacttatgatttttgttattattaatgattagtgatttgttacttactgaagcaattattttgtcaaaatagagactgcttcacataacacataaaaccaagaactggtgtcggatattcacactctctcattcacatggagagccaaaaaccaagaacatacgtccatcttgcattaacgataccgtgtgtcgtttacgataggcacaatatatacatatatgtacgctcataccaaaaatatcgagatgcactaaccaatgccatatataacatgagcattgagcacaatagtaggatgagttatgaaaagaaggaaaaaaataatcgctactaatccaaagcaagatgagaagatacattgaatttcactttaaaacgagcacttaagctagtgaattaccaataatttcattttggtttaagaaatttcaaaggacaaaagcacctttaagattcacttctctttgacttttgacagtacagaagtactagtacaatatttaatctagggatcttcatgaatgatgactaatgagtagtatgatagtcgatgatgataacaatgtttgataatttgctttgtcaattttctcccaaaaagtctttgggaataaatcagtcaactcaagctcaaaatctaacacgcgcgagacaaaaacccgacccgtgacccgaccaagtcataagcgacccggaaaccttgttgctgtatgtttccaatgattgacaaactccccatagttccggcaaacgcaaaacagaaccgtccttcagtgttaaccgggatcagataattactcgccggaagcgaaacctctccgcctccgaaatgaaacacaaccgtcggaaccttcacagtcgtcattcccgagagatcaaaacacgtgtcgaacaaagaatacgatggagcacgtttcagcttcgtagcaccaagtctaaaagcgtctctaagcgctacgtaagcagcttgcgtcacgcgagtaaccgaagtaccggaatctataatgacaccgccgtttccggtggcgtcaagcttgaactgcgactccgaaacgccggggaacgcgcgaaccaccaacgctgattccaagaagctgcaagtaataaaacgtgtcgagtttcgggttcgttagtaacggcgtgaaaacagaggttttcggaacggcggcgtttccaaacacgattgttgacggtggtttagaagaagaaccggaactcgtccggtcaaccaaacagtaagagaattttccgttataacggtttttcgtctgcgacgggaaagataacccaccacggcccaagcccaaaagcccagccgcaccaacgaacaagccttcgttatcgtgaccgcatcctaacggcacgtgatcaacacgcgctccatgaaacgtcagcgtttcagttgagaaatctccttcggtgaatgatccgtcaccgtacgatacttggtagagacaagtcttgcttcgacgagtgacacattccgacgagtcgtctagtctccggcaaaggcgagatccacatggtacggtggcgaaagttttggatttcttcgggtcaaaaatggcgtcggtctggttgtaacaggctttgcaaggagagcattggagccaaacgacgtcgcttcctgtgtcgagcaccatgtaaacgttagtcgccggagttccaacacctaacctcataaaatactctccgcttccttgtgagaggccagagataactgcgccgctaaatccaccggcggtacgtggagttcttttcgtagcatttcgtccggttgatacggcggcgaggctggtaatagatttgacgcggagagagtctcgttggagacgcaggttaagaggtccg

SEQ ID NO: 29906 - DNA, 1504 bp, Arabidopsis thaliana landsberg
agccgactaaatatattatttattttatacataggatttgattagtaacgtttaaaccattctcattcatgttatgtgccgctttttatcacagacgaggtttgattgactcattgccttttattaaccctaatattggatcggtgtaattgagcttgtgataagctaatttaaggtttgtggttgttggttaataggtagcaggagtgaaaccaaagaagggtggaactgaacagttctggctcaactagaacctccatagatctaaacaaagcaaatctcataggcaccactgttaaattcctctctttcagtcgtagcgtcttgaaagtctccggcaagcgtaaaaaggtggtttggtggctttctcttgattcttgctggcctcagtcttagacttttgctaattgttatagcttcaagattgcaagttgtgtgtttcttgtttttgattgcgtctagattctggctttagctaatgttttttatttgctcttcttgtgcagaatgcgttgcgctctgtatcgaatacaacattgtgcgaagtttccactgcaaaagattcttacattgtgaggtgagaagcttttttctggtttcactttcctttgtcctaagttcttatgtgcaaaaaaattgaagttgtctttattctgagttggtttgtgctaggtgctgccttaaagtctctctcttggaggtcaactagagattaattcagcaaccagagcttcttaattcatctgtaagaaataagagaagaaatgtttgaattatcaaactttctcttgtctaacaaatccccaaaaccaatgaaaaatctcatatttttgctatgagtctctattgttgatgtatcttctatacctcttatgttatacttctaatgtcaagacttttgcttatgaaagcagtcggataactctaataaacttgagatttttcattggtaattacgctcattctgtgagtagtttcgtttcctatactcgatcattgagctcagaagcttggctacagagagcctacttttgaagcactggatttagctggtttccacgttgtaacttaatagcactaacatcttctatatttgtactcaattgctctatttgattgttcaatacttgaatcttcccattcaaatctttggatacaacacccagtttgtgatcaaaatctgtcgttagcttctcttgacctttgagaatctgtttgaacatcgattcgaccatcttagtaatctcgggtggagggtgggcttgggttgaagaagcataattcataatgaagcttgtagtttgctgaaccgatgtctgagatgtagacttctgattgtagttcttgtatccatgttgatccatcatctctgaagtggctacactgttaacctgtgcagcatactgaacccgttgatcaccaagaagaaaatcaactttggaacaaaacaaggcaacttggttgttatcggatatctcagcttgcgttttcggtcatatgtcaa

SEQ ID NO: 29907 - DNA, 2062 bp, Arabidopsis thaliana landsberg
  unsure (1)..(2062): unsure at all n locations
tcgccgatggtgcattggaatccagtatatgtcgtggtactgaatgcatacatgttcttcttcgcctcttccatgttgaaaatagacacaagtacatataataagcaaacacgatgaactggttatgctggaaaatggacacaagtacattaattggttatcacatcagcaggatagtgtaaacaggaatcaaagttctctaaaatagagagtagcaccaaataaactaaagttttagtcattagttgtgtaacacaaactcgttccctgccataccaagaaatttctagtcaggagtcccaatctaatgctctgcacaattgtacactccttttacatacattactagcttacactgtccacatcaagtttttaacaaacagaaaccatgcacaatcacctacaatttatacatagcttgaagaaaatatgcaaaaatagatgcttctattcttccccctaatttcattcataattacgctaaagagcacaaagttttagatatcaaatcagacaccaatgttttgtgttcaatatgcagcaatgttcaataagtttgcacatatcaagagacgaaaaacaagtcagctaaagattacacctgatattaagaacaaattctggaactaggtcaacttcagagcaaatttaaagctgaaagctttactcagctcactaaacccttaccctaaagtatcatcaaaaaccctaatctaacaaaaaaccaaatcttcctatacgcaacattggattcaatcaaaggacaagtccattagcaacacaagtaaatgtcgtctattagttaactaattcaacaacgaagagaatcaataagaaagcgaaaacgaacctgccaagaacagtagcaagagtgttaaggtaagtatcaatcatctgatccctacttggcgctggatctttaggaaactccattacaatgagccaatgattgtaatcgcaaccaggaagcataatcgtctctctctgctcattgctattgctccgtttcgacgagtaatccgaatccaccgtcgcagctttcacaatcgccactcgacgccgagacccagcggtggagatgctccggagcagaggagtccatgaatcgccaacgcggataccagagagtgtagagaaacgattcaggtggcttacggggagaagagttttgaggagaagcgaggaagaagaagttgttgtgnnnnnnnnnnnnnnnnnnnnnnnnntcgaagagagagttttggagaagataagatatatttttacttacctgcttcgtgatgaggatcctatgaaacgacaccgtttttaattaggcccattagatagtttgggcctgataatttcttaaatcattttctcataatttcaagcgccaaaaaaaaagaaaagtaaattgggaaagaaaaaaagaaaacacactttccccgatgtgtatcgtgaatatcgacactaagcacagacacagtagcactgtgttttggttgcaaaaagtctccttcatataatcatatctatggttttcgggtttcagcagaaaagtctttttttagatttagggttagcagagcaaaaatgagccgttattagttttcattcaagggtttttgagatggagcagatgatattcattagaaaagacgacaaagtagaagttttttctgaagaagaagagttaaaagggtcttattacagagcgattctggaagataatccaacgaaattaggacacaataagcttaaagttcgttacttgacgcagctcaatgaacaccgtttggctcctttaacggaattcgtcgatcagaggttcattcgtcctgtcccgtcggaggatgtgaacgacggcgtcgtttttgtagaaggcttgatggtcgacgcttatctcaaagatgggtggtggactggtgtggtggtaaaaacaatggaggatgagaagtttttggattacttcgattgcccaccagacattattcagcttgagaaaaagaaatagagggttcatcttgattggaccggcttcaaatggatccgacctgataataaggtatgatgagttttt

SEQ ID NO: 29908 - DNA, 4654 bp, Arabidopsis thaliana landsberg
gtcttccttctctgcaattaagaaaggctagctcgaaatcgatttctcattcttcgtctatttctccttctttcccaaaatcactaaatttgtttgtgttttttttttcaaaattagccggtgatggcggcagtgaaaggaggaaaacaatcggtgagaagaagcagcattacggtggttcagataacgtgttgtaagaaggaattgcatcctgaattccacgaagacgcaaaggtttactgcaatggagagctggtgatgactacaggaggaacaaagaaagagtatgtggttgatgtatggtcaggtaaccatccgttttacctcgggaatcgttcggctttgatggttgatgctgatcaagttgagaagtttcgtaagaggttcgttgggctttctgagattatggagatttctgtgcttaaaggagaaaatcttatgcctacttagaaaagtaaaggtcccaaagggatgaagaaatgatgagtcttttctggtaaagcttatgtctttgaatttgttgtcttttcaattgaagtcgagatactgcttaggctgttaaaaattgtatgtgaattttcttctgaatgctattggttatgctttctttaagatctatttggtttcattgagagtgagactaggatctcagagcaatgatacaagtagtagcgaatctcaaggacaaatctttagcttgtgagtttggcatgaatttgtgatggataatagatagatatacactggtgagacacatagcaacaatgcctatgaaatggtaattgcaaatgaaagaaaggttgtggcttttgccacattttgtgataatcttggaaagttatggcatgagattaatgactagtgtaggtagttgttgttgatgtgtaagtggtgtgttgattagttgattgagatcatttttacatagatttataaatgttgaacatgatgatcatggtctatgtaagtgtctgctgaagttatcaggcaaaacatttgtcttctgacgacgaagtggcgtactaatagtgagcagattcttgaactgtggccatggcgtaggagtatgttttgcttgagaacataaaagaaaatttttggcacttgaagttgaagattctgtgatcatgcccaattgtatactactactgaatttgtgtgaccaatattgaacagaaacagaatactccagctcaatcagaggttttaccaatatcaagccaaaccaatatcaggccgtctcaagcccatttgaagacagtcgaatgtgtgggctattttaggcccatttcctctcagctggagtcttctgcttcttaactaagctaccaaagttttcactgaagttcaaaaggaaaacctgtgggctttttaatccgttagtaaattggggtttgacatctctacatacttcatatgctgatcgatgcagttgaatctgaataattgagttaaactaaattcattcgttggttgaagtcttagatcctttcttatcaatgatttgcgatcttgactaaaattgagtcttaaaatattatcttaaagactttagacacacaaaaagaaggtgttttaagataaactaatggtctcctgtttcctagcataagattgatgaaagacgctgtgttgggttagttaaactatatgtctaaccatatctaattagtttgttaattatgttggaataaatacaatgtgttggattaaataaattttaattttgctgggacaaatacaatttaaatgttcgttgcgttcatttgtcgaaaataatgcacttcgtatgtttgtttgttcggggacagttatctgactctgttgatctttccaaatcagcctttgtctgcagtaaacactaatagctccctcaattttataataattatgaattaagctattaacttaattaaaatatttgcatatatacccccctatactatgtttattgtgtaaaaagtcctcttagggcacatgactcatcttattctcacgtggttctcgaccattttcctgttattcttttgttcgggatccacgaacctcgttaatgtgtggataagtctgttattcttttactttgacggcgcgtaactttcacgtgtattcttaaaagataagtgggcttctcatggactagtttagataaatccatatccatgtaatataatcaactttatcctcaaatatgaagtcgaatagtgcgttatatctggcatcgttaaattatagtaagttgaaatatgttcagtatattctatagcaaattcagtatctttaagtggatcagtcactttatcttcgtgcaagtttctatatagtgaaaatattgtttcgataccacaattaataaaatatggatgacaattagtaaacaaactaatcattgttttcataggaagagagacaaaacaaacaaagtattctctaggttcttttctaaattttgaatactaaagaaaaccaaaagaaccattactatatgtttgtactattatcattggttgggtgtccaaaaagcaaaaccatagtataaaattaaattgtcaaaaaagagtcattaaattttaacttattgaggatatataaaaagactagtcctgcgatcgtatttccgtatcagtgtcagtgtatctccttcttacaataaaatattttctctcatttaacaaaatcgcttcactttcccgattcaattttcccggaaaatatcactttcccgtttcattttcccagaataatccaaatctccatcgtaatcaatttctcaaaacctgtagtattaatcatcaaaccaagcatttatactgtctctgttttcaatttcacggaaagaaagacaaacaaaaacagagcgcgtaaaaaccaaaaaatggagaagccgttcgaattccatggcgtggaggtggagaaagcggaagcgatgaggagatacaacaaccgtagaagcttcagaggcattcttcgtttagtcggcgtagcttttctgtgttacttatggttcccgacggtggcgattatactacaaaccgtcggcgactggatttattggaccggagcggttttaataaccgatcgttccgtcgtctttttcttcgctaacctaatcgtcggtttgattttctttctctccggcgcgagtaacaacgagagtagtagtagtaatgtcgaaacagaaccagatctctacgatcaatacacctcttcttcctccaccgtgatcgcaaacgcctccgccgcgaaagttgatgataatgattcgaacaagcaaatcgttccgacgtttaacgcggaggttgatgaggcggttaagacaaaacgaatttctaggaggactaaatcggagatatgccggccggcaatggagtatgagagaacggagtcggagaaagtggtggaagacgatgaatcggagaagcaaatcgttccggcgtatttcccagaggatgatgaggaagtggtagtggatgaggctaatcgggagatggttacaacaccgggaatttataggaggacgaaatcggagacgaagaaagagataatccggccggtgatagagattcggagaacggaatcggcgaaagaggtgtcgatagataggctaagtagtgaagagtttcgtttggtggtagagagtttcttgaaaacgcagaagaagagagcacgtgattcggaaaacgacaccgttcgatgtcatgtacttggatctagacctggcctcattggtggctatggctcgtgctagtcttgatagctgacttggaagtagagaagaggtaacaaaaaaagtaaaaactcacaaatgactaaagtttggtagtattattctactttagttaagtttagggagtgttttaaaattaggtgatgctggtgattattttaaaattagctggcttgattttcattttcgatggtttcggttttctttggcaccacaatgaaatgaaatacggaaatagtaatttttatgtgaatttggggaattttttttatcattgatatcaaatttgctaactcagtcagccattattttactagtttcaaagacattcaaattttgatatcaaaaagtcgactaaccgactacctatgttgtttaccacatcttttatggagttagccttgaatcaagcttaaattataaatagacacatttttcatcatgactcattcatataagcatagaccaaacaaatactgtatgataactgcgataggaggcaaagcagagacggaagtgggagaaaatggtgtcactgatataaataaaaatgtactttgaatatgaactgaaaaaacattcttctaaaatttcccccaaaagtatcaaatctttgcttatgagacctaattttggatataaacattgttctctctataggggtggtgtttacgaacctactcataaagcagagtacaacaccacttcttgtaactcgtataactcgaagctctctctctcttcagtcttcaccagcacaccttctttttctgttttcccaacaaaaaccacgtaagtgtattctcttcatatatcaaaaaaacaatcacaaaattacgggtgattgggtgggtgaaagaaattaaatgatttaccttgtgatacttctcgtctttttcacggtctatgtaagcccaaaagatcatc

SEQ ID NO: 29909 - DNA, 1783 bp, Arabidopsis thaliana landsberg
aacgataaaacgttttgttttctttgtaatctttagggtatcaatctgtaatcaagaagatgaaagattttagtatttaacctccattgagccagagaacgagaggtttagagatgggtttggtttctgcttcagccaagtagtaaaacagagctctctgtttcttctcgtcaatagtgacataacctgagtactgctgaaacccgactcggggttgaccgggtaaacgggtgatccgatcggcccgggacagaatagttgagctcactaaactcagagcttgaagcagcagaattagtgaagtcgccattgttaggcattgtaggcgaggcattgttgtggttcttctcaagtcaatagagaagaaagatgacttttgggttttatatcaagaaatcaccttttgtattttatttttgtgaaaatcgagtatttgtaaatatctttcttctctgcaaaagccgtaagccgcgtgattcacaggtaaaagtttcttaaaacatttcttattttattgttattatgatggcattccaacaagtaaacatattgaaatggttttactaccactactcatagttttaggtttggttttcttcttatatgtactaaaactttcgttttgaatcattgactaatttgggtgatgctagcttcttcttcttttttggtcaagagatgatgctagctattcaagttattatgtcatagaaattttataattaaccattcacaataaacatgagtaaacaatgaaggtaattaagaaacggttggtgatgtttttaagcagtaatcagcaaatggagcttggcgtggctggactttcactcaaacccccaaaagactcactcatatttaccatttctaaataataataaaaagttggaaagggacttgaatgtggtcctctttctataaaattttaggcgtggaagagaaaaaaaacgctcaagaaatttgaggacaaataatagagaaaatatgtgggtgttataagagcacgtagcttctcccaattgcatacgcaagacccatgcacacaatttgtgtgacacaagaatgtaaaaaaaggctgaatagtgtgtacattagttcaattacctataagagtttctttgaatttcagataaatacattttgaaacttatgcttagtatctcaaagaaagctaaggtccttctactactagaagttaagcttcaaagaaatactacaccaaattttgaaagttacaccgtacaaaatagagttcacgtaagattttgcgttttattctctgctaacttgatccaatactatttggatcatttattgatggaccgcggatgcgaacaaggtttaagaaagaatgacatgtttgacaagtcagtttattttcctaaacacactctagagaacataacttatgtaaatggcaacaaataatcaataatccaccccatcttgcaactggatcctcctgctccgcatgctccattcacagcctaaatgcattatctttcttgaccatagaaaaatgaattataacaatttaagttgttagggaaatgaaatagagaggtagaaatgggtaaaagacaaattcaatttggtctgaaactgaaaacaacttttgcctttatagccataggttggctaaaagagtgttactggcccatccccaccttctcacctctcgtctctgatcttccattttccatactcaattcccttttaccttaactaactttttttttttttggcaaacacctttactaactaagttttaagtactatcacc

SEQ ID NO: 29910 - DNA, 591 bp, Arabidopsis thaliana landsberg
taaattatcaaataggaaattgcataccattagccgatatacgtttaggaacatgggttcatgattccctataaaatccttcacttttagctttgaattacttatatatatcctatgaatttaatttcgcatcggaaacgattctaggagaagttcgaatccgttccgttcggatattgatcggtcttggtttgacatggtttacgtgttactggttcccggaagagttaatatctccattagcgtcaccctttcttaccctgccttttgactcgtattttgtttgtacacaattaacggaggccttttcgacatttgttgcaacgtcttcaatagcatgctcttatttcgtctttcctttaataagttatcaaatttggtgctttttgatccccagttgctatggagaacaaaggacgaaatacaatcgattcctccatttaagtggttctcgcttcttcttgttcctgttcctaactcctccccgggtcgttcccaatgtttggcactttccatacttcgtgggtgcaacatcaacaaatttcgctcatgatcaagttacaaccctaagatctatgacccataattatg

SEQ ID NO: 29911 - DNA, 757 bp, Arabidopsis thaliana landsberg
cactatgcgatctctacgagacactggccatcacgcaaagcgtcatctttgtgaacacaaggcgtaaggttgattggctaaccgacaaaatgagaagccgtgaccacactgtttcagctacacacggagacatggaccagaacacaagagacatcatcatgcgcgaattccgctctgggtcttcccgtgtcctcataaccactgacctccttgctcgtggtatcgatgttcagcaagtctctctggtcataaactttgacctcccaacccaaccggagaattaccttcatcgtattggaagaagtggaaggtttgggagaaagggagtagcaatcaatttcatgacatcggaggatgagagaatgatggctgatattcagaggttttacaatgtggtcgttgaggagttgccaagcaatgttgctgatcttctctgaagcctttcttttttctgttttttactgagaaagtgctgtgtttacccctttttttggcagcttctctatgctttgatttttgttttcaggctactacttagatttatagttcttggctaaaagcgaacataactcattacatgattttgcttttttggcaatcaagaatttcggcattatttatctttttgtgaacgtggcttacaaggaaggatactctatgagactaaagacttttctctacttgagtttcattaatgaacttttgttgattttctagttttctactcttgaatttacaataaatatatactacataa

SEQ ID NO: 29912 - DNA, 634 bp, Arabidopsis thaliana landsberg
ggaatgctgtcactcaattactaggtcttcttcccacgtgtacgtaaatataagagagtgaaggctatcactatcgcctaacgttttagctaagggaagcagataacaagcgacggaggcgggtaagcggaggcgggtaagcgacgtattaatagttaagcgacggaggtaagcggaggaagcgtaggaatcggttactcaactgcccttagactagtgtagcccgataggactcctttaaatgagtccgacggctaacagctaatacctgctatctcggcaactcctaccgatcaagcaaggaagaaagcaactctcgctggagggacaactccagctcaggcagagctaaccattgaagaactaactgatagaactacaagaaaccaaaggaagaaggtagatacttaagttaacagtcaaacaaaagaaagcaaatgaaggcacaaagaaggaacaaaggaacagaccttagagaagaaggagaacagtcacagatagattcaaagctaaggaggaaacgagtaaagaaaacagatggcatcttatatagagtatagagaaagattctcacaataaaaacaggaaggagaatttgactcttcaaccggaaacccgcgcctgtgtgccctac

SEQ ID NO: 29913 - DNA, 1432 bp, Arabidopsis thaliana landsberg
  unsure (1)..(1432): unsure at all n locations
tggttgcactcaaaaaaaaaaaaaaaaaaacagattggtttttcttttacagaaacgtttttgtattgttttctaaactctttcgaaaacttgttcaatattaaaagaacgagcattttttgtatcttttaaagttgtaaatcgctctaaatgaatagagaaaatgtaactttattttcatggtttttctctgaataaccaagaagtcttaacttttaattgaatctcggatttttttttcacataaaagaccactccatgttaatacgtcaacattatgtcggtacttaaaccagtgacattaaagacttcctcaacattgtatttttttcattatgggtactgaaaattcgtcaattcaacaacggtatataatcaagtaggattattttggtagataaaatatcataacagcaaataactctatactcaaatgcatacaaaaaatacacaaacctaagtaaaatatcagaacgctcaaaataatactagtatggggtgcaactggcaatatccgatccatggaaactggcaacttggtctttttctgttctcatgcatgttatgataaacacgggacgtgggtagattttttttttcttttattgcgaatttgggcttcgaccttattcttcctaggtccgacgccactatttagtccttttcttttagaaatacttctcctcccaaaagggtttgaaccactaccattccatctcctaaacacatttatcattgctaaagagtatattagattgtgttctgccttagagcatccacaacaatagatccaaaaataaggatccaaacaagctttatcattttaataaaaataaatttacaatttagacatttgaaagagatctatatttaaagtatgtccaatggtagatccaaaatagagagttttaaaattcaaatgtttgaaaaaatgtgtcaaattgttttataaagaaattaattatgtctaatacaaagacattcaccaaccaaattgtgccacatatgggatccaaatcagttataaagtatacaaatttggataagtctaatgtttttctcnnnnnnnnnnnnnnnnnnnnnnnnnnnnacatatgtattttcctaattaaagtattgaaatattaagaaaagataccacaccaatattctaataacaatgtattgtgttttgatgattttattaacacctatggataaacggcattttatatatatatatatgaatttttatgtctaagatgaaaatctatatctatatgtaagatatagatttatatgatagatctagtaacatgttggttcatatgatgttaattcttttttttttataggtacaaatcaaacttaaaattactttcatttatttttggtagaaaaacaatgatctaaacttaaccaaaaaagttgactaatcccaaaaaaggatgat

SEQ ID NO: 29914 - DNA, 2683 bp, Arabidopsis thaliana landsberg
gccctatgcggccatacagattctgtttgggcgcttgcatgcaacccatctttagtcatgtttatagcggtggaagagaccaatgtgtgagtagacaccaaacttgtttctttctttggttttcttccagcgtataacctccttttttaatttcatttatctgttatgtttccgtcagttatacttgacagacttggcaacaagggagagtgttttgctgtgcactaaggaacatccaattcaacaattagcgttgcaagataatagtatatgggttgcaactacagactcctctgtagagagatggcctgccgaagtacagagtcctaaaacggtctttcaacgaggtggctccttcttggctgggaatttgtcttttaatagggcgagggtatctttggaaggactaaatccagtaagcaaaacaatttcctcctgtaaatgctgctgttgaacctttttttattcagtgtggttaacttttcacttgtctgcaggcccctgcatacaaggagccgtcaataactgtcccaggaactcacccgattgtgcaacatgagattttgaataataaaaggcaaattttaaccaaggtaaaatagatttctctgaatgctcttgtaagagaccaccattgatagttttgtagaggggtcaatgatatgtgtttggttttttcttttgcaggacgcagctggctcagtgaaactatgggatataactaggggtgttgtggtagaggactatggaaaggtatttatggaacatagacatcttttttgagtttctgatatttgatttatgtatctgccgctgtaattctggaatattatttatattcaactccaaacgcaaatggagaagtactaagtcagagaaatatatctgttcccatcgttacagatttcatttgaagagaagaaagaagaactgtttgagatggtaagtctcttgatcgattttcaaaggttatgatatatttatcgttagtgaggctagcaggtttgtttacttattgctcatattactttcttaggtaagcattccatcgtggtttactgtggatacacgacttggatgcttatctgtacatttggagactccacaatgcttctctgctgaaatgtattcagcagaccttaaagtttctgggcgacctgaagatgataaggtagattaattgcctgcattttagttatgttgaatctaatcagatattttattattatcttactgttgcatatactaataaatctctgtatgcaattaatatttgaatctgttcaccataattgaatattttagattttcgtttgctctaacctagtcaaagtaaacctaattttgtcattggatcttgtgatttgtagattaatctagctcgtgaaacactgaaaggcctgctgggtcactggctggcaaagaagaaacacaaaccaaaaccccaagttcttgcctctggagatactttatctgtaaaagataccaaaaaaaatctaagtgcatcaaaaactgaagagagtagtgctgcaagtgatccggtgtatcctccattcgagttttcttccgtctcccctccttccatcataactgagggttctcaaggaggaccatggaggaagaagataaccgagtttactggaactgaagatgagaaggacttcccattgtggtgcctggacgctgtcttgaacaatcggcttccacctagagaaaatacaaagtattcggcagtaccttgttctctaaaaaaaaaaatagtttggacttttagcaatttcatcacatatgtttttacatttttttataaatagataaaacatctttcataaaatgtctgactttgaaagctcttcaaatttccagattaagcttcttcctgcatccatgtgaaggttcatcggtgcaggtggttacactagggaaacttagtgcaccccggatcttaagagttcacaaggtgcatttatctgtaattttaagttgtagttttgcttgcactctctgttattcaatggcttcttaaatgtctatgtaggttaccaattacgttgtggaaaagatggtccttgacaatccgttggatagtctagctattgatgcagcaagtgtttcaggaggacaacctcagccactgttttcaggaaatggattgttacagtctggattaaagccttggcagaaacttagaccttccattgagatcttatgtaatagccaggcaagtcagacttcaagagatccaactattgccctgtttctggtttcaattaactgtttgcagtatgaggctgaacgagctgtttctctgtgattatttcaggtcttatctccagatatgagtttagcaactgtacgggcatatgtatggaagaaacctgaggatctgattctcaactacagagtggctatagctagataacttttgaggtaaaatatcagaaaaaggtgaaaacttgtggtaatgcattatgttggtgtgttgtcaagataaaatttattgagcggctccatctacttgacagtttttacttgggaaggtgatttcatattaggtattttcatcagaaagaaaaatagagatacttgagttggtagatttttcatgtgagctttttcacaactcctgataccaaagcctttgtagattgctctttttggtttgaaacaaatgataggatca

SEQ ID NO: 29915 - DNA, 12944 bp, Arabidopsis thaliana landsberg
actcaccatataccacctcatagtggccgcttaaaagggcaggtccttaggtttctcagccatattcaagtcgtaatcgatgtggctgaacatgagttttcccagccaggaggcagcagcctcctcatgcctgtttatgatctcttgatctgaggtccctggcatgttccaaacttcgccagagagcttggtagtcagaactccaaaagcaggaagctcaacttctgtccctttaggaattgtttctgaatatcacaagaaaaaaaaactagttcaagacatcaaaaacctatacatatacacttgttttcaagcataaattctaagggggaaatacctggaataacgggtgtcaatgaatgatatgttaggaaatactgattcagtgtttgcctcgatggaatttgagttgccggagacctataacatatatcaatcaaccacattctcagcctagtcgttatttcatataagtcacaaacaatgtagattaactgtcaataactagtaatccaacaaccaattcaagaaacatgtaatttttaagagaagggctaaagctgagaaggagacataccaagttatagaaaaccagctgttttcagacagatcagaggttctaagagtattcaatccatggtgcttcttagctagttcctcaaccttcaaggaagaaagacagaacctccccatttaattaaacccgcgaaaggcaaatgtaaggacccaacatctaaggtaagagcttttcacataccatcatagtaagaggaagcctaagcccatctacactcactgtctcattgtattcaaaataaagatgacagtcctcaccaaagctcctaaaatcgagaaacaaacaaacaaagtgtgatcaaccaagttctgattgttgatacccatgaatcattagaacacaacaataataggattcaaaatcgagaatctgtgaccttgatgaagaagaagatccatcgtcgaggaagggtttcttggtgaagatttgcatggcggagagggtgggagcataatactgagtagcatccgtccaagagtagtcattcagcttaagaggaacgccgacgcaaaaagtgctccacttgtcgtaggcggaccaaatgtcactcaggacaaggtgaggttttttcactctttctgctttgcctcttgaagaagacgaaccaacacgtttctgcgcggaaagttttgaaattagggttttcgatttatagggattcaaccattttgttaaaatcacccacccggttatattactcggatccgggttgaataacaatagtaatatttagatgcaaccccctcgtaatattttatatcacaaatcgacccaattatttcagtttcttccatctactaccctatacaagacattgaagctaccccataaaaccaaaaactgaaattgatttttaaagactgtaaccaaattctaataaaagttattttggtttgggctgttcaattagagttcagcttggttttactattggttttaatttagtttaaataaaagatacattcattgttttcttcaaaatgaatcaaaaggatttagctacacgcgtaagccagtgagacagtagagataagatttgttttattattcaacgttatcattaattactattgtacttttgttatatgtttttggtaaaatacccttttgaaactttttctttcaaacgacttaaattacattgttttcttccatacgatttaatgatagagtctaaaacttgaaattctcttttgaaattgttaatcttacaagaatcttcatatcaacactagcctaaaagaagagaatttttttttatagaatgtgattacatgcttaattgagtttctaacataagaatatgtctatgaatttcatctatggcactttgatatgcatcgtgcaaaagtttcaagtatgcgtatagttgataagttagaagatttctttcacagtagattcttcatgttcaattttttttttaaggggtttacactagatcgaactgatggtcaaatacataaactcatactaaaaagacgattttaatttcatcagtcaaataattagaagaaaatgaaaggcgaaagttacctcagtatggaatttgacgcagacggaaagagagatgcttttaagaaaactttcgaaattagatttgcctctctgattcatttttcctctaatttttgtttagataagatattttactcgtacacagaataaaaaaagaagtagagaggtgatatatatatagtaaaaaatacaacatttcttcataaaaaggaaaataaacatgagatatgaaaataaaattaaagaaaagaaagtaaggaaaaaatatttttttattaataagagaatatgaacaattatcattgggtatttattaaggtaaaaacatgaattttttagggtgctaattaatatgacacttgccaaagaaaaggaaagacttaatttcatcattttgtagttacccatagtttaaagaaaccgttattttcaacttcttagacacatggttaatcacacacaatgtgaagacggaaacttttttacaccttttgcttaccaagaaaaaaggaatctttctatgattagaggataagctattttattgagcatagaatgtcacgtcacaaaatattgaccaatttcttctgcttgtttttcttttttggtattgacttctctatttctaataaattagtccggtgccacaattcagaattcccgactcacaagtgccttcacatgctatttcctctgataaagcatttacttgttcccaacaatgaagccttgattaattttagtgttttattttagcaatcccctccttggttacgtgctatttcctctgataaattaagccttaatacatttatggatttgcatgttgtgtagatcacatggggtgacgaattgattcaacggtaggcttattcactctatggtgggatccatttgaaatcacatttcctttaattctgtgttttatttttattgatttcttctttatttttcctttcaaaatatgaaaagaaaaaacctcatctctttttttcttttaaaagatgaaactttatcttagcaaagaaaaatgacatcagaaagtcacgatgccaactcagaaagctccaaatccacgacgtcccttctccataagttgaaaacgtaattacatgcgtgtaacaaagcatgccgtcttgccaacttgtacgttaaaaagcatgtcggagtctaatgtgaggggcgtgtgatcatgtttcactttttttcttctggcttaaagcagccaaacacaatgcttttaaccctaatccccaaaaaagattcaagttaagatatatataaaagctttatttcccttttgctgaattgttgatgacccattcatgactcatcctacggtcaagtcacaaaagattcactatctttgcttttcattgccctttatataccttagcctgcaccaaaccatttcatcaatcagcttcattttccttatcacacaacctcaagattccagatctagatcaattactcaatcctctaaagatgaacatgagcagagttgaacaacaagtcattagatatccggccgcaaaggctactcccgtgggttacttacctgatccggcttcatttaacaagttccgagttccggcttcttccaagaaatctgaacaaagttagtacctatttagttaccctctaattcatattgttttgtccctggaaaacttgaaagataacaggattgattttttttttttgacaggcaacgtaaaatcgattcttaaaaggaagaaaactgatgggttcaccaacggagttagagaccagagcaagataagaccaaagctaaccgaaactgtgaagagaaagctatctttgggcgctaggattcttcaggttggaggtttagagaagatcttcaagcgtctctttagagttagtgaaggtgagaaactgttcaaaatgtaccagtgttacttgtcgacaaccgcgggtcccatagccggccttctcttcatctcttccaagaaaatggcgttctgcagcgagagatcaataaaggtggattcccctcaaggagacataatccgggttcactacaaagtatcaatccccttgtgcaagatcgacagagtgaaccagagtcagaacacaaagaaaccatcacagaagtacctagaagtagtcacagtcgatggttttgacttctggttcatggggttcttgagctaccagaaagctttcaattgccttgagaaggctctttcactgagctttgaagataacaaagagcaataaagccgcgatttctgtggaactatggagtttaacaagaaatatttcatttcttctttccttgattgatcagaaaatagtcctagaaacactctatttctttactgtacaaactctatttcttttttcttttccattgtagacaatatcggattatattaattcatttctttacaaatctcaatgaacacaaatggaaactctagaggggtctgcacaagaaaccatttccttgtgcttgaaatacacagagtaatgtgccccgacacctccaatgaaaacagagtacacaagaccattgcttacttaaggctaattgagtctattcaaaagtctttataagactctaagattcttaagctcaatctttccctaagtaaataagaagaaaagtgagcagtcttgagttatattcatagccgaagaagaatcaaagagtttcactcaccagcctgtttcatcatacaacagattggttcagtatctactgagacatgtctttgtcaattgtcattgccgctgtccagccacgaaatcacccatgtcagcttgctgttgcctcctaatgtttccttaattgaaacggatgccatggttggcctaaatatccataatttgtggtttggaagtgtccccatgctgttatgtctggtctagcaacatacgcttaaagacaaaagtgaacgatggagcgaacagatcactcttggcttctctaaggcgatggagcgaacagatcactcttggcttctctaaggaatttcagttgagacacaaacacttagaaatatgaatttatacgaactaagattgactcaaccgaactcaacactcacgagtcgaaattcttgagaccaatctaaattacagagtcgtacctcctctgtttctacatggatatttgatgtatcaacaactacggtacacggaactgaagactcatcaccaactagaagcaaacatgccttataaattccgatccctggtggcaaattaagtattgatgatctcgggactgagatcatcctttcacttggcatatcttgggttctgactctcaagataagacgatgtgccctgccaaggagctctgatacgtacctcatatctcccgccgcaagagcttggcgtacacgtgtagaagagacttgccctctatcttttgagtcccctgagtctctctttgctgagccttgcttcatgtccatcacagagtttatgatgcaagcagtgataccacattcctcgcacagtctcactagctcagaggcatcaccagacgctttatatccaaatctgtaattttcacctatggataaaggtttttgcaaacaatttattttgtgtgttttcaacatgaaatggtacagaaaggagtgggttgagatctttttaaagttcacctgccacaactccgcagactctgagctcctttgacagcttctccacaaactgtcgtggggtaagatgtcgcacgctggcaaattctatctcatactcttcaggcgctctgtctccacaatatgaggcccaagaggtaagcaccctttgtcgatcacatttggccactataggtgccctgtttgtacagatttagattgtcagtagtcacaatggaagagagcacatattgattaaaaaaaacgaacttcatcagcaggatcatatataatgtttaaccatctcaaacgaacaagaatcttaggttggaaaagagaaagggaagacatgaatactacaggtggggacattacctgggctcccaaccaagtacctcggccattccaacaaaagataatagatatggagctccaattcttgaagcttgaattgtaagctctcgatggccgatatgtaaggcatcaaacttccctagagcaacaatgcctcctgcaacatattatgcatcagatgatcatgagctaacatctattcttctaccaaatgtatactaaagctctttccaaaaggaaaggaaccgcacagtaaccacaaaatccccatcaaagagtagaaaggtgtgacttttcttaggaaattgaatgaagatgcaagaaacaagcaagctagatagatacctgacactggagataacccttcaactggaagctcaggatcatcttctcgttggcttcagtagaagaaagcaaaagaccccgaatttaacatcagtcagatgaattaattaaagatctctctttgagtccagaaacatcaatctcgacgatgacacttaaggatcagatatacctaatcaaggagagaaacaaaacctgaaacaattgtgaagaattgggacttctccgaatgttctgcaatgagacccaaatgaagaaatcatccgctgacgcaatttatggctgaaatgatgactcttcgccatagcctgagaaggcctgagaaagaatgaagagagctgcacaatcttagcaccacaaaaccctaatcctaaaccaatcgaattatgatgattgtggtcgcacaaatgctgcaagacacgtgagcctccgcacaacatggttccgtctcgtgcttacaaatcggacaagctcgctctcacggagagactcttcgccggagctaaatcacttttaaaacccagtggtcaaattttatgttcataagcataaacctctggctcaggcagagtctttggaataatatccaaattatttagcaataaaaaaaaagaaacacaaagacattgacaagagaacattaactgaaaacatgagtaacaacatctctttcataattttctatgtaaaaggtaatcaaacaatgctcgtatatgttcacaattgatctaaggatcagtttacaaaaggaacaccagaaggaactctctgcgcatactccacatactgtctcccaaaaaattgcttcaagtaatgctcctcataaggtattctctctgcaaagaaccgccacaccacaaccgcaaacgcaatcgctgaaattggattacagagcattacttgcgttcccacagaccaaatgagaaacccggagtaactcggatgcctcatgatttgatacactccttctgtcacaagcttatgatgctcctcccggcgaatttttataaggtgtgtgaacgatctacctgctgtgattatcgcggttttgcgaaggatttctccaagtatgatcattgtaagaccgaaattgctgatccaccagtgttgtttcagccccgggaagaaaacaatctcggctatgtactcgaggactgatattagcattgctaaagcatagtgtttgctgattaagagtgagcttaaagttactttcgatgctccgtgaatggctatggcgagaatgtactccgatgtgtggaagaagattatcgccaggaacatttgagttaactgtctgaacccggtgtcactaaatatctctgtcattgagtcttcacaagattacttagacctgaaaaaacatgcgagtaacagacccgagaaggtcaaagaacatcattagccaaaagatgggaaacaacaagcattcaagtaaaatccaatccaactcacttcaccaaagattttttaaaaccaaatcacaggaacactaatgtcaatcaatgtaacaaatctcacattaatgttcttctaacactaaactacaatgtttcttaatccaacaattgatctatgacaagcattcaaaacacagttttcacatgagaattgaagatcttactcaaagaattacaaacagatatgtatagctgatgaatagtacgggatttttttctattctgtctatacttactaatactaaaatttcacggaatcacaaaattctaatcactaatttcttcaattaggcttttcgtcctcgttttctgtaactcaactgtcaaaccacgagaaacgaagaattgagcaggaaccgtaaacgctacgaagatctaagacatacccagttgaaattgacggctgctacgagggaaaatgcgagaaagactggaaatttcgcagaggctgacagtgagaatcgcgtggactttgaaggagagaagcaaagtctacacctttaccctttattctttgcttgctataatcaaggaattacttttgtaaacacagagatctcttctgttccgtctgatcttccccgataagaaaagtcttgtttgaatcaaggagcttccggtcaaaatcgatgagaagaaacgttgcaggatcaccgaaatttcaagaaccagactattttagggttaccggttcgagacggtttgatccaatggtcccctatcggtttgttccggttataactgataacgatgagttaaattgaagtatttcttttgtgtttgaagcttacgattatactgctctggatagtggatgggcttgttattagttttaaaagtttttggtggaacctgaattatcatccggaccggctccgttaacccgagttcaaatttgtttcctttactacgaaagagtaaatagtgggacaacttcattaacgaacgaaccataatagaattcatgcttaaaactaacgggacaacttcaaatttgtttcttttgctgtttctttagttttctaaagagacttgattgaatggcaatgatcactagttaaacgacttctctgtttcgctagtaaaaacagagcttttatagcgttttaggtacaacaatcaatcaatctctctctctttctatcactctccgaaacaaattaacgagaccaaatattcttaaaccctaaaaccctaatcaaacaagcaataagcttaaattaagtaaaaaaggagcaaaagaaaccgcaaattagaggtactttctaaacactttcgatgacataaaacataggaatttttctatacattaccaaaaagacaataccatttctcaacgtggttcgtggtcgtcttccctccgacccgacccgttagctccaccagacaaagaagcaagcaaattgagatgatgacccggaagataattcccaactctagctgctgaagcctcacccattgcagctgctgcggcggcggaagcttgctgttgctgctggtggcggacgaagagtgtagctggttgctgctgctgcgcaaaaaccatttccggtggagctccggttgcaaagctccagacttgtccgaaatccggcctcgccggaacagcccaaaacccaccagaaccaccaccacccattaacgaagtccccattgtgtgtcccactgttaaccctcctcctcctccgccgccggattctccttcctccgctctgacgacacgtttcccgagagtaaacggagaagaagtggagagagaagcagtggagaaactcgccggagtagtgccagttccagtggcggctatgatagaaggctcagcttgacggagaagccactctatggtttgaccatcggacttgtgacctaactctctggtcaattgaaaaactcgagctgcgcaaatgattggcatacgaatccttcttcctcttccgtcaactttgctgtgtcgatctttagacggtggtttcttaacggcgttaagaggtcctttgtttgacgtctgctcgactatgatgccgttactcactgctccgtcgttgtcggccatggaattaggatttcgttatcactatctaactctctctcgaggagaagaagaagaagaagaagaaggaggtaatgatttgagaggaagctaggctggtggagacaggaaggagagcacatggctggtggggtcccacacagctcacttctgctaggtttttttaatttgtccggacgcggttgaagctcacgcgcttgactccggtgttgactatagcgttggaccacggtcgggcaggagaatttaagtttttaggtttaggagttagttggggtccccatttatatggttgcttgaattacattagctaatttacgagtaattcgattttggtttttactaattcttattacttctgtgacatgtaaccacaacaatgctgatttttacctttatttcttatcgataaaatttgttttagaatgaagtagtatttgttttatgctttgtaaccacagtaatcatacacgtttacctcatgagtttaatgcattttataggatgtaggaaaattagattgcaattaagacaaaagctgtttccagtttccacaatagttgaaaagatgaggaataagagacaatcaatggtggtaattgattggtgagtatactttacacctacactgattacgattctattttgtacgattttaatttatttatttttagtcatttataatttcacatctactaatttgtgattgtctcttattttttattttttatttaacttctaggataaataaatagctcaaataaaagaaatgacaattacgcgctttatgacacaggttactaatctgagtataacccaaccactgtgacccccacacgatatgcgttcgtgtgtgcaatttgtataatcaaaattcttattacccattaagcaataataaaacaaatcattccatttggagcgtggcataataaaagtagccgtgcccacctggcagatatgccgattttgatatgtcgttgcgtcgagattttttaaattgtttcgcgacaataatttctttcatgatgaatatataatgcacattatactatattatcgtcttaatatttgttatatgattgtgaaatcctttaacagaaataattgttatgatgattgccgtacccatacgatacaaccatgagtgatgtttaaatgccttttttaaaaaactatacccaagccaacttcttaaagttgtcgatataatacgtgaaggtgctatcaaaagcgatgaaaataatttttttgtgcatgcttaaagtatgatagatagtaaaaacttgaaactacgacgcacagctgaggaaccaccaaactagagactcgtagagaaattttagtcacatttcgtagctacttgctaggattcaattgaactagctagttcttaaaagaaaacgttgccacaaaagcttacatacaaattgtatgatacaattgacaattattaatgaccggcgcaagttaaaagttatattgagtgattaactgggatttgaatgattagttgtggggttagctggataaatgcatagaaatttttaatgatcaccaatttaccaaaaatgcttatagtatattctaatctttttattttattttaaaatagtaatatgtgtacgaatcatttgacaattgtcaaatgtgttaaacagctggagcccattctcatctgcctttatttattaatgggaatttgtatagaattattagtatgggggttgtggacgaaaatacaagaaagtgacacttctgtcaaaagagaatcaactcgtgtttcatacaaatatcttcttttctagttttctcatttggcgatgcctctctagattttcttagcttactccaccaatcagaataatccacgtcatctcgtttttttaaactgagaggatcgctttatcttctgccatctatttgactagcgtgactaagagacattcatagaccaactcgctttgtagtttgttgtatttggtattcgtttgatactaaattactaatcatgtgaactgtgaacgattctgactttggtataactcaaaattctctagtgacttgatttttatcaaacgatatacatgcaacgtaaagattaacgcaaacaatcgaaactttaatcctaatcacctgtttagaactcgttacaaataactcataaaaccaggttgttttaaggctcgcttggaatgacattaaagaaatggtagatctcttcactgtcaactactccgatctctgtggaacaagctgagcaaaagaccgggttaactttttcgctatcttcagaaccagtttcttgcatctcggaatctctccttcttttaccaacctttaagggcattgtattctgttgcaaaactgtgtctgtacctactttgcaattgaccacaaagactgctctgtactgtgtcacatactgctcgtgcctgcaaaagttttactcagattgtcttaatttggttccgcagtttataatactaaaaccaagttcaaagaagtgcaaagggatcaagtcataaacaaaacaatatcatcggattgaagaggaaagaaagaaatccattgtgataaagtccttatattagtctatcgcatgagtgttgtaatagcctaggcggtgtgtagtggatagtagttgtatcagcaatctttgagttagttagctacagagctagcagctagaaaaggtagttctggatttacctatgggttttgggattgggaattggactgagagtagaaatttttctcgttaatcaagtcatataactggtttggattctaccaagattgtcattcctaacaaaaacctagagcctgtaacaattgtcaagaatctcataatcgagtcaacattccagaatctaggcagttactatcaacatattagcaaacacattggtgaggattgaacaatggagccctagcaacattcggatagcatagcctggatgggatataacaatcgatgaagataaaacaccaaggtctgatgttgagagaggaaa

SEQ ID NO: 29916 - DNA, 3768 bp, Arabidopsis thaliana landsberg
catcatttgggctaccgaatttagtaaacctcatttatgcactccacatggaaaagtacaatcatcagctacagaaaccttgcttggggtcctgaaacaccataaggaggattttgatgttatatgtatgttgctgaccagtcttaggtatcgtgctctgtctctttttctcctttccccattgtatacatagttgtttgtttattcccatttaccctaagtgagatgtgagaatacactggattcttaggtcaagtttgtaaaagtaaacttacgaatgctcatacgtgaaaatattgacctgactacctggtttggtttttaattttggttttgcattgtatcaagctaatattgaaaaaggctttctgcttttgatctccacttttctcttgtagtaatatccaagctttggatactgcagaaagtaatggacattccactgaaggtatttggcttcttatttcattaccataggctacatgcgatacagaatctgtgttaaaatttgtcttatatatgtacaatccgaacgtattatataaaattattacaacacttcaaatttaagctggataagaaataaaattactggaatgtgaaacttaaacgatgtgaaatatgaactagtctggctgaattacatagcggacactatcaagttattcttggtcaaggcatgctcatcatcttcttgtactgttacaggtttaacttttgacagtgatcgagtgctaaagctgatcccagagtgggctagaagtgtaagtacaagaatacgtcatgcttgctttgctatctttgaaatcaatccatttttgtttctaaagtgcatgtataggcaccatttacgaactgttggtgcactactgaatagaaaatggtaactgaactattaactctgaaccttcaacacaaactttttcaggcattggttgtcccttttttcccttccagtactatttccttttatctaattgttttcttgtgtatgtgctgggaaactcttcgcatgggaatgaccaaagtgaccaaagcttgtgccagctataattaggcaattagaatatatttctgcctgttgactgaaatcaaattcttacaggtacaaaactggaactcactgatcggacctttgcttgacaagatgttcttggagccatccaatgccatcatggttaggtttcttagttgcatcagtgaatctttggcagatacgtcggatttggtccttccgcatgtactttcacatatgaagaagcaaaacaagtaagtacaatacgtaccataattgtgatttctgtggtaagaaaaactttcaacgactcccaaagataaaacaatattgattatctataatgtcaattctaatttagggtggatgcgagcttcatatccagatctgatactaaaagttcagttgacaaaactaaatcggagaaatctctatttgaccacctttgcccactgcttatattaagactgcttccccaaagagtgtttgatgatattgattcttctacaatttatggtaaattcctcagcggggactctgtgaatggtaagtatgcttatgcctttggttttcttttcctgataagagaggattggatatttatcataaggtcgtttgatccttattctcaattagattcaacgctttagctatattttcctaagcggcatgatcaagagtagatactgacaatcttagacttgattcactacatctatttcttgtcatgtgttacttatcagactaccaagacatcaagtttgaggattgtcaatgcattgctactttcattttggaaaggttattttactctcagtgatcatcaaatacaatctaccctaatacttattttatatctagcgaactaactctagtaatacagggcattttctaagtttgaatttgaagaagttcggaaactctctgctgagttatgtggacgtctccatccccaggtgctaattgactaccttccttgctcttgtattgttggtcaatcttgtctaaatgtttatatatgttttaagcctttgtttcaaagtaaattttatataccaagaaacaatggtagatgctccttaataagttttctgtcaagttcactgctatcttcatgcgaaagcaaagcacatgcaaaattttctcccgtcataactaggttctgttagtatggagaagggcttggtgcattttcttatatctgaaattttctaaatgcctacttcagttttacttatacaacagtctagcctactcttcatcatccaaatttgtaatatgtcggcacttttactcaacaggtgctatttccaactgttttattgcaactcgaaaaggccacagagatacaagacagcctcaagattaaagcttgcctattttctatatgcacatctcttatgggaatatatttaatttttcgtgtccttaatgaacatattctgtgatccctgttgtcacttgttcgatgcactatcaattggattagttttgtaaattacaagttttccgtcacttgcaggtccgaggctgggagtctctctcacacagagtaacacctaagatcaggaaagtcctggaaaatattttgttatggccttctgttgaagatgaaagtaagacaccggctagtggctattgatttatatctcaagctctgttacctttcacttcctcacttcatggctgttatttttccttacagtttccaaagtacaacatgggtgcattgattgtctggcactgatgatatgtgctgaactgcaacatcttaaatcttcaaaaacatctggaggagaaaaaatacgttcaacagggaaggacacatctggttagtattgatgttgtctaacaatagcttttccagacttgtgtatacattgtatcctgatctttaggtgttgatgcgtcaggttattctgtcctagattacactatccattgtttaatagaagaccgaagtaactgctcgtctatcccaaagctgagtactgatatcctaactggtgaaaatcctcttcctattccatttcgtctatgcatggcaaatgttatcatcagtgcttgtcaaaaaaaccctgagtcttccaagaagacttttgcccgaaaagctcttccgcctcttattcattccctcaaggtactttttgactgcttacactcatttcggatttggctaaatttgtttgcattttgtttagttttcaacaaaattccttaattttgtgcaggtcatatctgtaccggaggtccgtgcagcttgtatccaggtcttattctcggccacatatcatctgaagtccacacttcttccggtttcatctgatctgctgaagctttccctgagatttcttgaacaaggatccgaaaaggtaccagaaatctattaaacttatttctaacatgtatacaatggtatggaagtagacaaagagcttcacattaagacatgaaacttcctttctcaagtgactactgtcgacatttctgaatcccacaatccatatccgaaactgcctgcatctatccacatctgaactcgaatatttatgactgccttgaatttaaggttatgcggaagtcaaacattattctcttgttgcgtaggaaaagctggctggcgcaaaactaatggcatcactgatggcgagtgaacacgtgatactggaaaacatttcagagggattgctcgaagcaagatcagttctgtccaaagcatctttgtcagacccttgtcgatacgtacgtaaagt

SEQ ID NO: 29917 - DNA, 2670 bp, Arabidopsis thaliana landsberg
ctcatataatctcactgctatatttctcaaattgtgaccgttcactttataagataagatctaacttttatctttccttgaggatattatgagctttatttgtctacgcctctctaaatatttttttttgctattgtcaaaagctcgatttatgtttttattatattagttcttcaaccaatgaactaagattgagattatgaccgtgactgtgtcaaacaaggatattgtttagcatttgcgtttacatgtattaaaaaaataatgtaatcatattcaaattttgaatgcatgcagaacgaactattttcaaagtatgacatgtacttacagcctatgtaccactgtattacaaatgaaattgtaccacattcctatcatattgttgtttctaattatacaattatctttattaatgaatattgttttcatatttttcttctaaaagggtaatccacagtataattttcttgtatatacgactagacgtctcacatttttatttttttgtttgttaaaaaaacgtctcacatccgtccgtgatgtatggacattcgacagaagacttagggcttgtggttttaagagataaataaatacattcgaaattgataatgttttggaaagctgactttgagcgaagtcataataagaagagtcgataacagactgcggaatccggcaattagtgggatagttttggaagtatctccggtttaagttctcgactttcttatgtccaaaacttccggattttcgctttctgatgtcagtggttgaagtttcagtgaatcacacgattgtgtatctatcaatattttcgatctgatatattttgagtttttgaccaataactaaaaatttaatacctaacttgttttagtttattttatatttgagaatgtatatgtgttgtattggttatcatgtttttatttaataaaataaatttgactttgatgaacaccactacatccaaccagacaattatccactgcatggcctaaccgattttcagaaaaaaaataatttgagtttgtttttgtgcggaaaaagaagttttagacttttgtttttcaaacaaaattgatgaaataggcgactaaaagagttcaatttttttttaaaaaaaaacagatttgaaaaagatagttgtcgtatgcctcgattaaccctaactagaaaatatattctttctgtatcaaaatgaaacaatgcttatggttttgggatttttgcacagaacttaaaaaatcatttagttatttagaaaaatatattttaaagactataacagtattgtagctgacgtggcaaggtgaaaaagttgcgatttagggtttttggttttttgctcaagtttgatgccgccggtggattctccgcctccggtaggagacgtaactgttccggagcatgtttcagtaataccggtagaagatgtgagtcgagtggagactattgaggtgtctcaggaaggtgtttcaaaggttcatgatggtttaggtcgtcaaagtgatcgaagggaaaccgaggaaggggttcatgtggttttagcaaaggatgtgggcttgtcgtctgcagtttctacattaggtccatcttcttcggatctggtagagaaaaaatcatgggtgagagctgtaaagcacgttttcactaaacaaccgtttgtggtgacggaggtcgagggtcaatcaagagtggtggtgccaaaggaggtttttgcaggtgcaaaaccactttgggaagattttctcattggaaaatttcttaatgctaaggcaccacatgttggcaagattcacatgatagtgaataaaatttggagacttggagataaaacatcacttattgatgttttggaagtaaatgaaacaactgttaagtttcgtattagacatgaggctacacgaacaagaattttgaaccgtggtatgtggaacattgtgggcattcccatgttaatctccaagtggactccgtttgcagaggacgctcaaccagcgatgaagtcgataccgttatgggtgacattaaaaaatgttccacctacaatgtttacagataaggggctcgagtttctggcgagtgcagttgggaagccaatacgtttacatccaaaaacagaggcttgtgaaagttttgatgaggctcaaatattggtggaggctgatttaactaaagtattaccaagagaatatcatctcagtggtgaagaggagggagagttggatgtagtgataacgtatggctatccttggttacctccgaggtgtagtagctgtcaaaaatggggacatatgaaagacgcttgtcttgcagtttcatgtgaaacaaaaaactcacaatgctcaacgccactaagcgagaaggatattgtaggattgcaagagaacaacacaacaccaacgactatagttgctgtaactgaaacagtgaatgaaaagggaaaagttgcagagactcctaaagacgtacgaggggttttgaaagagatggatgaaactgagaaagaagaagggagggataaagaatggatcactccaagtaaacatggccgaagtccagggaaagcaaaaagtgatctaaagtatggcgaggtctctattttatctaactcttactcggctctctgtgggaaggaagagggagaagaggtggacaaaa

SEQ ID NO: 29918 - DNA, 630 bp, Arabidopsis thaliana landsberg
atcaatcttctcgggtgatgatgttgtctttgatttttcatatgttttgatattttttggtacaacaagtttttcataactgtacatacttgaaatattaacaaccatgaattctaaggaaaacattataaatttactaagaaaataaataaaatatgtcagacaagacgaagtggatagatgttgcacatgggattctgttcaacgaagtctcaggaaaaaacatttgtttagtgagaggtcgtattacatgcggcgatcagtatcctgatcatatggatctccagacgtagctgccgtacacgtgttagatttgcacgagatctatttctaatcgaaccttttggatttagagaaagtccaaaaacccaaaaagctgtggtagggcccaaagtagagcccagaagacttttgcggtgtcgctttcagacaaagacattggtggagagccatgtgagtaggacccatagtacatcgaacacgtcactttaaacgccgtcgcgtcaccgtttatttttacacgtacgctgcacctgcaaactcctttctttttacatgttctttttcatattttcacggtaatggttattatctgcacgtgtataatcatttaccgccgtcaaaaaagtt

SEQ ID NO: 29919 - DNA, 3485 bp, Arabidopsis thaliana landsberg
ccttcctttacacctccatacttatgatatggcttattcgtctccaaccattcaccagcatgatgaacaaaaacacaaaataatcaaggtaatgtttaaatgtcacacatttcacacctaggcacaatagcacgataactaacagtaacactcgtaaattctacgagtgcttataaaataagcagtgtaggtgttgtttacttttttaactagggtctgttagagttatttttttgtcggcaaacttcttttctcactagctgaagaataatatcttccaaaaaagtagagtacaactacaaactattataatgacgacgaggacacgctataagttacagagaaagacttgagaccaataagtttggggaagtggtacattgattgctactaagattaattgattaattatagttaaaatcccaaaaacttggttaactaccaactccatagccataagagagcaattaatggacggtgatctccaggaataacgcaccattaattctccatgtgggctcccacactggaaccctccccctgctaatgtgtctggtgtgactccacaaaatacaaatcctcgtagagaaggacactcctgtaattgtctgcatcattcattactctttccatttaccagtaaaatatttattttagttatcataaagttttccataattcgttttaccctattaactacacatgattaatttatacatctatacatacatacacaaaacatttatagactatgtactaaattcccgcggagatgaacgcggcattggttttggcttttttaaaagaatactaattattttcacaaactcgtgactattatgataggaataatattggtgaaatattatcttttacaaaaatgcatttattttggtaagcatatgtccgcttggcttctttagaaaaattcattcctctttgaatgttgttttttattcccgtcgtacagatcaaaaaccaaacagtccctctcgacctactggattcgcgttttgcttttgatcacatcttcgtcattgagcttcttcttcttctcgatccctgttggttttggttgttgtttttgatgaactgatagtggagatcagagatctggaaaacagagccgtgtgttactgttttggattgatggaactgaagaaacgttgtgagaaagttagggaaactgtgaagaaatgaagttttacatatcagcgacggggattaagaaggttacgatatcaaatcccggcgtcggaatcggtaaaggaagcggaggatgtgcggctgcagcggcggcgttagcagcgcggagattctctagtcgcacgttgttactgttgctgctgctgctcgctatcgtcctcccttttatcttcgtcaggttcgcgtttctcgtcctcgaatctgcctccgtttgcgattcaccactcggtatagtaaaacactcattcttcatagtattagattccatataaattttgattaatcgtttcttactttagtatcttcttggtaattaatttgcaaatctacctattttctggatatgaatgattcagatagcttcaaagtgtgaattcagttaatgattattgatatggataaatcttcttcgttcgtattgaatgctatgtgcttgtcatctttaattttttgttcttctttgtatttatttattttcgtatgattcgtagatttaataacactatttttttcatttgactctgtattcacagattgcatgggactcagacttttccgtgggggcgacacatctctggtaagcttttattatatttactctctaatactaatgaatagtacattttcaagtcaagtgtattaaaagttttaattgaaaacgtctttcttcactgttatttgatgtcggcaaatgttatatacctaggtactttaatttaagatattttcatttcatgattttggtttagttgtaatcattaactttcaaatcaatgggaaacaggaaaaaatctcaacacttgcacatagtgctgctattaaagggaagaagatatgattgttgtatgggaacccaaaaaaaaaaaagttattgccagctgttttacgttagtgttgctagtgtcgtatagtgagtgatgagatgagctttgcctcttggacctggtggggtaaaaaatatgtaaaaccgtgatcattatcatctatgtcattgtctaggaacagagagatgaaatagtctataagggtgaattttactgatttctgatttgtggattgtgattttgctctagtttctatccacgcaatgactttttcgtgtatcgtttactttgatagattcatttgttattattcgagcttgatctgatgtcaacatgtgagattgtcggaaacgagcccacaatgtggtttcttatcaactatttacctttatttagaacatagcatgccctagagagtgtaattagcagctacattgagggaactttaagttttagtgaataagaaaaaaacaaaaatcgtcgtatggattactatagatgccataaccaatgtagtaaactttagttagatgtaggagtttcaactttccactcagtttttttctgacaggatacgtggcagattttgctgccaccagaaagtgcatagccacttggttgctttctcctttatacgtagcaacaaacaggaacaaagagaaacgagacagacgaataattccaatacatgacttaaaaaaacgctttccatttgcactgtttctgttgaagcagttttgttgttttgtgtcgtgagttgatgtaaagacattattatgacagcttattagtttgttataactcacacggcaagaaaatgcgtgtttgtgtctctttcagaaaattggggaagagttgacacgggctctagtggaagagacgacagatcatcaggacgttaatggaagaggaacgaagggatcattggagtcattcgacgaccttgttaaggagatgacgttaaaacgccgtgacataagggcgtttgcttccgtgactaagaagatggtatgcccttctagctttatttcctaaatgatgtcattgtcgtgtcttgtacttcactatcatagatgatgaactttctacaaggttaaaactaagacatattgagattattagtgtctagatttaacacaatgacatggtggttttgaggtctattaatggtatcagacataaatcttctagtactgagaagacaaaagcttattctcttctatgtcaagcactcaagaatagaacttaatatctcactagctaagtggagtatttccacttttgctctgccccttctatttatttgacactttgttcactttaaattacagctgttgcagatggaacgtaaagtccaatcagcgaaacatcatgagttagtgtactggcatttagccttttcacggtatttcctaaaaagccttcaattggccttttccccttaggatttaaact

SEQ ID NO: 29920 - DNA, 1603 bp, Arabidopsis thaliana landsberg
atggatttgacaacttaaggacacggttgaatcggacatctccttttcttatgcacaaaagatgcttctttggggcttgctgatgcgaccgctaaaggaggattggtcggtgatttttctttgatgtgccctgaacttatccaggttcatcaagtttagcattttcaaggtctctggtatacaaaaatcagttcagataagtcagcttatataaaactccttccttgtagtcatatctggccggttcgggttcggctggtgctctaactctattgcttaggctaataactaaagcagcatttgagaaatcaaacaatagtttacgaaaaggagcaagtgagtttagcatcttaatcccaaatccaacattttcaaagtgtttaaagttccatttcttgctttgtttgtgttttccctgttacagtgatattcttagcaatctcaaccttcatagaactactctgcgtgattttatatgcatatgtgttcccaaaactccccatcgttaagtattaccgaagaaaagccgcttctgaaggatctaaaactgttgttgctgatcttgctgctgctggtatccaaaatttatcagatttggtaacatcaaactcctcaagaattctttcctttcttggtttctttaaaaaaaatcatcaagaatatgtttcttgattcattctttttttctacaactttcccactctttaaacattatttagcttcatgatttttctacgcagagtgatgatgattccaagaatcaaatgctaagcaagaaagagttgttgcttcaaaacatagaccatgcagtgaatctattcctcatatacgttttgacattatccatttttcctggattcttatacgaaaacacgggacaacacggactaggcgattggtatgcacttatcctagtagcaacatacaatttttgggatttggtcgggaggtatgcaccgctggtgaaatggctgaaggttgagaatagaaaggccttaacgaatgcggttttgacccgttatttcctcgttccggcgttctacttcactgcgaaatatggtgatcaaggatggatgattatgctcgtttctattttgggattaactaatggacatctcactgtttgtattatgactatagcccctaaagggtacaaggtaatctatctactcttccaaccaaattaatttgattatatctagaaacttatattttagtattaattattatagagttatatttagaaaacaaaactcattaactttacaatttttttgttttattcctttgcttttacaatttagaaatataacacaagtttttcttgcatatttaatctgattttgtattttgtgaagggtccggagaagaatgcattagggaatttgctggtggtttttattttaggaggagcagttgtaggaatttctttgggttggttatggcttattggcaagaaaaatgctttctgagttctcatccttttgtgcaattaattccgatgaatctgactctaatatggcgaaaaatgagaagcttggtgcctcgaacgtaactgtttattcatgaaaaaaaaagaagaagagaatactaagaccttaga

SEQ ID NO: 29921 - DNA, 1051 bp, Arabidopsis thaliana landsberg
  unsure (1)..(1051): unsure at all n locations
acacgaataaacaattgtaagggcttttcctcgaatatacttgttatatttttacatatacaaagaagtgagctgcataggggcctctgttactaaaattttcacataagagaccttgacatgccataaacgtgattcaacatgagtctgatcgtatcaatataagaatacaatacctgaggagaagatacgactgcatgcaagcagggaaacaacacaggtaccagcgtaggaacctctttgtcatccaattcaccagagagaagagccaaacacctcaaagctccatgaactgttgaatatggaaataaattcagcctcaggaaacctcgtaactattctcatgaaagagtacagaaatgggtagtaaaaaaagaatttgtctctagagcaaacaaaattgatcgaaaatatacctccattagtgttacttggatcgctaatcaacttcaggagaaaaggaactagctcaggccactcttctggccaatcatatgtggcaattgacgatatgtccatactaatagccgtacagatttttctatgagannnnnnnnnnnnnnnnnacagttgtcctcgaataagagcctaataacataaccaaaataacttcctaaactatctcagctggaaatccaaaacaaacaataaaagaagacagtgaaagtaccttttcctcacttgagacaagaggatattcaaaagcctcctcgttctctcgccaatgctttttaatgaactgctttaacagtaccgcagctaagtaacagtaggttaagaacttcacaagccaaaaaaagggaaaacactcattatatcaataaacaagctccaggggataacaaatcaatgacatgaaaaggatatttgacgcaatcccaaagagaggtctttgttagcagcaactctgcacaatgcactcccaaaccctacaagaaacaaacatcttttgggtaaaatctaactacaaaaaagaatctatagaagagaagcaactagctcgaaagtaacccaaacgatttaagcaacggacctggttgaagagaagcct

SEQ ID NO: 29922 - DNA, 3598 bp, Arabidopsis thaliana landsberg
catcctccaaggtaaagtattaagctttttcaaattcagtttcttcacaatcggaaataatgaagctttcttaatccaacattttctctttatccaacagcagatctattttttcctcatcagattcatagatttcgtactgttttctaaatccagattgtgtttaggtcaccgagttgaatcttaggtcgtattaatttgtagattttcctctttcgacatcttgttattcgtttatccctcagaatatgatttgagaaaaaaaaagatctctttgatacttcatttcagttaggacgacattaacgtgtgtgtgtctgtttgtttgttgtgtgcagtggagaacgacgattgttgaatgcgttattgtaattgttaagaattgaagttaaagtgttgtttttgaatctggtgaaatggtgtggtttcgtgctggttccagtgttacaaagctagctgttagaaggattttgaatcagggtgcttcgtatgcgacgaggacacggtctattccgtctcaaactcgttcctttcactcgactatatgcagaccaaaggctcagagtgctccagttcctagagctgttcctctttctaagctaactgatagtttcttagatgggacgagcagtgtctaccttgaggagttacaaagggcttgggaagctgatcctaacagtgtagatgagtcttgggataatttctttaggaactttgttggtcaggctgccacgtctcctggcatctctgggcagacaattcaggagagtatgaggctgttgttacttgttagggcttatcaggtgaatggtcacatgaaagcgaagttggatccgttaggtttggaacagcgagagatccctgaggatcttgacttggctctttatggattcactgaggctgaccttgacagagagttcttcttgggggtgtggcagatgtcaggattcatgtctgagaaccgaccagtgcagacccttcgttccatattgacaaggctcgaacaggcatactgtgggaatatcggatttgagtatatgcacattgcagatcgagataaatgtaactggttgagagaaaagattgagacaccaactccttggcggtacaacagggagcgccgtgaggtgattctcgatcggcttgcatggagtactcagttcgagaatttcttagctaccaagtggacaacagccaaaagatttggacttgagggaggagaatcattaattcctggaatgaaggagatgtttgacagagcagcagaccttggagtagagagtattgttattggaatgtctcacagaggaagattgaatgttctgggtaatgttgttcggaagccactccgtcagatatttagtgagttcagtggtggtattaggcctgtagatgaagttggctacactggaactggtgatgtcaaatatcacttgggaacctcttatgatcgacctacaagaggtgggaagaaaatccatctctctttggttgctaatccaagtcacttggaagctgcagattctgttgttgtggcaaaaccagagcaaaacagtactactccaatgatttagacaggaccaaaaatttaggtattttgattcacggagatggtagttttgctggacaaggggtagtctatgaaactctccatcttagtgctcttccaaactacaccaccggaggaaccatacatattgtggtgaacaaccaagtggctgtcacgacagatccaagggcggggagatcttcccagtattgtactgatgttgcaaaggctttgagtgctcccatctttcatgttaatggggatgatgttgaggctgttgttcatgcctgcgagcttgctgctgagtggcgtcagacttttcattctgatgttgtcgttgatttggtttgctaccgtaggttcgggcataatgagatagatgaaccatctttcactcagccaaaaatgtacaaggtttgtgactttattttcttaatatgttaacccaaaaagcatctactatggatttatgacttgttgaagttttctaatgtttttgttttgaactcccttgtcgcttttcaatttgacaggttatcaaaaatcatccttcaacccttcagatctaccacaaaaagctcttggaatgcggtgaagtatcacaacaggatattgaccggatacaggaaaaggttaacaccatcctcaatgaagaatttgtcgctagtaaggactatctccctaagaaacgagattggctttcaaccaattgggctggatttaagtctcctgagcagatctcacgtgttagaaacactgggtgagttggtttgtctttctttctttattttttttctctgtcctattgtctgttaaactttacacttttcttcagcgtcaaaccagagatactgaagactgttggcaaggcaatttcatctcttccagaaaacttcaagccacacagggcagtgaagaaagtttatgaacaacgtgcccaaatgattgaatcaggagagggagttgactgggcccttgcagaagctcttgcttttgctaccttagttgtggaaggcaatcatgtccgattgagtggtcaggatgtcgaacgaggaacatttagtcatcgtcattctgtccttcatgaccaggaaactggagaagagtattgtcctctagatcatctcatcatgaatcaggatcctgagatgtttactgttagcaacaggtacttttacctccatccttcccctctaggaattattgtgctcctagcttgttttcacagctcagagtaaactgacatagagatcgactctctattgctcacctatattctttttcatttctccaaaacgcgatcttacattttgagagaaatcccgcgagtttgttacttgcataccagaattctcattgtaaagattccctactaagctttgcttgttgtgtacagttctctttcagaatttggtgtccttgggttcgaattgggttactccatggaaagcccgaactcgttggtactatgggaagctcagtttggagacttcgccaatggagctcaggtgatatttgatcagttcatcagcagtggagaagccaaatggctgcgtcaaaccgggcttgttatgctacttccccatggttatgatggtcagggacctgaacattcaagtgcgaggttggaacgttaccttcaggtaaattcttcctagatcttatgggttatggtgttgaattagtgaaaatatttaatcgcattttgattctcttcctgactataattatcttctgttatagatgagtgatgataatccctatgtcataccagacatggaaccaacaatgcgaaagcaaattcaagaatgtaattggcagattgtcaatgccacaactcccgccaactatttccatgttctgcggcgacaggtaagacctatttctgattatcttttttaccggtcaccaggtgttgtttccagcttacaatttcttaatgtcactcatgttgcagatacacagagacttccgtaagcctctgatagtaatggcaccaaagaacttgctccgtcacaaggactgcaaatcaaatctctcagagtttgc

SEQ ID NO: 29923 - DNA, 1632 bp, Arabidopsis thaliana landsberg
tattctacactttccgggcatttttgtttctctcgactcaggttgcttcaaggttataagtgatgtaatgtgcgatttcattgagattatacttggaaagggaggatgtatatttccttcaaaggagataccacaagtcaccatttggttgacgtaccacaatgtccctgagtcatcaccttcttcctctttgtcctggtcttgaacctggtttcctagaaaactggagccgcaggaacttggaatcagactcgttttcgtccattcgatagcctgtcaaaggttttagtttttaaagaacatcagatgccgagcataggtgtctagatgatggatggagtttatggtttagagattagggcaatggttttatggctttgcgacttcaagttcacgctacagcacatatagtgtgtaaggttgcacttttccaaaaccaaactcaatgtataccagtatgtattagtcgaaagacaatccaacagaaaaaaatagatccaaactatgtaaacaagcttagaatgcacgtgaatcaaaagccaggaaaaatataaacaaagtggcaagatatttggagatgcttatcatttaccttgtaaggcgctcagagcagtcgcagcacaagcagggtttgtaaaatcaacaaagcaaagaacaataggatctccgttccgctgcattgccccataaatatgaacccattagcaggtttatcaaagtaattactttctataacaagcgattttcagtaatatccaaactttgaagcagggaaaatcttacatgtttggagtctttggtcacaagtctcacttctctgtatcctacaaaaggtcgaaatatatctagacatcggttaaggaaagtggagagaaatagtttccgtaaaagaaaaaaacttgtaatgtgtcataaaataggatacgagctacttccctcctagagcaattagaaggaagtccttcaacatataaagtgttggatgcatctgaaggtaggttacgcctaccaacaggttctgggggatcaaaaccaatggtgtgaccatttggaccatggtctaaagggagaactccaccacgtctcaacataaaatcatctatggtttgaacgttacctcctcctcctcctcctgctcctcctgatcttcccatggaaacagaaccaccttctcctgattgcttcaccaaaaaaaaaaaaacttttcaggtcaataaaaaaagaagaatgaactgaaaaacttgcaagaaagaatggtaccacgctctggagatagcgatcgtaagcggaaccgatagttctagtatcgggaacatcgagatcctcatctggcggataataaccaccaccgtgccctatagtcattgttgatgatggagcttctacaagacgacaagcattgtttatttcaagcaaactaggagcataactatctatgtgttgaggaaacgtgaaaggactcaggagcttaccgaaatcggaacggggacgtttcataggaccaccaggaggatgatgttgctgtcgctgctggttccagtacccatccgccatggaaatcgaaggatcagaagctactaaaaaggaaaaatcaatggaccgataaaaaagccctaatgccaaagaataggt

SEQ ID NO: 29924 - DNA, 3052 bp, Arabidopsis thaliana landsberg
gtcctccttcgaggtggagatccttccgcccgagttgccgtccgagctgggcaggatctgccgaaggtggaaacgtcgccgagggtgctgctgcttcccccgccgatatccgaacctgcaggaacagtttgtctgaagtatgcgtatgtttttcgcggtcgctggggcctaaacattttaacgccggattataaagctgtgttttctttcctcttgtttcgtgtgttaagacttgtgtggttgcagagtccctcgtccgagcatgagttactttttgcggaaggtgatgagtgaggtatccatatcccggaggcgtaggagtccctcggctcgatcggccttgccgcttacgtgtactctcgtcgtttttaggacccgctatcgaagcagtcggaacggcacgaaagtcgttctagcagaaaagttttcaagagttaggacttgttcggcagcagaatccctcgttcgagcgtgagttacttttcacggaaggtgatgagtgaggtatccgtatcccggagcgtaggagtccctcggctcggtcggccttggctgcttacgtgtactccatcgttttcaggatcccactttcgaagtagtcaaaaagcacgaaagacgttcaagcagaaagactttttccgaggaaaattttgacgcagagggggtgcccccttctagcccccgagggagggtcgggctttgtcgaggcaaggctgacccttccttgatggttagactttgtttgtgaacgaggtgtacgaacgacttggaagcatcttaagggtagaagcgacgtagctgttggatgttccaagcgttgtcgtagacctcgccttgactgttggccagcttgtacgttccgggcttcagaaccttggcgatgacgaatggtccctcccaggggggcgtgagtatgtgcctccctcgagcgtcttgtcgcagctgaagcaccaggtcgcccacctggaggtctcgggatcggacccctcggacgtggtagcgtcgcagggactgctggtaccgtgccgagtgtagtaaggccttgtcccgagcctcctccagctggtccagcgagtcttctcggctagcttggttgctttgatcgttgtaggccctcgtcctcggggagccgtattccaggtctgtgggcaagacagcctcggccccgtagactaggaagaacggcgtgaaactcgtggctcggctcggtgtcgtcctcagactccaaaccaccgaggggagttcttttatccaccgcttgccaaacttgttgaggtcgttgtagatcctcggttttagtccctgcaaaatcatgtcattggcgcgctccacctgcccattttatcattgggtgagctacggtggcccagtccacacggatgtggtggtcttcgcagaagtctaggaactttttcctagtgaattgtgtgccattgtcggtgatgatggagtttgcgaccccgaagtggtggatgatatttgtaaagaacgccaccgcctgctcggacctgatgctggttaagggtcggacttcgatccacttggagaatttgtcgatggcgaccagcaggtgtgtgaagcccccgggcgccttctacaagggaccaatgaggtccagaccccatacgacaaacagccaagtgataggtattgtctgcagggcttgagcggacaggtgcgtctatctcgcgtataattgacaccctcggcaggagcgtacaatcctagtggcgtcggccaccgcggtcggccagtagaaaccttgtcggaaagcgtttccgacgagggtccgaggtgctgcatggtgaccgcaagcccccgagtgtatttcttgtaatagctcttgtccttgggcgacggatatgcatcgttggagaatgcctgaggggctgcagtggtacaactctttttcatctcccagcaaaacgaacgacttggtgcgccgagccagtcgccgagcttcggccttgtcgaggagcagctctcctcggaggagatattgcaggtacagggtctgccagttttggtttggcgcaacccattttgctctcctcgacgcgcaaggcctcacctcggcgacgagggtactcgggttcgggcgcgtcgttgagttttacggatggttgatatatgtccctggagaagacattcgggggaaccgtcgtccgtcccgaggctatcttagccagctcatctgcaatctagttgtaccgtcgagcaacatggttgagttccaacccatagaacttatcttccaaacgccgaacttcatcacactaggcctctattttttgatcacggtagtgagagttcttcatgacttggtcaataatgagttgcgagtcgccacgagcgtcgaggcgtcgaaccccaagctcgatggcgatgcgcaaccgattcaccaaggcctcgtattcggccacgttgtttgacgccggaaaatggaggcgtattacataacgcacatgtttcccgagggtgagatgaagagcaagccagcgcctgctcctattttcataagcgacccatcaaagtacatggtccaaagttcgggctagattggagctgttggcaactgggtgtcagtccattcagccaggaagtcggccaagatttgggattttatggccttccgaggggcaaatgaaagtgtttcgcccatgagttccactgcccattttgctatcctacccgagcgctctcggcactggatgatctctcccagggggaaggatgacaccacagtcaccggatgagactcgaagtagtgtcgcaactttcgtcgtgtcagaattactgcgtacagtagcttctagatttgtgggtagcggatcttggtcttggatagcacctcgctgatgaagtagaccgacctctggatgagcagtgcatgcccttcttcttgtctctcgactacgatcgacgctgaccacctgagtggttgcggctacgtagaccaagagagcttctccctcagcggggggcaccaagatgggcgcattagtaaggagcgcctttaagttttcgagggcttcctcggcctcgggagtcc

SEQ ID NO: 29925 - DNA, 739 bp, Arabidopsis thaliana landsberg
acagaagttgaagccatctgacatccagggacaagtggatccgctatttcctgaagtcattttgtgtgttgagatttataacagtcgcaaggttaaggtactgtattgttctgtaaatctttgatgcgggatatagaatattgactgaattctcgtacatactaacaatacttgtgtaaatttttgttcagacccaagaatttttggttctaggacgtcaaatgttgactgagttgaaggacaatattcactgtgctacagaccaggtgatgcaaaaggctggaaagtatgatccctctggatacttcctcatagaagtaagaattcatctcgtttctgtatcttttgatgtttaagtaagtttaacttctgcgtcgctggtttaatcagatgctttttgctcgtctaggatgtctttcacaatgatttaaggaatccctcggctaaagattacagctatcctattttagattggctttggaactcgaaagatgaagctcttaaaaaatgggaatgtgttttaaccggcgaattacagaaaaagcagaaagtggttctaggtgaagcgaaatctgtggatttacctcgttacagaactgcagacatgcagagtacacacttctgtgatataagattcagagtcggagctagttatgtctattgtcatcaggtaaaatcttctctctttctcttttggttctttaatttctcatcttatgaaaacatttggcacagactc

SEQ ID NO: 29926 - DNA, 2225 bp, Arabidopsis thaliana landsberg
  unsure (1)..(2225): unsure at all n locations
tgtgacagctttggttttaactctctcgatgttattgtcactaagatcaccatccttggactccataagagagttaactaattcatccaaaaattgccgctcccacctcagtatagaaaataatagcctttctgcaacagaacacagagccagatatccaacttctgatggtgatagatccatcaagcgtgaaaagccaaatgctccacttccactaaccacttgatctaccccactatcagatgggaatattgacttaagaatatactcaggtgaatatatattaaaatgcttcagaaaagattctcttgagatgccacgcccgacagaagaacaaaatgtttcagaattttggagcacctcttggtgtagtagcttaggtatctgaaagagaatcaaaagatcgaacccaaaggcagaattcagtgaaaactagaggatatctctacttcaacacttttttattattatattgaattgcaccttgtatattatcggattttgaccaccagaataatgtacatcctctagctcaccaaagggatggggcaaaagagaattggaagtcactccaaagtagagatacgagctcccttcattcctttcgaacaactctgaatggttgcaaacctggcatcagaaacacaaacatgtactagcataagccatagacttgtcaaacctgacaccagaaacgctggatgtcttctcatatatgttgtttgagaggtagatatacctttatgtaaaagaaagcagggaagttaacccgactagacaagagagcttaccttccttagttgaatgacaatattcattaaattcaatactttcttatcagtaaattgtccgcggttgctatcaaacaactcagccagagaaattttgttcttaatagcctgataaaaagcttgttgtcgagaactgagcttgcagtgtactgtaacttccgtctttgtagttagctcagaaaccacatccttttttacccgtcgaagcatgaacggtttcaagatcgcatgctgtttgagaaaagaaacaaaatgtgagtgactaaacaactttaactcgtaagaagatgcatatgcagtagaaatttgaagagttcctggagaaatggctaaatggaattaacaagtccttctaacagcaaaggaaaggacagaagattggctgttataaacaaaacaaaaacgagaaccccaggactaggagtgaccattgttgattaacttgggagattctcgtccatgacatatgcatatacatgaatgtagttatataaaaatcaatgtcgttttctaaaagtctcaagacggaatcatgcagtgaaaatggaaagtaatgcgagaccctaattaaggaggctagcaaactaaaagacagaagcagacagaaactaaaagaacttgaagagtcgccacaataatgctgcaatcagaaaatgaaatctcaccagtctgttaagctggtgctcatttaaagtgcctccgtgttcagcatgattctcaattctgttaatcaatatggatcatgtatcagaaacaacttcctagattattgattacatacttttacatggcaattaaagcagaaaaatagtactaacccttttgagaaccattcattaaattgatcatggttgtcaaacaacattggcatgatgaaatgcagcagggcccataactctgccatgttgttctgaattggagtaccagtcagaagcaatcggttccgacagttaaaactaagaagggttttccatcttatactgtcaaaaaaaggaaatgggacttgcatgagaattcagcatttcaagtgatctacaaggaaattacaaaaagtaacattctcttgcatggcaccatcaaacactggaaattcaacagactcaagagaaaagtacgaacctggaggaactcttgattgcttgggcctcatctagcaccatatattgccacttcacccggcgaaaatacatttcatcagtgactaatagctgatagctagtannnnnnnnnnnnnnnnnnnnnnnnnnngaaaaaaagaggggggtgggggtcaacagagaacctttagaaaagggcaaagaagtttcattgatcgtgcagcctttgagagaaccatcaattaaataacatgaattctaacaatagacatggtttcctctagagcgataacatgtaaaattagacacagatggggcaatactggcagtacatatc

SEQ ID NO: 29927 - DNA, 2345 bp, Arabidopsis thaliana landsberg
aacaccataatccaatccaatcctgatctcacctggcttcactctcagaacatcttcaatcataaaatcaactaacaaactactgttcttgacccatttatctttctctttctccatttcaaaacatccgctgcatttcgtgtaaccccttttcgggttcttgcttgataagcacgcgaagttcctgcattgataatttccccatcttacatttctatcatcaggaagcttccacagtgactcattgatcggataaggtttttggtaagtcattgatgctcttgtcaagcatcgtcttctaggtaacggatcacacccgttaagcatcagcttctgtgctaagttccaatcatcatcgcaatacgctccaacgtcataatccatatacttctctagctccatcttcatcaacgcacaagcatgaccaatagtgttgtaaactctctctgttccaaacatgtttatcttcccaacacgattctcctttggtgtaatgtactgccttatctcttcaatgagaaacttattgatcaaaggctcttccttttccgttgagtttctgattccttcgggttttggcaaccggatttgccttaatccgatatgagcataataaaatggcttcatcacttcatcttcaagaaacttcttcatctcctttttgcttccgtctttgctcttctccatatcttttaccgtcttctctagcttctcgtacaagttgtccatcttttctagtacttcatcaacacgatcgtgcagcgcctttaggtcgaatccttcgctgctgacttctttgattgcgtacatattgaggcaagtgtcttcgttttgcaagaagtaacccacggaatggaatcggtagagacatgagaggctcacagtgatcaccagtaaccctaagatgacttgtaatcctgccattagtcttcctaatcgccatctcggcaaacatgctcttcccattacctcttctttaccaaatctttcagttattggttctaattttgacataagaaaacagaggaaagtgtgaatgttttgtcatgcttcagagaatatggaaaaaacagaggaaaatgtgaatcttagctcaaattaactaaacagagaataacgctcctaaagccaaatcttgaagaagtgataagtgaaagaaaaaacattattaccagataagaattaagaagagatgctccttgatgttttgatggaaacctttcgtctctggtgtctcgaggaaaagtagaagagattcatgagtttgttttttcaacctcaaagttaaaacgctatttgaaatagagatccgagagctgcggagaaaaagtgtgtgttttgtgtctgcttgaagaattacggagctggagatacttaaagctgaagcctaaagctgacttattgtgactaagttttaggacaaaatccacaaactctctttcaccaacgtgcctaattccttacttttcggtgttcttctgtgtctttgaatataattcaaaagtcaaccatagctgataagtatataatataccaacatgcatacttaaatttttttaaaaaaaattgttaaatataagagcacaaatctcgtaaagttgttaagaactttgctttgctatagtggaaaacaaactaacaatatcatgcaccttccaaattgaagaagagattcgaggcagaggcagacgcagacgcatacgtcggttaacggttgggccggttataaccggtatatttcccgaagaagtttggtcttctcgacctggttgctaaccattgcgccggaatctattttcttggtcaaaccgaaccaaagtcttgtacttaaatcttgacgatgaaaaacaaaaacaatcatgatgatgagtgtgatgcgatgattaggtggaagttcaaaatacgtcttttcttcccacctattgattagacctttgatttttttggggcgtcttggttcaatgaatcgagtttcaacacccaacgttgttttgtgcgataaattttgttttttaagtaccgtcaaattataactatgacagaatttttaaaacgatatagctacaattgattaatcaatctagtatattcaagctttcgacatcataaaccagcactaaatttaattcaagacagtgaataacaagagccacacccacatgtgtactatggtttcgtgattgtctcgaactaaaatgacgtgtccgttcttctctccttttatttttttcttctttacgaaaaaatgattgaacctttttttatattgcacttcaacggttttcacaagttgatgtttctgtcttatagtccataaataagttcgaacaagaaaaatggcaacc

SEQ ID NO: 29928 - DNA, 396 bp, Arabidopsis thaliana landsberg
ctttgggtactacggaccctctgccatccattgcagcagagccgtttcatgagcgggggggctaggcgcagttctttgaatcaaacgttgaatgaaatcgattcttttttagatatcaaaatggaaatcggataggatagatggatggatctatctttccatttatatattactaaaggatttatatagttaagtatcgtagcaagaagccccaaatccttgatttggccaggaaagactgcactgctttgggcccaggatgcgaagggaatgagctcggctgcttctcctccacactgatttttctccgcgcctgctccgcatgcgcttcgcgcgccattggcgctttgctctcctcttattcttcattggacggatcggttcggatggactctc

SEQ ID NO: 29929 - DNA, 2808 bp, Arabidopsis thaliana landsberg
  unsure (1)..(2808): unsure at all n locations
tacaatccaaattggagaattcatcattgttagagaattaggcagttggtaccacaaattttgtgctgaaacttttcgacaattacgataaagaaaacacacgttcttttaaaattattttatgacatgatcttgaatcaattcccgtttaaggctatatataatgattcaaaccacacttgaaattttatttttcctacattaaatcaaaatctccatattgataagattgtgaggctggtttacacgggattgatgaaagcctcaagagtaaaaaggtcacctctctcccttcaaaatttttaggtgccaaataggtgcctcgagggaaaaccatttcggcacctaaactacaagctgacatttgtatattcttgtgtctttagcgaggaaatcatcacaaactgaattatgacgtagaataaaacaaatttaaacaaaatacaaatttcgatataaaaactagaaaattcatctaattcattggagtcaaatcattttaattagctttaaacaatctgtcttcaattgaactttggccgtatgacgtggtatgagtgagttcatggccatagaagcacctctaacttagtgtgaagagtagaaagaggagagagacgacaagtattaagaggttcgcacgtactctctctgctgacttctaaataattaaatagaattaaaagtaagctacacaaagttgttatacgttataatcctttttgtcttaataaagataaataattgttacacgtacgttataatcttggattcattatggagttgaagagttatatcatctttattttttttctctgaaaaattaccttcaaaagtcacttttttttgtaactttactttcgatatccacaaaatacagagaaatcctgtgaagtcaaaataaccttcaacataactctcatatatttatttatgaagagtatttatttatttatttacatacattagattttaaattataagaatttattttagtctcctcatcgcgagaaatttgatttaatattttatttaggtttcataatttataaacttgacgatggtgatgacatgctatattgcagagtattttttatttaaggggaggtaaatggaggtaatggataaagttacaaaacatggtgatttggtttcctgccgaaaaacattttcctaatttttttcaaattttcgaataaccctttgtttataactgcaaaattgggatcttgaaccaactcttttacctatgaatttttgggtttctaacgtaattatatttgtagcttgacaaccaatctctcaagtagccccttctcttcaaccaacctatgaattatttaagttactatgtgttcttcattttggttttgggatttggttttataacttatttcttgttgattaagaaaactctcaaccaaacaaaataatggagggtgagagtgagaatcaaacccagagtggaatggataaagagcattagcatcatcaaaactttaaactcaattttctaaatttgtctaacagataattgttataaaaaaagctgtaattctaaaaaccacaacaccagaaatattaaaaaaaaaaaaaaagataaaaataacatatagaaagaacaactaagcagagaatgaaaataaaaaaacaactaaaaagaagttataatttataacgtatctgtcgttaaatctgttgaatcgttcttacaaaacacaatcgttacaaaagtcaattgggttcccacgaatcggtggggcccatcacgacgaggtctcttcacataatctcatctcttcttattgatttcacataaagtgttttgtaagaaaatgtttcaatgaaagatttgtctgaaaatttcaggagaaaatgggtaagaactggttaacatgtgtctccgtggcttgtttatctccagggaaagacaaaaagaatcaagttggtgtttcgaatctgttctctaattattgattatgattatgtaacctgattatgaaatcaagattgctaattgttttgattttggtcttttggttttgccttgtttatcaagaaacccgagaaaccgaagaggaaatggtcgtttgggaaacaaaagagtagagaatcttttgatttccctctggaggagactccaccggttgacccttcaccttcttctgttcatcgtccatatccaccgcctcccccgttgccggattttgctcctcagccgttgttaccaccaccgtctccacctcctcctcctccggcatataccatcaatacaagaatctatggtgagtctaaagaatcaaagaatagacaagctttagctcttgcatcggctgttgcagccgaagcagctgtggtagctgcacatgctgccgcggaggttatacgtctcacgaccccatcaacacctcaaattgaggaatcaaaggaggaaactgccgcaatcaagatccaaaatgcgtatagatgttacacggtatacaaaaaaatcactttttttttttttggacaaaatacaaaaacaatcactaattcctcttattatgaaagacttagtctaatattttgaaatttcataggcgagacgcactcttcgtgcgctgcgaggaatggctannnnnnnnnnnnnnnnnnnaggaaaatacgtcaaaagacaaatgaatgcgatgcttagctcaatgcaaactcttacacgtttacaaacacagattcaagagaggaggaatcggttatctgcaaagaacaaaactcgtcacaggctgatccaacagaagggtcaccagaaagaaaaccatcagaatttggtaa

SEQ ID NO: 29930 - DNA, 2181 bp, Arabidopsis thaliana landsberg
ataagtatcaaaactctacgatttattttataggtatactctaaaaatgtatatataaatttgattttctacagttgaaagtcatataattatatctttatagacaactttcccctttagcaatggtcccagtctcccatcacggttatagactctccgagaaggtcactaaaaagttgacagcttctacattccactttctcgtcaccactttcacctgaatcctcacgtcactctttctctctaaaactccataaagctcaaactttttctcattctctctctaaacctaaaatctttttcacactcttcttcatgttcaagcaatgggaaacctctgttctttgtttactccgccaaaacccgtgaagaaaagaaaacccatcacaaaaagacaatcttccatcggagcttcttcttccgggtcgggtcttaatagtaaccgttggaacaatcgggtcagatcatcttcttctagaagagacaacaagttcgaagatgctatgattcaagaacacgctcttgctgctgctgctgttttgttccgacagcaaaaccggtgggggaggatcgttgccgtttgatcggtctgcttcacaacgttaccaaggttcttgttcgaagaagaatcagttgcctcgaagctctagttcgaggtcaaggtcttctacggatcctctgttacaacctcatcagtttcttaatcaggttcttttcttcttctttattcttacttttctttttttacctcattaaagatatgtcttaattagttttcttacttggcattaaatgaaattttatagtatagtttcttgaatttttgttggctcaacgtattaagtggttacaaatcaatgtgagtcttgaaacttgctgactttatatttgtttcattggttattgttaatggtgtgaatgttgtgacaatgagattatattatagaggatgataagcacataaccagagtaaaccggtgtcatagaaaagagatgtggtcttgttatggctccttaactaatgggattgtattctccacgatcttagtagtggatttagtggttagtttctttcttatttttgtgtatttaaagacttcaatgtcaagttaaggaattagacttgaaaattgacaaaacagagtttatctctttggtactttgtgtgttcttgtgttaagacaaaacacatctctttggctttgaggagggaccacctatcagaggattttgatgattttgatgttgaaactatgatcataatcaagattctaacttgaaaccttttatagttacttaacattttagccaaacatgcccaaatatagtgttttgagaatattctcacctaatcatacattttcttggagttcatattttttctcgaagttaaattcttttttttttactgatctttgagtagggtataaagctagaggacttggaaacaaaccattttgtccttgttcatggaggtagttttggcgcttggtgttggtataaaaccattgcacttcttgaggaagatggttttaaagttaccgctatagacttagcaggttgcggtattaactcgattaatataaatggcatcgctagtttgtcacaatatgtcaagccacttaccgatattcttgaaaagcttcccataggagagaaggttctgtttctctttgcattcatcttttactcctttcccttttatttcgtctttgaaaattggtaaaatgtattatgtaaacttgtaggtgatattggtcggtcacgattttggtggagcatgtatatcttatgctatggaactctttccttcaaagatttcgaaagcggttttcctcgctgcagcgatgttaacaaatggtcaaagtacactcgatatgttctccttgaaggtttgctttctcatatatattcttctcatgtttcaagctttgttccgcgccatagtgatttcgattacaacacactttgcaggccggtcagaacgatttaatgagaaaagctcagatatttatctacacaaatggtaatgaaaaccctccaaccgcaattgacttagacaaatcacttctcaaagaccttttgttcaaccaaagcccttcgaaggacgttgcattggcttctgaaacaaaaaggtcaattccatttgcgccggttcttaaaagctctctctttgaaatg

SEQ ID NO: 29931 - DNA, 517 bp, Arabidopsis thaliana landsberg
tcagaaattatttctgaggcagaaagtgtgaagttggaagctgtacccaaacctggggatagtcctattattgttaatgcccagtctagttcggttcatagagaaagcgaaacggaatctgcttcacaaaggatcctgccgctctaaagacacatgaggtactaaaatttcctttgctgaccttgaaaaagaactacaagtaatgaaatgaatagcttacagatttaaaaatcagaagatgaatgtctcagtattccttgtttcatgaaatatttcttgtctcgtccttttcatgcattggaccagaatgcttgtattttgaaaggggatacacctatgtaaagggattctgctacattgttggagttagaagcactcctttgttttgtgcaaattcttattatattggttgaaatgggatattcatatggacattatgttaactgtaatgaatcaaattctgatagaaactgattttttaagaaggaatgtagggaactaaaattagatgaatgag

SEQ ID NO: 29932 - DNA, 573 bp, Arabidopsis thaliana landsberg
ccttgctcttttttcgcttggatctgcccttctttgaagcagtcaccttcagtgtcttacaattcttattcaccatcaattgctttagttcatttgattacccttcaaaatgtatgtttcttgtttatgatgtcctaatttcataactttgcttccttttaggtatttacagctgagtatagcctgatatgcaagattgctggatacagaaaaccatatatctctttaatggatggcataacaatgggatttggtcttggtctttctggacatggacgctaccgagtgataacagaggtgcacatagtaaacccttgttatgtactgttgtgtggatggcatttatcatgcatttcttacctctgtcactgttttgttctccatttccagaggacggtcctcgcaatgccagaaaatggaatcggcttgtttccagatgttggattttcatatattgcaacttatagcccctggcgaaggatctgatggtttgtttcatatagctgagacccttaacaatttgcttacaaattgctggagaatattattcaccaacacttttcaaccttaaat

SEQ ID NO: 29933 - DNA, 3338 bp, Arabidopsis thaliana landsberg
caagtcatagcagggtatgcatgtgttatcccactcaagatttttttgtaggtacctcaaactaactttcatctgcctgttggtgtgcgaaacagggatgattcaagggaaagttatctgcggaaagaagttgagatattgagaagtaaaccccattggaacaaagcttacttttacttgtgggatgaggtatgcttcattaatatttttcactgattgtcaaaaggatgtagttttactgtggtaatagtaacattctattccatttctatatctcatgtaccatcgttgatgtgttgtcttacttttaataactttttgacatctttcttattactattcaattttttttggcagccactgaatatggagcactttgacaacgttcgcaagatggccagtgaaatttacgcctatgccccggattctcgtgttttgactacatactactgtggtatggtttattttttgtggaattcacatgttttaattagtttctgtctctcaaatttacttcctattttctgctggggccctgttttattggttctcatggctttgtcttcctgttgatatgagctccaaaattggtcaatggtgaaccataaatgtagtttgtatcagtaggttgatcagtataccacactatgttattatgcagcccataatattagtttattgggtaacgttagtttgtaagcagttttcacaatggtctggtagttgtatcatatgcttcattacagagcttatggatattcatacatgtatgttggtgaaaagggaactgaaatctactaggttaaactgtgactatgaattaaagttcataatttaacaatgctttagctacttgagaagtttagtcaaatagtcttactcttttttttttgtaggaccgggagatgcacctcttgctccgacaccttttgaatcttttgtcaaagttccaaatctccttcgaccctatactcagatatactgcacaaggtaattgatcattcaaattctcttaggtggcagtaatttaatcattcaaataaattgccttctcttacttaggttttgtgattaatgaggacaagatcttaaccttaccaatctttaattttaatatccggtgggtgtactatgtgtgttgtgtttatacctattaaaagacacctaattggttcagaataaattgtatatcatctgtcagttaacaaaaaaatcatttcctttgtcaatatattttgagcaaatacgtctttggtcttaaattttcccttttccgccactcacctacttggatagacatggaggcaggtgagtttagtatatgaatctatgatttaagaaagtctgatgaatttggtgaacttatagagaaatctgttttcaactaggctctcgttactttaatcttttatctcagtgttgttaaatcatggtttgatattcagtgagtgggtgcttggtaaccgggaggatttgtgtgaaggatattcttgacgaattgcagacagagaatggtgaggtagggtctctcagatctccatcaacccttttacttcttctttagagaatattatccattgacccaagtctatgttattctcaatgaggtttgaaatcgtctggtccatacacctgaagtatacttaactgaatagaaataaagactagagtttggtcaatatagttaattagttatcataagctttgaaaacgtttgcacgtgtacatgaatacatctagctttggtagtaatggaatcatcatatgtcgatcaaagtactgtagttatggaatggttaaatttgattcaaggtcatcttaatgatgtgctcattagtggtcctgtatgtgttagcattttagcaacaagaatcataaagaggacttttcttgctggtgcaggaatggtggacatacatatgccttggaccttcagatcctcacccaaattggcatctggggatgcgtggtacacagcaacgggcagtgatgtggcgtgtgtggaaagaaggtggaaccgggttcttgtactggggtgcaaattgctatgagaaggcaacggttccaagcgccgaggttattttcttatccttttttctgttgtaaatgtttcttgatcgattgcttcatgatattatataaccaaatgaataggtaaagtttaggcgcggtcttcctcctggtgatggagttctttactaccccggtgaagttttctcatcttcttcagagccagttgcttcacttaggctagagcgccttcttagtggcttacaggtacgtcaactttatagttttaccaatcagataacaacgaaaaactgttccagttggcttatttggagaatgaatcaggattatgagtacttgaagctgtatgagtcaaaatacggaagagaggaagcgatggggctattggagaagacaggggtgtacacggggccggagcgctacactttggaacatagaccgatcgatgtattgcgaggagaagtgtacaacacatgtagaccatcttgagtaaccagatcgtttagtatctataaacactctcggttagccctaagttaataataaaagaacataacaagaaaactctaacaatgtctagattaccagtgaaaaaggttaattagtatgaaaataataaaatagatagatttgctttgtacttctgattctttaatttgttgggaaatactgtatctgaaaaagctcattttatgtggtgctaggttgatatcattcatcatagtcacgtatgaatggaagggcacaagacataatcatccaacaaaaaaggatataaaacctacactgactaaaaattaggaaaaaatgttatttaatccccaactttcaaaaaatggccattttattcgtcaacttcgtatgcggtcgtttaaaacatgaactaaacgttgactaacttttaaaacatgatcattcgtcgaccaggccaaaatagacatgatgttatgagttattaacggaacttctaacgtctgttatcatctgttaacgactttattagttaagttttaaattgtggtcattttaaacatcaacttagccatttaaaacatgaactaaacgttgactatcatttaagatatgaacaattcgttgatctggccaaaatagacatgtttttatcagtaattaatagaacctagaaacccgttattatccgttagtgactgttaatcagtctaaaacgacgtcatttgagaataaaattagtgtcaaagcgtaaacacacatacagccagctctcggttctatcattagtgaaagaacattactagaatttgatttattagaggaataaagaggat

SEQ ID NO: 29934 - DNA, 1502 bp, Arabidopsis thaliana landsberg
gaaatcataagattttgtgtgagttttgtgattgaaacttagatcgacagataatgaaattttttgggttcgaatgttttttttgtttttacagacaacgtttgttaaccattgaatatttgtctagataaattaaagcaaatatattaatatacaaaactgcataagcaattcatatagtttgggccgatattacaagaaaatcggcccatattacaataaaatatttttacttgcctatacaataaacgtttcttgtatttgtgacaattctaaatttcatttttatcaatttcaaatataaaattttttgtaacatacagttttatattttacgtactagatatattatttcttttactcttatgtatcttactgttaagattttcctttgttagtatattctatttttgtaatatactttcatgatatctatattttcaaataatttaattacacaataaaaatcaataatataaaagacaattttatttataatatataattttcatataacaacccgcacgtaggtgcgggtcagaatctagtatatttataaaaaagaaacaaaaatggcaaaaatgtcaattgacttttctatttataaccttatattcttatatttcctttgttaatctttttatttttaaacaacagaaaataatattaacgaaaaatattttactaacccttgatattttcaatataaataataaccaaaaatattctattcaaacataatggttttacaattaaggtaggttattactcttaatggcgccgttttatatgtgttttgtcgcttttgccaatgtaggcacttctttttcagtcggattatatctactttatatgatcttatgagctgtggattatatctactttctatgaccttatgagctgtaaaatatgtcttcgtgtataaaattttagatggttgatgttgttttgtaaaagtttaggtgttacaaaaggaaaaatgacaatcatcattggtcaatactgattaacaatcggaagaccataattcaatgttttttcccttaacttttggggttttctacaactttctattagttatacaagtagtttaaaattttatagcattaaagaatttgatttgaaaaggttcaatatgtgtggaagttaaaccatgtatatgtgtgaaagtatcaataattgagtgaagatggtggcaaccctgatcttaaaacgcacaaatcttatgagaaaatcaacaatgctggtattagaggttgtaggagatttgtttggaacaaattatttgctactctaaaataaattattttgaatggttattcagtagttttgacgaatgcaacatcaatttcttgtgtccaaaaagtaacacagcctaaagaagtggtggtggcggcgggagttgagtgaactcacatgtaaaactgtgcaagaaagctctaatgagaaaaatgtctagaccaataagttaaagttgtttacgttaaactctaagtggaata

SEQ ID NO: 29935 - DNA, 1557 bp, Arabidopsis thaliana landsberg
agctgtttctttgtttctaattatttaatgttgaaaacaaacaggggataaagtatcggaaatcaacaaaatcctcaagtaatcatcaagtctagaagggaagtgaagattaggaaatggaacatgaacttttgcaaatcttgttagtatctgccatctggaactcgttcaacaatcaagacaagtagtttctttagtaaatgatatatgatttacgtgtttgtgaaaatcgaaactctgtagtaaagctgatttctaaatagcctttggacgtgagattgtttaaagggatcagtttgattgtctaacgataagatgtgtgcttgtgggatgattggtaggtagtagaaaagtgaattgagaatccaaaaaaaataataattaaggtcagttttatagacctatcaaatttcaaacgtgacagtggtggcccccaccttactgacctatcaaatttcaacgtaaagtctccttgccagatttactgcttctgtctctttcagcgttttcgagaaagaacttgcatgctctttaattaaaacatttctttaattcgaagaagacttggaaaagacaaaattttcaagatcagactcacatatatctgagattattagtagagttgtggagattactttattcaataatggatgatccagtaatttcctctccaaccaacaagcatttcttcgtcatagttcttcatggacacaaatccagtcccgtaattactctcttctattcgtttctttatgtttctctctgttacaattgttcaaaaaaacttataactggtttatatatcatccttgttaatgttggtgtcgtgcagatgattcctgctgagtttttttcgacttacgtggaaggtaaaaaccaccagtctacaaaactgaaactgacctcggacgctttcgatagaaccctgggaggggaaatggaccggccgcagattcgccggcggctgggaaaatttctccaccgtacactctctccaagatgacgacgttgtgattttcagggaaatcggggacatgacctttcacgtcacagcctccggtcgcagtttctgtaagttacagtacatatcctctgacgaagatagggctgatgaagatgatgcatggaacgtgtattcagattccaagaacattgtgtcgaagaagaagccaagaacagaagcagagtcttcatccaaaaactattatcttgttgcgcatgtcacgccttcgaacctaagccgagatagattggtaaattacttgactgttctcttcttataatttgagagcatagtctcgtaccttcacactaattagtattaagcgttacgcttttgcagtatcttataaaggcttttgcgaggtcaaatggcctgaacgagagatgctgtgagattgatctaatgaataaacatggaaaatcatggacacttggtctgagatacagtacagtcaatgatcaggctagtatcagtggaggctggagagacttctgcttagtaaatgggcctagaagctggatcattctacaggtttaagcttgtcccaaacgggg

SEQ ID NO: 29936 - DNA, 2748 bp, Arabidopsis thaliana landsberg
tcagtagcttaaatgctgccttaattgattgtctccaatttccaccaatgtaattctctccaggcgttgttttggtttgagttggatcttccatcggtaatgagtatccagaaagcaaatggcctacccaaatatcatctttcctgatgaatgcagaatcaaaacaatgagataaagaacgtgttcaatgttgtgcttgcacaaagcagagttcttgacaacttacaaagctatatccatgtgacgaggagcataatgtccacctccaatgcctaaaagaactttcctctttccggtttcactgtccacccaaaaacaatccacactaagtttagatcgatacttcggtttttctttatgtcgaggtaatgattaagccccaatggatataccttttccacttccctacttcttcactgcctcctagcccaagaccttcccacattaactgaatcacaaaacacaaatgctccttactaaatggaagcaaacttagagatatagactaaaagttactggccagtcatgagcctcaaaagttgttgttaagcatgatgattattagaaccaaactttcaaccctagagaagtctttaaatccacaggaaacaacaagatacaagaacaacgacctttttctacctcctgaaaccatttcaattaactaacttttttacacttacaagagccatgacttgagctgcgtcttgcctcttccagtattcctcggtactacctacacacacgttattcattctcagactatagattcaattcctcaaaaactacactggagatgaactaagaaactcggatacacaacgaaatggcaatttcaagagagcgagcagagagctaatcaattcagataaaagggaccaaggaaggaaactcaccaatctccaaaaacatcgttggcttgttagttattggtccatgatgagtagcttccaatgttatctgcatccacacaaagcaatttacattctctctcaccttaaaccatacttcaattccaatcaaaagcaaaactcataagagagagtaaacagcaaaatacctcaaactcaggaactaaaccatgagcttcagccattttcttcaaaagacgaaaccatggaccaattctagtgcttggcaacgccgcccatccaggctttcctccttgcggcggtgattctccatcctttagatgaagcactcctacacttatcaaccaaaacatccttcaggaaaacataaaacaaccaaaacccaaatacaaagtttgaatctttcagaaaatcgtaaaaagaacaaagccctaatcaaaagtttggattttgatgcactaccaatcggatgaacagttaaagcaggacgatttgagacggcggtgtgacggctgaggaagatgacttcatcaacaacttcaccggtagcttcttcccaacgtaaatcgagatcgtcttcttttactatagatctatcgtgttgaatcactctcgtttgcttgttactaaaactctttatgtcctgaaaatttcgacaagaacaaaatcagacgagagaaaggttgatactttaccggcggaggatgattgaaactttaccggcggtaagataggtccggcggtccaaccgggcatggcgagaatcgccgccgcagggttgatcgacgctggatcggcggtggtggccacgattagtgttaccatttttcgagttgttactgtaacgcgattattggcgtttaaaagcgattggatatgagttgcgtttgctttgagtctattgttgtgcgtgtggaggaagtgtagaatgtttcggccgcttattttcaaaatcatgaattgaaacttttaggttttaactttcggaaaggtgtttaaaaggattttattttgtttgatcaacaagctaagcaattactgagttcaattggtaatcaagtttaaacgaggtaactaattttttttaagcggttaaaaaaaaaaaccagtattcggaaaaattgtaaaagatgataaaaaattgaatcgccggattatatatgatttttctatgttttggtaattataaaactaaaatttaactcagcaatttgctacagaaaaaaaaaactgtaacaaacaaaattaaatcaaattgagtcttgaatcgagttgataagtacaaatcaattttgtcgatttttgagtcttgattctgtgataggggaatttaaatgttaaaaggactaatcaaaaacaaataacaaaaatatcatttcaaataattggttagagtaatttagcaatttaaaaacttttggagtttttttatctatattaagaaaaagaaaagtatatatcacatagaaagtatataaaataatatcacatgcataactaatgtcaagtttttttttctgaaattatgagccgaatatgtcttcttataatttttttttatgcatagtgatttagtttagaaatgaggtatagtagataaataacttttttttttctgtacgcagaacttagtaattaaaataacatccggtaaaaactaggattgaaccagcagtaaattgcgagagagaaaaaaaaaattattttaatttgttgatatttaatttttaagttttcttaatttattacgccaaagagtatatattttacagtaagtatatatagaataagattatgagttggtcatcacaaatattattgttttgttagttatatataaaaaaaacatttgtaaaataaattaaagtatggtatg

SEQ ID NO: 29937 - DNA, 1597 bp, Arabidopsis thaliana landsberg
taccgtcgggatctcggttgggaattgctcacctcagacagaatccgagcagaaagaagacgacttcaatctcgcaccaatcttgccatctcgtcacccccctactgtccaagaatcctttgtatggctgaaatgactgccctgtcttactgtgaagagaaaagacgtgaaagagaaagagccaaccaagagaaggccatgattatatccggaaaggtagtgatgtcgggaaccctggaagacagaaaactccgagctgtggagaaagccaagcagccgtagaccgatgacgggacgaggtcccggatcctaggcggaaaaaagactgaaactcttacttcggagatgaggactcccaacaagaatgcttccagcaaggacccttcgaagcgagatggtgacagaaaaagaaatcagccggaagatgacactcgttcttctgtgcgcacttctcgagctcgaaccgaagagaaatctgctggcgcaagcaaacagaagggtaagaggaaaaaaggttcacatgaccttgtggtcctttcttctcgagagtcgaagacccgcaattcggaatgtcgaaacacaactcctcctccaggtaatcgactctacctctaaatttgcttttactcgattgtgactttaagaaatggctttcacaccatccttctttatcccagctcctccgatgtcttttgctgatacgatcagaacttttgttgcccccggatccgccatcgctcccttcgaagagatgaaagaggtcaaccgggaaaactagcttttccaaggattctgaagaggatgaaatgtgcaaagtctgagctgcagagagtagagcgaacagagagctgttggaggagatcgagaagggggagattcctgacatatccaaagaattagaagtagttagagctgacgaggtcaagtttacgaagaaagctgcagaaccaaaacccccccgacctaatccgatcgagctcacccgtctcctagctgacactccccccgaagcggttgcaaatattgttgttccagatgaagccttggttatcgatgaacaaggctccaacaagaattttgtttcagaatcagggattgcagccatgtttctggtcgatgtggaaaaggtcctttgcaaccccccgtttttgttattttattttgcggccacagaggctttaagtacttgagttttcaggtcttttaagacctttttttatgaatttttgggtcgtagagaccgtttatcttttcctaactcttatttccgagatatgaatttgattcgattttatcttaaattttcctaagtaaaagttcgtaattaccttaccaggcggactcggtttacagggttttagtaaaatgaccgcggaaaataagttttttgaacctcaaatcgggtttttggcttgagacttaggtaagagttttcaaaatgaaatgtaccataagaaacttgagacagatcgctatagttacgagaagaaatactcggtttatatttgaataaatttagagactggacccaaggtacgggctgcctacgtacccgaaatggggatcaagtctaacgtagttcaacttacaaatgaaa

SEQ ID NO: 29938 - DNA, 2125 bp, Arabidopsis thaliana landsberg
ttctctcaactctcaattagcaagtgacgtcacttctctctcctcacagttgagttctctcctacgctcttcatttcatagatagagagagaaagagcttcgtcttcttcatccccatcattatctccattgacagtgttctcaattgagaataataataattcacacacacaaaacttccatctctcaaattctcaaaatccacctgaaataatggagaaatcagatcctccaccaccactaccaagcccgccactatcatcccctccgatccaatttcacatcccagtcctaatgccgatctgattccgtcttcttccttccaccgtcgatctagctccgacgatgtcaatgttcatgttcatggatcccctctcctccgccgcaccacttccctccgccgacctcccccgacgacgatctcttttcttctttcatcgacgtcgatagcctcacctctaatcacttcccaaacgcctccctctcctccaactctgtttccggtgctgctaatcctcctcattcttcctctcgtcctcgccaccgtcacaacaattccgttgacgctggatgcgccatgtattcaggtgaaatcatggacgctaagaaagctatgcctcttgaaaaactctctgagctttggagcatcgatcccaaacgcgctaaaaagtccttcttcttcgaatttgtttctcttatatagaattcaattcacgaattgcaatgatagtagggaattgaatgtgattacaggattttaacccaaaccgagtttcaattcggtttagccaaattggttttggtttcatatcggttcagtacactgaaccaataataaaccacgaaattcgaaaatatggagattaaggactagaacttttgatttaggagtaaacttgagtttaactttcggtttatgtggactgaaagcgagatccaaaatctgtgtagttatggtcctatatgaaacttggtagggggacacaacaagtttacggactacaaatggaagaaattgagatttggaacttaataaatgaaattatgaggaaaaataaaataatcagcaaaactatatggttaaaaagcctaacaaaaaaaacccctaattatttttctctttcaaaattttcttagtacaaaatagaaattactttacttcagtgacttcacctgctctacatacaccaacattgatccataatgtattattcctctttgtttgtaatactctgcaacagtttggtgtaagttgctgccaaaaaaagtacaataatttactaagcattaacatattaacttaaaattttcaaaaatgaatctgtcaaaaacaaaaacaaaatatcacttactcggttccataggtgaggatcggtttttttgtagacgactatagtgttgatctcctccggtttaaccatatcccatcgacaagccggttgcggaacccgatgtctcgtgtattcgctaaccgtcgtgttcaactgcgggtcaaattttgcactcgacatgtgaaaaacaaacggtttttgtcaatgattgcgactcacgggcctagtattgaatgcgtaggcggtgtaatccgctcttttgtaccaattcaagaaagttctagatggcatttccatttcccggggagagaatgatccacggaacacctggaccgcaaatccccacgagactgaaatagtccagcttttgtgtttgtcataacatattgattgttggagaagcgcagccgaatcaatcttcatcggtgtggttagttacttgatagcgcgaacacgagtcatgtttggaaaaatcggctccacaacgtcaagattgtgcatcaatacaaacggagttatcggatgggcagctaggaggccgaagagattcccatgaacgtcctactacatacaaataaaatcacacacaattgaatcaaagaaatttgaagaaaggagcgtagaccttcacgcgctatattgcgcgtagagtgaaaaaagagtcacaagtctttaaagacttttaaaggttgaaactgacacacgcgtcttattccgacatctaggaatctaactattgacaaagactggcgctgctcaagcgccacgagttctaattattctgctttaatttc

SEQ ID NO: 29939 - DNA, 2480 bp, Arabidopsis thaliana landsberg
agcaactgcgatgttatcggaaacttctttaaaggatggtaagtagttcaagtctactatcacgtgatctcctgttccttcttgaatctgtggagattaataaagagacaatgtgtaagtaaatgagttatatataaagggtcttgtgtgatgaggatgatacttacaattaggtcaaagccgaagattgtgagatcaagcttctttcttagccaggtagctgcttctgtaactagctctagatcaatctcgcttaccgggttctggtttgcggaatcaacaggtaacgattttaagctgtggaggtaatggaactaccaaagttacaatctttttagtaactgaaggctatgtgttcatggaactgttatgaaatcttgcctgtcaaagagaattggtttgagaccattttcctccgctgatttcctcagactagaagaactagggatcgatttcttgaccgcgtgaaagatcgtttcccccaagacgtaaaacttaaaaatcctagatgaatggtccacatactcctgcaaaacatgggttgagaagtttttctatgcttgacatcttgatttaggagccctagatttgggtatccatattacattatgacttacttggataatggcaggaacaggagtgttcagattcttaaaatactcgactcagaagacaatggcctgtgagaaacacatgaaaacgaggaatttttttgttctgctgtgaaaagagcaacatatattgcgagatatcaaatctagatggaaagtattagatattcaccatgctgtgagcatcagcaacaccacaggcaacctttggttttcaatacatggaagagagagtccagctcttgacaagttctgagccagatctggttcatcatagctgtcaatctgtagataaggaactctgatattaatttgctaaagtaaaaaagaaaagcatcaatgcgaaactggagaagttaagaggccagactaaaggtctcaagagataactatgtaagattataagcataaagaagattgacgagttgatcaaaatgagaggacttttacgaccttgagaaagcaggcacctcttatctttcgtcctgctgcaccaaggccctctaatccaagaagaatatgttgcatcttgagtcggtctacgactggatatatatttcgaatagggtcgactatggcacaagcattttgatcttccatatacctgcaaataccttatatcattatgcaaacctgaatggagaatttttaacaaggtttctcatatttgtgtatgatggtatctatacgccacttgcagatataactgagtgctagattgaaaacaaagaattgagaagcttactttttcagtttctccatgccggtagagaatgtaactgcaacagatgattttgagtcggagcagttcagttcaatggacaagatttcatcagttgctttgtggaaaatgatatcagcgtgtttgagttgagatgcaagagggaactcaaacatgaggggcagaaatatcaacccacatgaagtaggatacatgggtaaagcacccctctaagaaaatcagaaaatttaacatcggggaacattacatatatatccatattactttcatgaatcagtaatgacctagagggtaaagcatatatacgaccagcacacagagagccaaaaactaagcaatgatcaccatatatataatacttcagagtcagattgcaaataaggatctaaccttggcaaagtcctctacccgagatggcttcatgatgtaagcaactattgcagcaccatcacccattgcctgttttgggaggcgatatcaaaagggtggtcaaaatactaatcggcaagatatacaaaccaaaaaatggtaatgaaggtgtaatatcaagcatctcgaactacatttttacactgtttagttctggcctacaattagtactttcttcaaacagaccagcttatttctcaactatgagcgtattctagtataagccagaactgcagtcatgacatacctttttgtttatgcagcaaatagtcattggcagctcctcaagactatggatatgaattatgttaggatcctcaagtgaatcgccttcaacatctagaaacccaaaaaatccaacaaagttaggtgcctcataaaagttatcagtacaaaaggaaactcagaactttaatgtagcaaactttaatgcctatctttttcctattagtgagagttcataaatcgaaaagatccataattcgaatcaggaagcatgtttaaacattcaaagagcaaactatttagacaataaatgcagaagctggaattattgaataagttatctcttataggactagagattatcttcatcactaaccgagtaaaacaactagctgactgggactaagttcacgcaagatctcttcctttttgcttggagcaacatacagaatactacccgcactataccatgc

SEQ ID NO: 29940 - DNA, 3143 bp, Arabidopsis thaliana landsberg
caatctgttaagatcgatgtttttggggagagctgatggtccttgaggtggaaacttgacgagaacggtgcaagcaggacatcggattgtgtccggaaacttcttgggtagatttgttaagcattcttcgcacgccgtgtgtccgcaggcgagtacgcgcgggacagtagactcgccgtcgtaagactgtagacacaccggacactccggttcctccatcacctccgatgattcgatgcgacgaacaactgagttaatccgacgacgttttagactttaactaaaacaacatttagtcccgagggtagttctgtatacctagtgtgtatatacatgaaaactatttgtgttataagtcatcaattttctaaaatgtctctttagtctggtggtaaagtcttccatatgagctcacaatttatgggccggctctgatttctgatgaagtgaagtgcatttgcatggtatattgtcatcttacctctgccaatatattgcggatcctaagacatatgaagtattttcatagtacaagctcagacccgtaaaagctaaagatcaaatgtatatagaattcgtcgaagtcttggaaaagaatgatgttacaaatccaagactttatcaatgccctagcaacatgcattaataaagtcttgcattaggaagattctctcttgtccatctatgatatccacaagccctggctcactagaatagggtggatgtgtgcgataacttaaagtatatgctcacttaaaaaatttacatgagaaaaaagcttttatttttttggtaaaaaaaaaagtccaaatataattgataacaatcctaaatttcttttaaagatatattagaataacccagttcttttatatacaaaaatgccatatttttaaaaatgttaaaacactatttttttatattttttttaacactcaaaatttacttcaaaaaagttctaaaaattgcctttttttttttcaaataacaaaaggtccaaacaaaaacaaattcccgtaatacacaaatttatgttgggtcggggctggacactcactgtcaactgaaagtttaagcatatttttataacttaatactggagttccataagtttattgatgaatgtgataagtttgtctcaatgtagaagctatgtcctagagattcactcaatgtaacagctcgagatccactcaatgtagcagctatgttctccagattcattcgtatttgtaaaaaaatgaaaactagaggtggcttgattgttggaactcgacgagtattgttccaggaagcagccgtcttacttcttttcaataacatatgttaaataaatcgacattgtttgttcaatcatagagagaacttattattattattattttttttttattgtagtagtaatcatgttcattcaaattgagcaattatttgctttctatctacgcccaaaaaccaacttctcaaatgcatcgacatgtaagaaaaattgcttttatgttttaaagttgtgtaacatttctcttggaactattgattgtctcaacgttgcaaataaagtaataaaatcctacaagatactaataatatccaaactgggcttataatcctaaaaatgacttccataattaaaacgaatttagtttattaattagtgtaatggaatattttgtcaataaaataaataatcacgaaggattatataaaggaagaaaaaaaaaggaaggtgggaattttaaaagggaaagacacctgtctctctgacccacccacccattcatttctgtggctactctatcgtcgtcgtctccacacgcgtcggtgccctcacggatcaatttctagagagagagagagcgagagagacgatacccttgtctagattctccggcaagttttgttccctccttcgatctctccttttttcttattcagcatttccccattttttcacgcaagatccgtgattttccagggattgatctgattgggggatcgagaaattcgtttgtgttttctgctcgattaaccggagaaatgcacgagtttggtgttctaacggagcgttatgggattaagccacaaggtaaatctgctccgatggctgcttctaagcgtaaccctaacaacaatggtcagagctggaatttcggtacaggctcctctggtttaaatgcaaagtcgacgtctttttcttccaatagctcttggaataaggattctactaatgggtctttgtttgatggtgacgatattttctttccggctaactctactaataggaaggtttcgaatgattttgatgtttttgctgggttgaacaaatcttcatcttccggtgataatagcaagtcttcattgaacgatgatttgttcttctccaattttgggaatccggggaagacaactccttcttcagctgatgacttgtttggtggtgttattcctgggtctaaaagctctgatagtgttaagaatgatgatttgtttgggtcattctcttcatcggagaagcaatatgctgctgcggttgatgatttgttgggtttggggaagaatgaagctggttatgatggattgatacctggttttggtggaagtactcagacgactagcaggtttgtgatcggtttatgaaacatttgttgccaatttctgttatattgtatgagatgctaatgtttgtcatgtatggaatatgttactgtctcgtggatggtatttgaaatctcagataacctttgtacaggaaaatgttttactgttatggttttgaatttttttgttgttgagatattttgtttttgttatgtttttcagcaagactacaccgtcgaactttgatgctactgatccttttgtggtcctagaatcaaccacttctactggtctgttcgtggatcctcttgaagaatttgctgctacagtcagctctcaggggataaaaccatcaaatacttcacatacttctacaaaactcaagcctccgcctaaaccaacacaaaaagtgaacagaggttaatttctttgatgacctgaaagtgtgtcggattagagcttttgtttactgttttcattgtgctctaactagtcatgcgattatttccacaggtaagagtgtaggaatgtcttcaatagacgaa

SEQ ID NO: 29941 - DNA, 874 bp, Arabidopsis thaliana landsberg
aaaccacatatacccatagataatgctggataccagttatgacttaaatactacatattatgtttttattggatgtctacatcctgaaagagtttcgattatctctagaaaacaccaaaacaaatgagaatgtaaaatgagtactggtttgtacctcctcaggagggtcataatatactccattatatgggatctcgccaggtggctggacagaatacttgatccaagctggaatggagtctttaataccagatggggtatccatgcggatctaccaatgcatgacatacaatcaaaagtacgataagtgttacaaagctttgcatgtgttttcataagggttaactatgaacatgtaaccttcacacgggagccatggggaattgctggtgagccatcagcattatttggcagaaatatttcccacacaccaaagtcgttctgctcaaatatcagttttaagacagtcttagatcagaattccagaaaggaacagaataataacagagcaaagcatgcgccaacaagtatcatttaaggttcaagtaaaaatttaacttctagccaaattataagctaagacggaagattaaacaatagatcacaaattagagtgtgtgagcatacccgagccataacatcagatttcgcattccagttattaaaatctccgatcagtgatgctgcctggaaaggcataattcagccaaataacttgttagaaaaaaacagtaatctagatattcaatcaggtgcagatacactaacatgcatggaacagaatagaaaagacaaaaccgatgtcatggggacatgagaccctgtttactgaactatgagcccaggctgatcattctacttatgttaaataaaa

SEQ ID NO: 29942 - DNA, 2777 bp, Arabidopsis thaliana landsberg
attataaattgtcctgcatttctgcctcgatatcatcttctccagtatagccacgagatcatcaacctttcccatttggcagtatcgatggatgacagttctgtatgtaacaggggtaggatcaattcctttatgaagcatcttcttcataagttctgttgcttctgctattctaccttttttccccaatgtatcaactaaagtagtataggtgaagacatccgcgtgtttgttgatcaggtacatgtcatcaagcacggatagagcagcatctagctcatcgttctgacaaaaaccatgaatcactgtagtaaaattcacaacattaatagcacaacccttgttcagacactcctccatgaattttctggcctcgtgtgttctcccatcccggcaaagactctggagcaacaagttaatttcaactgggcctgggaaaaacccttttagtaccatctctctcaccacatcacaggcctcagacaatttcccttcccttcgcaacccatgcataattacgctataagtaatagaatttggactccaccagtgctcttcgctcatgttcatcatttctcttgcctctaacgatttcccagttcggcacatcccatttaacagagctgtgtatgacacagtatttggtttatgtccatgtgtgtgcataacctgaagtagctttttggctttgtccacttcacccaaacgacagaagccattgacaactgcagtataagttactacatcaggagggcagtgcccctttgacaacatttcgttaatgagatctttcgcctcagacattcttccctctttgcataatgcatgaactatggcactataacccagcttatcaatccgaaaacctttttcttgagcatcttttagaaaccaaagagcctcatccgcatgatcatgtttagtgagcatatgaattagagtattgtaggtgacttgatccggcaccaaaccatgctctttcgccattttcttcatcaagtctctcacttccacaatccgtttttctttacaaagatagcccattatggtatagtaactaactttatccggcaaacatcctttactatgcatatcctctagtagttcaattgcctcctcaactcgatgcaagtcacaataacctctgatcatacaattataagtcactacatttggcactataccaacaacctgcatacgttctagaaaccgtaaagctttctccaacctattcgctctaacgaaaacatcaatagtcgtattgcaaatcaacaagttaggttcaactccagctctctgcataagagtcaacactttcaatgcatctctcagctgacctgccctactatatgataccattacacgtgaaaacgcttcaggggttcgatatatacctctacgcttcatcagaacgagaactctcctagaaccttgacacagtttagtcttactaagaacctcaagcatcgagtaatacaccatggggtcatggcgataccgccattgacgatccgcccagtagaagaacttaagagcaacccgttcatcgtcttgtgagcgtaaaacagcgcatacttgtgatggtttaaggctccttaaaagattcctcatctgaccttcatgcttcgggttccaagatgacctgatgccaatcaatctacctacctctctcaccaaaggatgtctagattcatcttcttcgacatcgaatctaccagcctcttctctcgattgtgggatcgatttcagaacagcaaaaccatcattatcatcatcaagttcgtcgccacttgttacatttccttcttcatcatcgtcatcttctcctaattcatcaatctcattgaacctagggtttcgaatttctccgaattcaggatcaccaacactcgtagcattcaaagctgaagactttccgaaacccaattgcctaaactctccaaagtggtcatcttcttgactagaagaatctccttctatctctggaccatgaggatgtttcgacgaagatgtcgagaaagatgcttcgccattagagcttatgcaaggtgaaaatcggattaagggtttacgaagaagccgattaacccttaaactcaacattaaacttaacagacagtagcgagagcaggtccttcaccaatattactactaaattctcaggtaacacagcaacgaagctgatgatgcatcagtgaggggtgaaaaagctatagaaagaaacaacaagtcaaaattgaaaatacattaaaacattcccagattcaaaaccgttaagattaagccacgtgacaaacatcaattagataaaaaccgttgatttttaatgtatttatatcaaactaatttgcgtcgtcgacacacccttctgttaccgcttttacgttcgactccagattcctcctttgccggaatattccatacgtaagagatattgaaatcgccgatgatgaaaagttcgattccgtctaagacgggctccgttacctctgatcgtgatagatcggctctaatattcctaggaactggatgttcaagcccggtacctaacgcaatgtgcttgatccagcgatctgataatccctgctatgtttgttcccagtctctttcaatcccgcctgagaaaaatcctaattacaggtacattctcatcttgtactgatttggttcgactgtggagttttgttttgagattgagatttgggatcacttagttctgtttagctaacctgagtgtagcacattcaattagtctagttttgttgttctactttatt

SEQ ID NO: 29943 - DNA, 1587 bp, Arabidopsis thaliana landsberg
cctatatggtttgcaaaatctatacacgtcctagagttatatttcgaatgatttttaaaatcacagtattaatctatgtttttctttgtcgcaagtgagttttatttataacacaaaacaaattatacaaagccaaaattaacaggccttaacactaaaaaagtagaagcccaataaagtaaaaaccctaaactgaaggaaaatttgttacaggcaacacatataacacgtggcaaatgttaacgaggcttggaagacacgtgggaagtctccgatcaccggcagagtgttgtcacgtcgggaatctttaattccgaccgaaatcgccggaaaacttgttcaatcgcagatctcaagcttcgcctaaagaattcatgacaagattccaattttagctttgatgagaatatgactctgtgaatcttcttcatcttcttcttcaatgacaagctttcaatcttcagttgtagatcatcaaacctaaaaacgaaaattcaatcgaatccaaagcatcgatctataatttcagccccaattacttcaacaagacctattaaccaagagacacatcaatccaactatataacttcgttcttaagtttttaaaatccggtaagtatgaagaacgaatcaaaccctttgaacaaaggaggattgaagaattacaaacttagatcaatagaaagagataaagcgaacgagagcaaaaaaaacaaactaattgaaattcaaaagagtctaaaaagaaaaacaaaatctagagcaaacgcttcagagcaagagctagctgatactcgctaaagtgataagcatcgagatcgctagaaacagagtcgactaccggtgttaacaaaaccaccgatgccagaaacaaagccagacaaaaatgttaggaagccatctacgctggaagcaaagtcagcttacattgccgacaatttctgaacggaaaagcttcttttcttctcaaagatgaaaaagagagaagagagaaaaaagctttttcaattatgttcttagccaacaatttgcggtagtatttaattaatctacgtttatttgacataaataattaagttgcaaaaaaatattatttgtggttttttttcatgaaacccaatattttttttaattgggcctaacataattgtaagggaagcccaataatatgtagcaaatattctagggttagaatattcttcaacagaattagggttacatgtgcggactctatataaatctctttttcctcctacgagtcacaagtaataagaaaacaatggagcaaacttttattatgatcaagcctgacggcgtccagagaggactcgtaagcttcccttttctcttaatacatacttgttgatcttgatctgattttggttttgtattcagttcctttggattgtttatacttaaaagatcgtttgtgtttttttttttttccagatcggtgaagtcatctgcaggtttgagaagaagggtttcactttgaaaggtaacgatgattaccaaacttacttgactgattttactttataattagaggtcttagttctaatttaagtcactttgttacttgaatta

SEQ ID NO: 29944 - DNA, 1479 bp, Arabidopsis thaliana landsberg
  unsure (1)..(1479): unsure at all n locations
tctcctcccctctctggtggctcccctcaagccgaatgggataagaacctcaatcctctctcggaggcgcttaacctagactggacggccgaggatgaggctgcctatcacgctctggaacctccgttcaccacgggggaagaagatgtggcagaaaaaaacactctgagaattgagtcccatgtttcttctctaggacgtttggagacgcagtcgtcgatctccctcgcttccacgcagcgtccgactccgtcgaaagttcttgaaggagcgactgagaacggcggtgatgtggagaacagagatcagcttctgtccctagatgggcttctctctttggaaatagattttgtttctactctcggtgggccaaaaaagggagtaaaaaagaagagggccgaaacccattnnnnnnnnnnnnnnnnnacttctggtaaagcccagtcctctttgggccttttggtgaatctagcttcaaaaaagatacaaaatgtcaaaggacgttctccgagtaagcgtctcttgctcaaaggtggggcttccaagtcaagagctgctaaacgtccgtcttcggctcctcgttcaagcatcttcccgtcatccaaagtcaagtctccggggtctattggtggctcggtggggtccatggaaccccccgacactaacccatgaggatcttagcgtggaggacatgtgtcgcatgtattctccgggttttctttttttatcggaaactaaaaatgatcttttgtatcttcagaatatgcaagtatctctaggctttgattgtctccaaactgttgaccctatgggtaacagtggtggattagctctattgtactctaatgaatttccggttacggttgtttttcttaatgatcagcttattgatattgagactattattgatggtaaccgtgtttgtattacttttgtttatggcgacccgaatgtccaatatcgggaactagtttgggaacggttgacccgtattggtattattcgttcagatccatggttcatgataggagatttcaatgaaatcaccgggaaccatgagaaaaagggaggcaaaagttggtccgaatcttctttccttcctttgcgatgtatgatcgaaaattgcgggatgattgaaattccatcccatgacaatcttttcacatgggtgggacgacggagttgtggagttacgggacgacgggtccggaaagtcattaaagctcggttggatagggctatggccaatgaggaatggcataatattttttcccactcgaatgtggagtatcttaaattatggggatcggatcaccgccctctccttgcttcaatacaaaacagtccccaacgtaattttaagcagttttcttttgataaacgatggtttgggaaatcgggctttaaagaatctgtgtacgaagggtggaacctatcttcccatgatggtgattttttttcacaaaaagtgaaaagttg

SEQ ID NO: 29945 - DNA, 4386 bp, Arabidopsis thaliana landsberg
ttttggaaaggagaaaaaaaaaactaattaattagtaaaaaaaaaagtgaagtatttttgcgattttgtgttagctttgttctttctcgtatttgtaaggtaggagaagaaaggaaagacatttaatgtgtgtttttactatacccataaatttgttatggaattgaaatctaacgtttgtagtttgttggtagcattagtgtgattttgtatatattaaattaattaattatttttaaaaattatttcttaaatgcttagccatttttgtgtttttcttaaatcatatctcaacatgaaagtgaggtaaaattaagtaaattaatttcgaagttagtttacaatgagattttttttttttttttatcctagttagatttttagaggtattactaaaaatagttcaaattaattatttgttttaacatattttgatagaaatataattagattgaaaatcaagttagaaaatgtgagataataatctttgttgacgttacacattaggtgttgttgaatttggggtaaacatagttgaatgtttgtgaaaacgctagtatgaattaaatctagtttttaatgtgtaaatgactcatttattgtatatttagttgtctttagttaatttatcataaagtgtagtattaatttagtcaacaaaaatgtaattaccattttaaatgccaaggacaatgagtgtattgaccatattagctctaaggtctaattttcattttgttcactccgtcttctagaagtaaaccctcacaaaaagtctctgaccaaagtgaaacaaaaaaaaaactcaaaaaccgcatcgtttataacaaagtgttaacagtgtgactctaatggtgtttcttgcagtgtacaacttcttaattctttagttcatgcatgtatttcttttttctgcctaaatctgagttctgtccgaaaactttttaaaagacctcccttattaattcatgtatgggggttacaaaaaaatatgattcctatgatattcttcttgtccccaccctcaatgcataaggactggactaatgctaatatcgatgaactatttacaaaagcaaaatcaatggagtcttagattacacgatcaaatccagggcagagcataaaatcatcctggtgaaataacatttggtaatataccttatttatactcttctttatagagttttgaatggttacaatgacatagagaaaatgtaaagcaaattaactgattatggttggtacatgtcgaataatgagttctaaaaggttgtttacatttgtcaaagtttctaacacatagcaaaaaaacaacaaaagaatgtctatccataacaaccaaagttgaactaaaaagccaaaaacatagtggaatactaaatgcaacaaaataagagttcatatagaagaaaagaagaagattagattaaggtcaaaatcgtaattaaaccaaaaacagaaggctaaaagtatacaaaacccaactgtcacatgacccatctttgaaaaatccaatctttctcttccttcttcttctctttctctcttttactttctctgacactatccttctctttctcaatctctctctctctctcttcaccatgaaacctccgtcgttaccgttactcctcctcctcctccacctctcagccactatctccgccgctccttccctctctccaactccatctccaaccacctctcccattccacctcacaaaccttcctcatcctcttccccattagacccaaaacaactcaaagcccttgaatctctcaacatccccaccgtcaaagatccttgcaaccaccgtcccaccaccaaatccacctcctcctccgtcgtaacctgcgacaccagctccccatttcgcctcgtcacttccatctccttcacaaattgctccaccgatctctccatctccacaacagctctcagagctctctcaccatctctaacctctctctctttcctcaactgtccttcactctcccctcctccacgtctccctgactcactccactccttcaccgccgtctcctccttcctccgccgccgtaatggcctctccggagtcttcttagctcgtctcgttaacctcactgacctcacagtctcttctgttccagtctcaacctctggtctcttcgttatcctaggaaatatgcacgaggtcgtctctttgacaatctcacacgcaaatctctccggaaacatccctaaatcattccactcaaatctcacattcattgacttatcagacaatctactcaaaggctcaatacccacttccattactctgctctcaaacctaaagtccttaaacttatctcataactctctctctggccaaataccaaacaaaatcaaaagcttaacttttctaaaaaacttatctttagcttcaaacaaactatcaggaacaatcccaaattcactctcatctatctctgaacttacacatttggatctaagtatgaatcaactaaacggcaccgttccaagtttcttctccgagatgaagaacctcaaacacttgaatctcgctgataactccttccatggagttttaccattcaacgaaagcttcatcaaaaatctcaactttttcgaaattggaaggaacagtgagctctgttacaacaaaactattctctcctcgaacttgaaattggagggtcttgctccgtgtgataaatacggttttcctttatggtctccgtcgcaaaaggaggaatctttgtcaggagaaaacgattacgacgttgaaggaggcaatgaggagaagacggagaatctgaagacgaaggaagaagaagaagaagaacgcaaaggttccaacaagactctgtttggtctcggcattggtcttttctcgcttgtgttcttaatcctcttcctcttttatctcgctaaaaggtgtcgtttgatttgagaagtctgggacgtagtaattttgtattggttgtgtattcacccttctctccttctaaatgttttattttattttctcctgttttagtatttatgaattgtggttatgagtgtatttatgaattgtgattatgagtatctttagttttatttatacaaatttgttcaaaacatagggttagtttagggactgtgtagtccagagacatattcatctataaggacaatgaaatcaaaggagctgcttttgattgattttagttttgatgatgacattgaataaaataagaaacatatctccaaggttcttggaagatttagattctaccaaactgatgtcaaaagatttactacaacaagaaattctttaacatccaaagataacaacttaaaataagctagaatcaacaaaaatctttaaagatcaaaacactttttaaccagtgatgttctgagacttgttgaggataactccttcatacttgacctggaaccatttcattgcatcatccttggttactctgtgttgaataccaacacgagtcttgcatctacggcggcgagccacacggtatcctgggcgttcaaggacaacgtaaaagtccattccgtagataccagtggaaggatcgtacctatatacacaaaataaaacacatgagaacagtaaacatttcaaataaaccagttaatcagtttcgaatctaacacccttgaaaaacagtaaagcattcatcttttactagacccaaatctagcattcaaccaaaaactagtaaagggctcatttttaatccaatccatacttaaaattccacaaaaactataacactcagcgaaaaccaaagtagtctgcattctgactaaacctcacaaaacccctaatttagagacttgacatttagatgcaactgaaattcttttaaacatatacagatacatgaagaatccaagtaccaaaaccattatacaaagccattaatgtaactaattcaaggaaactttcatcgcaaaagaaacagaaaacttacttgattccaagatcaatgtgctcttggataccaaatccaaagcaaccagtgtcactgaagttcctcctaagaagctcatactccttaactttcaaaccactctcaagaagctgcattgccttctcacctctcacagtcacataacacgcaatcttctcattacgcctgataccaaaagacctcacagtgtacctcgctgtataacaaaaaccacaacatacatcagaatcaagatcaacacaaaatcaaacttaaatccctgaaagatttcaaattcacatacccttagagaagacaggggtttgtccactgagctgctccaacacctatacgaaataaccaaaaacaataattcaaatctaaatcactaaatcaatgatggataatcgtaaaggtcagatttttacaacaaaa

SEQ ID NO: 29946 - DNA, 1331 bp, Arabidopsis thaliana landsberg
aacgcgccaacaaagcagggttacggaaactggggaatcagtaacactggtgtatttactttattatcttagtgaggaggagcagttggggtggtcaactagtttaactctacctgtaaatgctcctgatatttataagactgcgcttccatctgctctctgggagctgattatgcgttttgctcggaaaatggaccttacaatgtgaaactccatttcatggagatgtcagttttctgaccaagaactatacagccgtctcgggagacgcatatttgatgtctatgttcaggtaaagcgtcactatatactaaatgttttttaacaagcataatagatttgttcattcgctttgtaaatttttcttctctgttagggagaattgttcttgagagattttaacatcaaagaagaggcttatgggatacttaagcctcttgtgagagaaataaaagctgttaatgtgagtgaccatacgttagagattcgtttttattgggcggggaaagggacaactctcattcccaaaagaggaaattatggtcctcttatctctgcaatctccttgtgtcacagtaagtacttatgactatctcaggtctctgcatttgtaaccctcactctttatcgtatttctctcttcacatttgagttaatcataacttcaaattatcactgaacgctaatattcatctttttcataatgtcaggtttggagccacgatgtggaggtcgttttgaactagtttgttaaagatgtttttctgaagcttggtgtttatatatacttacacttttagtgtctcattttcagcggagaaaacgaaacgtcacactaattattcactcattttcgggttaacgggtgccttggtaacaattattctcttggcgttgggaggggatgctcagaaaagatgcagaggagacaggaacatgagagaaagaggtatcatagttcagagactatatttgaatgcattcctcatatatctgatagcattattaatgactttcccttgagaacatagatttgagagcccagggtctgcaaacggtgtggtttacttggaagcgactccaagctgcaacaaacaatctttgctcaagccaacacacttcggagaaggaggttttggatccgtcattcaaagtaatgctgaaagatgccaagttcttctcaaacgtagaaaataagattgtttctgatatgagaaacttaatgcagggagagctattagaaggaactatcatagcaggcaagccgctttctttcaagtcaaggcaaagtcaggaaaccgcgagtatgcgaatgagataagcgtgatatc

SEQ ID NO: 29947 - DNA, 1649 bp, Arabidopsis thaliana landsberg
ttaaaattatttacgtaaagaagacttaagatggataaaatattgaaaaaaagacattcatatagtgatatagaaaactttgaggaagtgataaaaactagtttatataggatatcaaagtaagtacaacacagaagaagaccatggtggtacactatactggtacataaagcacatgcaaaccaatgtggtatacgttgattatagttaactttttgtacactgactaaataattaagttttgagttatacaaaattaatcatgagacctttaaggatttcctctatttattttttttaaagtaaaattatcttttgttggttgacaaaagaaaacatcaaatagacgcaagtaattaataattagtcgtagatgtgataattgttggattaagcttgataatatcttgagttataagatatttaaataaagagattaggactaataattctaggagttatctaaaattatattaggagttatctaattatagttctaataggattaggtttataaactcttatataaggaggtatcaagatgtgatacaacttaagagatttgagagtttgattgagagtttaggttttgaggaattttcctagactaataaaaagagagtcattcttttgattttgtgttcttaatctcttcattgaaatctatagatatggtgttgtcaagaatctaaaagctcgtgtctttattaagcaaagggggtggttacagttcttacaacagaagtatatagtttgtgaccggatcttaggaactagaaacgatactaatcattttacttgtcagaacttttgttaggagtaacagcgtcaacaatggcttccatttcttccatcatacgcccgagaacaccaggtcctttaacatcatcaacccttgtcttctcatcaatgtcttcacttcttccatgagtctctttcccatgaaacatcgattccttctcttcttttctgcttccaatcacatttgtcttcacctctaaaaaaacaacaaaaaccaaaacccagaaacgatcaatgagattaaaacaaaagagttgtcttttcgcccaaattaacatcttctagataaacctaaataacccaaaaggtccctgattcgattacatatagaaaccctaaattcgataaatcagggggaatctctaggaggaattagacaaattaataagtgatgaaactttattaaaaaaaagggcgctaaattcgtgaaattgatcaaatcggagaatttgtcttaccagaaagagagctttgttttggttccgccattaatgatcttccttctttgatcttgtttttgagttcttcaaatgtagacgagtttgtttagtttggtctgagcttgaaatagtgtgtacaaatgtgaaccatccaatgtaataataacagattaacgagtagatcgaaccgactcgggtattgtgcaaacccgacactaaaatggattgaattgcccagtctaataacttatgggttaacaattgagaatacaaaagtggaggggttctcagggaatttctggaacaaataatataaaagagaaaacctaaagtttaaccgttattttaagaaaattgcttttcgtaccccaacaatttcaaaattcaaaaagttctctctctgcttct

SEQ ID NO: 29948 - DNA, 3034 bp, Arabidopsis thaliana landsberg
tttgtttgagtacaaagcaagcaaaagtttatttataaacagctttcctctctgattgtttttgcagtgtcaagcaagcatatatgcccattgccatacatatatgtatattcttctactatcaacataagttcgacagttcaaaattgattaaatatggtaaaaatttacacattgtctccagtaaagtgatcttctgtgacaacgaaagtaagcaactaaagtgagaatctttatgataaacagaaccttatatccttccacaggttaccttgcaaggattctttgaggtttttgttttggtttgtacacatgcacatgacacacacacatacgcgatatataaagaacgagagagcgaagagacaaatatttaacctatcttggtcctgtttctttgtcttcttactcttgagagtgtatagctaattggttttatttctcttttggtgttcatcttaaaaccatggaatcatatcgagtcttcacaactatttgtcttcttctttgtctctttctctcagccaacttcttcactcattatggtaaaatcctctctgtctctttcattctttctctctatccatgtctatctctaaaagcatttgatattgattatgattttctatatagtagtagatgcaagaaaaaacgtgggatttgagagagagccaaagaaggtgatgatgatcaaagctttaaagcacacatcattgttacagaaaatgatgacacagctcaatcttgctcagcctttagactactcttcatcctccaacactcaaccttatggcgttagcacaactctcactctacctccttatgtttcacttcccccactttcagttcccggaaatgcccctcctttttgcattaatcccccaaatactcctccttcctcctcttatcctggtcttagcccacctcccggcccaatcacattacctaacccacccgacttctcctctaacccgaactccaaccccaacccacccaaatcatcctctaacccgaacccacctgattcatcctctaatccaaactcaaacccaaacccacccgttaccgtccctaatccacccgaatcatcctctaacccaaacccacctgattcatcctctaatccaaactcaaacccaaacccacccgaatcatcctctaacccaaacccacccgttaccgtccctaacccacccgaatcatcctctaacccaaacccaccagagtcatcctctaatccaaacccacccattaccattccatacccgcctgaatcctccagcccaaacccgccagaaatagttcctagccctccagaatctggttatacaccagggcccgttttaggcccaccttactctgaaccgggcccatcaacacctaccggatcaattccaagtccatcatcggggtttcttcccccaatcgtttatccgccacccatggcaccaccgtcaccgagcgtaactccgacctcggcttactggtgcgtagctaagccctcggtccctgacccaattattcaagaagccatgaactttgcatgtgggtcaggagctgattgtcattcaattcagcctaacgggccttgctttaagcctaatacattgtgggcccatgcttcgttcgcctacaatagctattggcaacggaccaaaagtacgggtggctcgtgcacgttcggcggcactggcatgcttgtcaccgttgatccaagtaagagaaatatttgtttatcaactattatttattggtaatattcatttttttaaacaatgttattgaatggcaaacaggctttaacgggtgccattttgatttcttctgatgcatgaagacgaagacagctctcactttacattttgttggatacgaataatatcaaataaatctagatataatatgtttaggtgggtcgctcacttgtaagttgtaaccaattaaagcttatttcttgggaatggcataattataaatcttatgctaaatacgtatattgcttttgctaatggaattaggtcttctagacttgtggtacgttgcatctacttaactactatcactaataattcctttatttatacacacatcccttttctcccacaatgatttagtagctttgaaataaagtaatatacgcattctcagtttctcaccacgacatctttttttatttatagaaaaacttctactccggtctattatctcaaacacgtgaaatgtcaccctgctaggttttgctgttgattagcgttgttcactaattttgtactaggtattcaaaagaatcgcaactgcagatttaagtgagtatatatgaaagagtctcaacaatgtaagtgaaacagtttacgtaggaacaatgtaacttgatgtaccttattctgttatacgaaaaacattcgtacaatagaaattaatcgttacaaatgtgggttaattctaccgtgtgcagatattgcgtgagtactttaatcacttgaatattttggttcatgcattttgttgatcatggtgaactagcaaaaattagttgctataaaatttgtttaagtaaccaagtaagtactggtctagtggcgttttgaagactcctcccatcaaaaggtttagagcattttttctcctcactggtttgatccgtttgggaagggaccaattttacatgttctggtccggctactaagacatatgaactttggtttcgaactctgtgggtgaaaaaaaaaaaaaactttttgtattgatcagaaaaattcggcaaaatccatagacctaatgttaaattaatggatacgaaagaaaaaaatgaatatgatgttcgttcagcatttttgttttgtattgtattctgtacctatggaaaattagttcttaaaccagaatggaacaaaaaaatcgaatatatgaaaaagtggtaaactcaaaatcggcaaaaaaataaaaacagaaaaaaaggtgagaaaataggaaaaaggttaaaaagtacacaaaaaaaaaaaaaggaagaacccttcccatttgatttgattgg

SEQ ID NO: 29949 - DNA, 2652 bp, Arabidopsis thaliana landsberg
aaagacttctattttgttgttgttgttgttttcagaagatgtcaaggcttcttcagattctgttgctttaactgcaaatttcatttttgtggcgcgtgattctaagactggtaaagctgctcctatcaaccgtctttctcctgaaaccgaggttgagaaacttctctttgaggaagctgaagctaggaataacttaaggaagaagaagagaggaggtgacagaagggaatttgatcacggggagtgtaagaagcttgaggcttggttggctgaaggaaggattttctctgacatgccagctcttgctgacagaaacagcattcttcttaaagacactcgtcttgagaattcgctgatatgccaaccgcagcagaggaacatccatggtaggatctttggaggttttttaatgcatagagcatttgagttggctttctctactgcttatacgtttgcgggtctagtgccttacttcttagaagttgatcacgtcgatttcctaagaccggtttgtaaccaaatcacttcttaccattatcttcttgttcacgttcgtcttctgtgtaaacttacgcttaatggacttaaatgacaggtggacgtcggggatttcttacgtttcaaatcctgtgttctttacactcaactggataaacaggattgtccgctcatcaatatcgaagttgttgctcatgttacaagtccagagattcgctccagtgaggtaaaattctaacttgatgatggagctttcttaaacggttgttaaaattgaacttgctcactgattctatcttcatgccaaaatttcttgaaccttatcagatttgaagctcattatgttaattttgaggtctctttctctgttacatatgatgtaggtttcaaatacattctacttcaagttcactgtaaggccagaggcaaaggccagaaacaatgggtttaagcttcgaaatgtagttcctgccacagaggaagaagctcgtcatatcctcgagcgcatggatgcagaagctttgaagtcaagcaaacaacaatgtgtagtcacaattcttcagtaatggttatggtgtttctatgtttaaaagacctggcttatcaggtttatcctctgaccacaaattaactagaaatgtagatgcatttctactgtatctaaacgattcgctaatatgaccaaagatatggcttacttgtgcaactcattgatttgtgcttgtcgtaagggtaacatgttaaagcatcaaaattagaatcatagcatcaaaacctaatgaattgtcttccaaaaactcatacagaattatccagaaatggcgttagtcatactggttacaatacaatgaaactagagatgcgttcctaatcattacattaaaaatcttacaatgggaatcagtctcccatttccttacacacttggtctagaacagacaggaagtctctcacaatcatgaagattctcattgtgtgaccttccttggaagcatctccatggaactgctctgtgacctcttccaatgcagagagcgttgaactttctcgtattttaatcttcacaatctcctctgcagcggttttcaagaaccgggccatcctctccttgaacttcagccattgatctccatatgaaccactctcctcgctaagtagcaaaagcgcttcaatgttcttgagtccttggcaaatccttgacacattgcttcttagtacaccatactcaatgtcagccgatttcttgacattgctcagttctgtattcaggtttctgatgccttctaaagctctcacactgccttctgatttcatcatttcctgaacaacaaaatgcaagagactgcttcttccatctaatcccttgacatcaacgagcttgaggagcgtgtcgagtttgaaggcatccgcatccccacagcggtttgttctaacactcatcatgtttcctgtcttcagtatagcttcaagaagtatcgaaaacattctactatttcttagttcttcacaagcaacctgcaaaagcagataagtttaatgagtaatgagacataacataagattacatcattagacacaaatatgtaaatccgcaatcatcagcattacctgaacaacactgaatgattttctgagacgtttgatctccgaatggaaattagccacaaaaagcaatgcatcaacacgtttaaacacaaaaggcacatgaagcaattccttaagaaacctctcagctggaccaatctctgaaccatcactaaagctcttcaacttcctctcttcttctttactaggtgctaatcttgataaacactcaagaagttcagctccaagtacatcacagtcacctaaatcaataactcaaagaacacaaatcaataacattacaaaaacaaaaaaaaacaaatggcaatacattaaagattattttaccatcaagaagagcttgacaaacatccttagtgcttaagttaagtagttgaagcagagtagcaacattctgtgcctttcttggatctaaaacttgattttgaatcggaagatctcttggatttgacgagtttgcaatgaacatagtctctaccatctctttgctcaatctagcacagtcagaaaagatagacttcgttaaactcttatcaacaaaagtagaaa

SEQ ID NO: 29950 - DNA, 1210 bp, Arabidopsis thaliana landsberg
tgatgttaatttcagaaattccagggggtatacggttcttcatattgctgctatgcgtagagagccaacaattatcataccacttattcaaaaaggagctaatgcttcagatttcacgtttgatggacgcagtgcggtaaatatatgtaggagactcactaggccgaaagattatcataccaaaacctcaaggaaagaacctagtaaataccgcttatgcatcgatatcttggaaagggaaattagaaggaatccattggttagtggggatacacccacttgttcccattcgatgcccgaggatctccaaatgaggttgttatacttagaaaagcgaggtattgacctagtcgatatatatatttctcatagcttaaggttgatgtctctttattgaattcttgtatgtgtcattgcagtgggacttgctcagttgttcttcccagcagaagccaatgtggctatggacgttgctaatgttgaagggacaagcgagtgcacaggtcttctaactccacctccatcaaatgatacaactgaaaacttgggtaaagtcgatttaaatgaaacgccttatgtgcaaacgaaaagaatgcttacacgtatggaagccctcatgaaaacaggtaaaagcttaaggaaatgtactttcaagttttattctctgaccacaagattgactgattcgaaaccgttcaacaacgcagttgagacaggtcggagatacttcccatcttgttatgaggttctggataagtacatggatcagtatatggacgaagaaatccctgatatgtcgtatcccgagaaaggcactgtgaaagagagaagacaaaagaggatgagatataacgagctgaagaacgacgttaaaaaagcatatagcaaagacaaagaggcgcggtcttgtctttcttcttcatcaccagcttcttctcttagagaagccttagagaatccaacatgatcttgtcccagataagtaatgctactagagatagttccttggaagaaattagctattttataggttttggtttagaaaacagtggagatcccattttggtattcaggtttattacatggtttaggtttgattatgtattgaaggagatggatttttgaaatgtataaagcaaaaccttttcctttttgctttgattctttctttagtcaggaaaatttgcaattttatgggatttgattttct

SEQ ID NO: 29951 - DNA, 2146 bp, Arabidopsis thaliana landsberg
  unsure (1)..(2146): unsure at all n locations
ttatttagcaagtaataagccaaatcaagttatttagcaaataatcatattttatatgttataacaagtccaaaattcatttacttgaaagggcaaaacgggtcagaaggccatgcctaggtatttttgtgctcggtgattgatagtatagtcgtgtagataatttatttaaaaacaatagtatacataatgtgttataatcttatatatatccctccatagtgggtggtatatagagtatactataaataagattaattataaaattaaatagtataatatttacatgtgcataacataagttattacctagtataatttaaatattcttacatgtataaaattaaaattttccaaaagtatgtgataacttgacatgtaaataacatcatataaatgtttttaataattaatatatagcatatatgaattaatgcttacaaaatcattgggctgggcctaaagaagtgcactacgaggagtccggttcaaaagacacgacttgacccgaccgatccgacccgggtaagaggttagcccaccacgcaacgtccgtcggggaagataccacgcgacggaaacgacgaacacgaacagcggaaatcgtcaattcaatctctcagatcagttttggaatcacatataacaatgtcggcggttctcacagccggcggaggcttaactgccggggatcgctgcattattacggcgattaacaccggcgcttcgagtctctcattcgtcggctcagccttcatcgttctctgctactgcctcttcaaagaacttcgaaaattctctttcaagctcgtcttctaccttgctctctctgtaagtttcccgttgttgcctttcgctgattgtgctagatctaggattatgtactgttttgcttccttcttcttcgattattctcactgtgaattgttacatcgctaagacgttaagttccattgcgttctgagatgagtagtgagggttcgagctctattgctgactaatggccatgtttttaattgttgcaggatatgctttgcagtttcttcctaatcgttgggtatgtttatctactactattggttctggtgaatcttgttgagattattttgataagatgattgttacatcttgatcactgtagggatccttcaaaggggttcatttgttacgcacaaggctacactactcatttcttctgcgttgcttcgttcttgtggacaactacaattgctttcactcttcatcgtactgttgtcaagcataaaactgatgtggaggatttggaagcaatgtttcatttgtatgtatggggtatgtaaaatgatactcgtgggtttcggttctcaattgttactatatccacctagggttaaggattagaatgtgttagtatcttctttggtgatttagtaagactctgattttagttacatttctcagggacttccttggttgtgactgtcatacgttcttttggtaacgaccactcacatttggggccatggtgctggacgcaaactggtcttaagggaaaggcaagtgagaatgcttagnnnnnnnnnnnnnnnnnnnnnnnnnnnnnnnngcatttgaacttttttgttgcaacgctgggccagatgaatgtagactagtattttattcttcgttactggaactcatatcacctcttgaattttgcaggctgttcattttttaactttctacgctcctctttggggagccattctttacaatgggtttacttacttccaagtgatacggatgctaagaaatgctagacgtgtatgtaactctctaatctctaataacattgtcttctgaaagtagttcacaaacgttactgatacacttggctgtgtgctgaaatggcaatgttaatttcagatggcagttggaatgtcagaccgagtcgatcaatttgataatagagcagagttaaaggtctgtctttattgccaatactagttctgtatcatgtggctggatttcatcattaaaacctcactgcttgtttcctgaaaccacaggtgttgaacagatggggatactatccactcattctaataggatcatgggcattcggcactattaaccgtatccatgatttcatcgagccagggcataacgatcttctggctctcag

SEQ ID NO: 29952 - DNA, 1779 bp, Arabidopsis thaliana landsberg
gacgctctctgcttccttaagacaccatgttttccattaacacttaaagcacagatgaacaaagaattatccaccaatgtctcaagaatagagatcttgaggaagctggaggaagctaacgaagaagttaaacaaagtaaacaagccttggaagttgcgttaaaccgggtagaaatcgctagtgtgaagcaacttgaagcagaagaggcatttcggcagtggaacatagagtcatggaaagaccagaaagctgttggagcaaaacgctcgatgaaaagagaaagctttcctcagcgctctttcttgagccatatcaatcagcacgagccactgatcgatctccctgagccaatgctgaaacgtaacgtctcaatgggtaatgctcttaaccgaaaagatgagaaacagttggtcacgccgaggagaaagtttaggttcatacaaacacatcaagcttccattagaaaaacagagtaagctaaaaaaatacccaacctttgaaaacatgttttgcacatttcgattcctgttttttttaattcttggtttgatcattgatgggtgttgttgcttccatcaaaagcaaaacacagatgattagagtgagatgtgttgttttgactcaaatgtgacaaaaagaaaaacattatagtaaaaactaaagcttctagtaatcataattaattatgggagttagtgaagggcattgatcatatgatttaggtggtgggcactttcttaactaatgcattttaagtgttagattagctaattaggtgatccataatcaataccgtaggtcctcaactgtttattttttaataacgttggtctttataatgtttctagattctcaaaatagaaactgaaacattcaggttgaactacggagataaaaacacattttacgatttgaccagtttgtactttatactgtataagtttggagtggtcagatacagaatgatgacgtggtcaaggctttataagacaatctagatatctccgataacttaatgccacgtgttttagtcttcacaacaaagatttcgtctggaatcctcgtattggcttagagcgtgggaccaaacgaaaccaaaagaaggaaaaggaactaaataaataaataattaaaaaataaagttgaaaagtaagagtggcgtgggttagcaaaatcattgtctcaggctaaaatgtgccactcccaacacgtgggctactcttttccaagtgtcaactatctgacggtacgtttgcacttttttaaattaggttgctttgcgctcgtttcgtgtcaataatccaaaaagacaacgtctttatctttatttattaattttgtttctcctaaacattaaatgttgtagctttttgatcatttttcatgttgtaaaatataatataataccctctgctttgcttataaaacggaaaggatgcatagtacacaaagatccagaccaacaaaaaaaaaagagggaaaatctccttgttcaatagtcaataagttagccgctatcgatctttagaaagatccgtcgatgagtccatcccatggcgaccggaccaccgcatttgcctcgacggatctagtcatgttgagcatggtaccggtattcaaccatccttaatttcattctttgataccttttaggcatgatactcttgatatatgattctataaaggtatatatattgaaactattttatgcaagaagtttattattgagggcacacgtgcagacatgtttcatgctaaaccatatggagaaaggatga

SEQ ID NO: 29953 - DNA, 2217 bp, Arabidopsis thaliana landsberg
  unsure (1)..(2217): unsure at all n locations
cagcaatcgcaagtgcttccgctgctttcgcagcttcttccattttcctagcagcaaccaattctcatctctgcagttctcagactgttcttgttctgcaggtttaaacccgtttcatcggcttcagcaaccatcttaacctgctcccttaacggttcatcttgaacctgtggttttaccttaatccgattcaactcctcagctagagataccggtccaccaaacccatacgttagcttagcccgtgtcttctcaaggaagtctttctcttctttcattttcttattcagagattcaacagaggactggatcactacaagatcgtccatggttttaccaagattcatcttagcttgcttcaattccatcaagatcaaatcaggagatgacatgggattgtgatggcaatgctcatcgttcatctctttgatataagaactgagttggtcagagcatctcagtgcttgctgctgaagctgccacttcaaatcttcaaaaatccttttggttgatccaagagcttcaagaagatccagagtctctaactctttcataatcagatccttctcaagctccactgtctgttcttccattctctttatgtcaaattctcccacacagtcctgaagaatgacaaaccaaaaaaacataaaacaaattatgctatataataccaaaaaaaaatcttacataacatcttgctagttccagaatcaattgccgcaaatgcaaacatcaaattagctatcacttattacaaaatatctactcagtaaccaaatcgaatcagctatcagttattcagttattagcatacttaacagttagagaacatacatttcaaactttcagtgacattaatgctcaaactttaaatgaacagactttgtaaatcggaaactagaagagaactcacgtaattgtcttcaagattgaagggaacccagaacccacgaccaccatataactgtggagaaatgtcgatttcagctctcaagcatcctctccttgtattctccgggttgaaattctcggacccggttccggttctcacttcccggattacgggtgtaccgggaatcgtctccgccgcagggctctgttgcctctccgccatnnnnnnnnnnnnnnnnnnnnnnnnnnnngtacaagtgaaagggaaagataatgaaagagtgatctatttacagtaatcatagttactgatcagaagcaaacaagattgagagcttctctatgattgtgtttttctcggtaatgaaagtcactcacgagagagactcgaagaacaagaatgcaggctttgatgatgctactactaatggctgtggcgacgtggcttctagtgattggttatctgattaattaataaatgaaaattttgggccgttgattaaggaagcgatattgggccgttggtacgaagttcaagttcgtctatattgggcttttttgtgaaggaaattcttacgtatgtgttgtttgtttctgttcaaatacgaatatccgaaaattgttataattttcccgtgcgatattagtgtatagtaaatgtatgagtgaaataaataggtggagctttcccttatagttttctaaccaatttgtgtggccatcacattaaagcaaaatccgagtaggagaaaacggaccacgtacgaatacgattggaaacgaccattaaattatacgacctccctcactcaaccgtccaaattcatcaccgtcgtctttcgatctctcacgtttctatttatttctccgcatacgtttcttccaactaattagaaccgacaaatatatatatcttttctaattactattgttgggagttaccagttagcacttgacattggtacgtattcagatggtttggtctgacactctgagtagttccctattatatcctatctaaattatcatttcattaaatgtaaaccattatatcttttggatgaacatgccccaaacttttggtcagtagtttcaaattacgacaaacaaggttagtagtcttgatatatattaaaacgtgtggatttgttggtcaataattatttccttaattataagaacaccaaataaaaaggtttatagagtggaatcccacaaaaggtaacatattaaatactctaagcaatgcttactacagtaactgtttaccaataatgtgatcctcacctcacgactctcttattattaatgaaaacgcattaa

SEQ ID NO: 29954 - DNA, 2235 bp, Arabidopsis thaliana landsberg
aagctgggatctctcacggaaagggatgctgacaaaagtagcagcagctctcagagccaacagggatatttggaaagccattgagatgatcgagtttgtagaaagtcgggattatcctgtggagtttgagagttatgaggtagtagtcgagggttgcctggaggttagggaatacattttggcagggaagatggtgatgagaatgactgatagagggttcataccgtatatcaaggttaggcaaaaagtggttgagcgtctgattaacatcggtgaatggaagcttgcttgtactgttagacaaagggtttctgaactgaggtcttaggtatttctcagataagtgttaagattttgtaagaatagctgcagttacgatcctggaatgaaactcacaacccgaacttgggaacatttttgttgtttctgattaaacatagattttttttatagcaatgatccgtttgtccctatatgctgtatacctatatttgaagtgtcgagtgagcatgtaatagtgtggccaaaatgtgatggtataattggaagctgatgatgattttttttgtggacttacgtggatgttttatcttgtcacttgtttcagtcgtcataattagcttctatcttaggttgtgagcattatcttttaccttgagatccttgtgtttgttcaatatcactagacccaatgccatacctacggtttataagaagcaagttatcaaacaggatgcttctaggagaaagtaccaatcgttcaagcgagcctcatgtgcttaggcaggtattatagaaaacacatgtttctcttataatcgcatcttgactttagaatcctgttaacgataacctgcctctcaattatctctagtactttattttacaatcgtaattattttagctgcgctattgcagatagtcatacagagagcattgttatccaaaaggaaaaggttctaacgcttatggagattcatggactcactgcaagggatagcttgccatcatagcaataccacatttacccgtgtcttcacttacaccacgctccatccgtatgtagccttcttcaccccagccagttccccatgaattctttacgatccagtacttttgatcgccttctactccatatccaacaacagtcactccatggttgagatttgttccacagtaattagtgaaaacaccggaggagtagagctgaaagataaacccaccagcatcgattccaactgatactggctgttgagctgcagcgatttgtaggctcgcctcgttttgggcgaccttttggtatccttgtatcgtaactaccttatttttggatttttctgggtcgcaggtaccctctatgcctgtgtatgggtagtcggtctccgtggcgagtccaccattggttttgatgaattcaaatgctgtttccattaatccgccactacagcctttgttgtaagtgccgatatcacaatctatgagttgttgttctgagagagacactaaattccctgttttaatcttgttgatgccttcaatagctgctactgcagagaatgcccagcaacctcctgcaacaagaaaaacaaaacgcaatcagaatgtcatcagttgaataatgaatgtttgcaaggttttatgtttagaatgaattatgtaaaaacataatttcataccgcattttccttgatttctgataggagtcacagcaccttgagtcctccagtccacagcgtccgggacattgcctgctgggtcacaaactggtctctgcttcttgtgtaacctcaaggaagacgtgttcaacccgagaaaatgggccttaaactcagaattggtcatatctgcaaatctattatccgttagcttaaagggcaagtggagggagttgatgtagtcaatcaactggacgttagactgatatatcccaaaccgtagcatccactcatcccttcctccatataatttgctgtgggttttaagccacttctcgaaccgctgcttcagggttttgtgtgggtcatacacagaggaatcgacggaacatagctttgaagctatcaagacaaagcaaatcaaaacggcaagggtcaggttagaatttcgaagtacattcagcatttttgtttgtttaaaagttggagtttgggaaatgagtttggtttctggtatataagcttcagtcctgtgctgctttcttggtcacaggttttgtgttttgttgcagttccagtg

SEQ ID NO: 29955 - DNA, 2287 bp, Arabidopsis thaliana landsberg
tggggcaaaatgtgtttaactattcattttattttatttcaattttttgcagtatatatatgtaatatgtgtgtatacgagtctgatcgagtacgtcagcgattcatgaataccatttaattgacataggacaaaaggttacttctgattcaccatttactattctcatcattctcttcttttttgggttcaaattctcatcatcgtctattcctcttcatcataactctctcttgaatgttatttccatctgtataaatacaaacttacatgaattagtaacgtattattgctttctatagctattctagataggggacgtaaagagaaaaaaagataggggacgtactttttgttgacgttatagaggacgtacttttttttaccctggtggttttggtttgttttgttaaaggcttcacggctttacccaatatcaataattcacaaagacatgtgcaatatgatcagtttattacaaaattacatcttgtctcaaaagtcgcaatctactgcttcgtaaaagatggataaaacaaaagaggaaaagattgatttgtacattgcctactaacttatttaacgtggccagaagcatgaagtttcttgaattatgcatgcacataaaagccaaaacaaaaacaaaaaaatctaaagtcggacgcgaaaaaaagcatctgctctctttggatatcgaatatactcacctctcttcatcgccgatcccatcagtgttgacatgtttggtcaaccaaataaatttgtagtgtcactgatttcttatctttttgtaaattttctacattgatttgctttttgatataaagttctaacttttttaaaagtatcatattacgaggaagctaaagcaactacaagctctagaagattgtaacttttctttgaaagtaaaagcactcatggtttttaattgctaacaatatacacttacgataggcaaatcctcacactagggattatatgagccactgttttggattctgtcccaaaaatataaatgaacaaatacaactacgtactgatccctgagtacactattgaagtcccatttccgtataattcccacatagaaaataaaagattgtgacaaaaatttctgtctttgatagataacagtaataagatgatgcactaaatctatccacgagatggaaagaaaaattaagtgaaagagaaagactttaggttcgaatcacttaatctccgtggggtctctccatacatctctgtttctttgagtgaaactactcctaaggatttgagcatatgatcaagtgtatttgggttcatgtagaatctagttttcggagggaaccatgaagcacgaaacaatcagtcaccatttggtcgatgggcctaaaatgtcacctactgatcaccttcttcctccacgctgtcctggtcttggacctgggtttctgaaaaattggagccgcaaaatcttggaatcgggttcgccttcatccattcgatagtctgtcaaatataaagttgtatcagttaaaccagcggacgagtgttggcttgcatcggacaaaatcaaactttgatacagtatatgttctagcatagtgtttataactgaaatgaagatagtaatatcaagaaaccaatgcaaaacaaactcaaaatgtgttggaacaaatattagcaatccccaaagtagagagaatctcggttaccttgcaaagcgctcagagcagttgctgcacaggcagagttttcaaaatcaacaaaacacagaacagtaggatctccactcctctgcataaaaccccttagaaagtcaatattaatgaaattatgggactgagtgttttcattttcaacaattcttcaaattggaaccagtgaatcttacgtgttttgaatcttgggtcacaagtcttacttctctatatcccacaaaaggccgaaatatatctagacttcagttaaggacaatgaatagctcaaacattcttaagtgaggaaattaataattgtaatgagtcattaggtaggatacgggatacttcccttcttgagcaattagaaggaagtccttcaacatacagagtgttggatacatctggaggtagaggatgtggttcccggcctggcctaccaactgaatccagctgaccaaaacccatatcccgaccatttggcctgaaatctgaaggcaaactcccaccacacccagccatgagctcacccatggacggaccaggcatcatgttggaacctccttgtcgtaccatgccaacaccattaaatggaccag

SEQ ID NO: 29956 - DNA, 10306 bp, Arabidopsis thaliana landsberg
ggaagtactgggaagctcatagccagtgatcggaggcatggtgtgcaatttccaaccatcacttccgattatttgtgagtctctaagatccacgattaactcttcatcgggctttcttgtctcgctattgatgtccaggcactgtaagctctcgtgactatgccatgttcatatgtttactcttttcctctgtcaaaatttagggcttcaaatcactacaagaaatttgttcatttttagcgctaaaaatctgctatcttacattatctatagcaaattcataaacgccatgttctcggcagctatggtaggtgtcactcctacgatagcagttttgtaaacgctattatatttaatgatataatcgcaaaattaaaacgctgttttaaatagtaatatagcactttaattttttgctaaaaagtaatgacgattttaatttcgtgccataataggttattctatgttagcaattagttcacgctgcgaacatttttttttttagcattacgtttgatgctatgatatatgattcttctaccataacattaaataattgctgagttttgtttatttatgcggtttagttatgctgtaatacaattgttcacaacctgtttgtttttgctattatctgaatttttagaacccaatatagagaaaaaaaagtctgaatagaaatttaatcttaagtctgaatcaaatccaacatagagaaaaaattcatacaaatcattcaacataacataagtctaaatcataagactagtctaacataatcaaagtagacaacaagtctgattctgaattacataacacaagttgattagtctagtctaaaactactttaaactagctaacctggaccaaagtgtcttcattccctgcaataatcaacaatgtttcatttcagtttcatatataaaaccaaagtacaaggatcactgtaatatagaaacttaccccaatttattcttaaactcaatagatgaccatcttatccattggccatgcaatagatgaaccaagtgaatctctcatatactcgatttcatctgatgccctccaaactgctgcatcatctattttcactatatccaccaaaactctagctgcattatttcccaagcgaacatggtgtaccttttggtctgggtcgactgaatgcacacgtccttcagcaaccacctgcttccttccactgatatccattaacttacacttttgattggccttgataacttcagctacacttttatgctgccatgttacaatataaaccagttttaatgtatgcagaaaaataaccatattcaatagctaggtaataacaacatacaaaataccggagatcttctcagagggagttgtgaatccagcagctgacttttcttgacaggagactttgaacctttagctatggacttctcagctatggcctttgaaactgttgcaacggattttgtaccttttgttgtagatatctcaggggatggcttataacctgctgctgcagtttgtgaacttgatgctactgctttcccggacgctactgctttctcggatcctgctgacttgcctactgatcctgctgacttgcctactgatgctgcaaacttgcctactgatgctgctgcttccaatggtgattttcctctggcagcagaagtctgaagtggagatttctggcatgttgcatctgcagggtttttaaagataactttgttgataggccatgcaacaaaagacattaaacagtcctcaagataagtcacatccatcgttggcctccatataaacgtctctggttgaagaactgcaccgacaaatatcttcactgctgcaggtccgagaggaagcccattgactaatgcatttggttcttgtgtctgccaatgtccttctgcaacaacaacatcatttgaagacaaatccaaaagctggcatttgttatttggtccctgtaaaaaacattgaaacccagaaattcattatgttaatagaagatcattactctatatatgagaatgagactgaataataaactttacctggcctgcattgtcttctggttggagatcctcttctaggctaacacacatagcagcaggccatgcaatcatatgtccaacagctttctcaatggtgaacacattagtcgcatgtctccaaaggaatgcttctggttcaatagcagtgtcaatcaaaactttaacatccgtagggcctaagcgacagtcattcactaattcacccggatcagaagaaataatacatccctcaacaacttttgcatcagaaccatgccaatcaagtaagaaacattttggttgtgttcttttgttcacactctgtaaaagtaaaaaatagacaaagtattaagttagtgtatctgttagagcatatcaaagtatatgatatgagtgacttactcttgcagctgagttttcacctacttcagctgattgtctctgttacaaaaaaagaaaaacaaagtcaaatcttatgtactaattgagccgtaagtctttatatataaatagataagtgcactaacctggttcttcattttcttaattacttcttgtagctcattgaccttcttttgtagatgaagctgattctcttgcatttcagccatacacttgtgcatcacttggaaacaagctaacttggtcttattcatattgcaacccattgctctcagtctaccatgattctcaggccctaacagttggcttagtgaatcttgtgcttcatttgttgatggattatcactgttaacaatctcttctgcctttttctgaaacacataagatacattttaaaatatcaagtgtcattcaaaatgccaaattgcaaatcaaacgaagcaataactcacaatcttttcagcaacattcgtattcactggtgtaccatccttcttagtacgtgacttaacccaaacctttagccttgtcacttcagatgggtctccattagcagttttctaaaccaaaaaatgatcttagttaatacataagtgtttggactttggaaaaaggctgagcaatatgaacaatataagtgtgtacaactattaccatgtcttcggcaagtctaaccattcccctgcgactacaagtatgtggaatctgattgcgccttctttccttgtagctatcgcttacaacctaacagatgaatgttaatttctattgtatatagataaatttacaaattccaaatgcatatcttaaattcttggctagttttgagcttcacaaatttacgccaatcaaaagaagaaatgtttttgggtcgcatgttatcctctcttggttagtcttagcttctctaatgtttgtaacttgccttgatttcaaggacctccacaaacattccatctgcctaagcactgtaaccttttggtactcttcatcaagttcaaactttgcctgcagtcaaaaacaaaacagtcaagtactcaccaatatctaataaacttgtaaattttacacaaagcttacctgaacagatttctagagaactgtcctgagttcttcaccaattttactccaacgttcaattgtgactggaacgtgttctcttaccaatgcccctacatatgatgccagcttaactgagcctttaccaataggctctcccatgttagcgaactctactcttactcttgcatttggatccttggcaatatccttcagcctagttggtcctcgatgtcgcttacgctttggctcaacataaacatcaccctaagataaaacaagctcttcgtgaggctcttcctcattgaccttatccgaatctccatcaaccacctgatctggatctgctacttgatctggttccaaatgatcttcatcattcacctgatctccatcaatcacctgatctagatctgctacttgatctgcatctgatacttgaacttcagctggttctgcatgttcctcatcattgacttgtggttcaattgttccaatatactcgacctcatcattggcattctttgcattgaccttttttttgttacttttacctcgctttttcttttattgtcccatcttaaatcacatgagaaaaatgaaagagtaaagggttaagtacacatgatgcaaataagacattgaacacactatgggaaacagacatcaaacatagagaatgcaacaaggaatgaaaatgaagcaaaaaaaactacatttcacaaacataaattccttcacaatcagtcctctcattctcagcttcatccaagtcagcgtctatgtcaacatttggtggcaatgtgccaatggctgcaactgaatctacaaactctttctgactaaatcttcttgaagaacctctcaatgcaacataccagggtgatgagtcatcttctcttaggtaaaaaacctgttttgcttgagaggctagtatgtatggagccctcaaaaatgagtcttgactatgattcaggtttacaagtgtaaaaccatcctcttgcttcactccattactttttactgcccagttgcagcggaacaatggaacgtaaaagacattataatccagcacgataatatcagtaatgcagccatagtatgaaaccaaatcgaccacttgagaagtgtcttttgcactagacctacagatagcagatgcctcatagtacacaccactgttctgagttttcttatccactgttcttgtatgaaatcgctgcccattcactatataaccagaatatgtctttgcacaactacgtggaccataagctaactatttaagtgtttcttcatgtctgtttgaatcaagaggtatctaacaaatttaaaaaaaaaatatcagacacctatatgcttatcgataaagtatagtgtttaagtgtcaagtgtgagttataaacatgccagttttttaagccatgaagcaaaattctgagtgtgcaagttccataagtgtgatgcatcacgtctgcatcttacatttgagtcttgtagatgttgcagatgctcactaatacaaggaaaaattagaagtagtcagagacagccatatggataagtaaaatatatatagctaagtaatataagagcctattgagattggaacttactcaacataagattcagagactgccatattctggatgacagccatatgggctatttttgtctccatttcagtaagattaatataagagcctgctgagattggacgcccatcaagtatagagttgctctcatactcagtgtttctatcaacactttcctgaacatttgttgtcttcttcaaaaattcactacaaaactgtatgcattctttagctagattacactccgctatacaccctttcggtcttgcagtgtttctcacaaaatccttcaaaactttcatatatcttttaaacggatacatccatctgaaatgaactggtccacctaaacgagcttccctgcctaagtggactgtcaaatgcaccattatatcgaaagaaacttggaggaaagaacctctcaaacatgcagatagtttccacaatttcattctccattgtagaaactgtctctctgtcaataactcgctgacacagtttgttgaaaaacgcacacaagcgtccaatagctatcctaacacctttaggtaacaaacctataaatggataacattgaagattaaaaacaacacatcaaattatgcaagaatttcagctaaaagaattcatcttatacctctgattgcaactggaagaagttgttgcatcaacacatgataatcatgtgatttaagtcctttaacagtagaatcttctatcttcacacatctggaaatattagaacaatggccatctggacctctgaagtcaaataaccgcttacagaatactttcttctctgttttggacaaagaccaaggagctggaggaaggtaggttctttttccacgggcttggggatgtaaatccttcctaataccaagcagttgcagatcttttcgagctttaataccatcctttgacttcccacaatgcagcattgtagagacaaggctagcagcaacatttctctccacgtgcatcacgtctaagttatgtctaaccggcatttcctagacaaaatagtaacagataataacttaaatggctacgacatttatttttcaaaacttactccaaataatctgaacttgaataactttgataataaatcataccttccaatactctaacttgaataagattgagcgcttcttccatcttgaaagctcaccttcatctaattgttcttcctcttcttctgatgcaatggattcatcatcagtaccagaagttgatccagtacaatcgttcatcttcatctttctttcttttacttttacatttccaaaatcattcttgtatttttttaggagttgatatatgttatgaccagtcagaatcctacctcttcttccattctcagctttaccatcaaaccatgctttctttcgcctataaagatgtgtgggtgacagagacttccgatgagacatatacacgtactttctgcaattactcaaccacaagctatctgtgtgcttcccgcatactggacaacccattttgccttttactttgcagcctgctagatttccatatgcatgaaaatcctggatggtccacagaagcattgcttttaacgtgaatgttgtgtgactgaatgcatcataagttaactctcccttttcccacagatggttgagatcatctattagcggttctagatacacatctatattgtttccaggttgagttggaccaggaatcagcaatgtcaacattatgttctcctctttcatacacttgttaggtggcatgttgtagttgactagcaaaacaggccatgcactatagttaacattcttcatgttgaaaggattaaacccatctgtggagagtccaagcctaacattcctttcttctgcagcaaatgatggatacttctaattcatttgatcccatgtcacagaatctaccggatgacgcatttttccatcggtgcttttgttactgaaatgccaccgtaagtctttcgccatgtcctctgatctgaacatcctcttgagacgtggaatgatcggaaagtacctaagtactttctgtggattacctttcttcacctcaccagttcgcgtgttaatcttccatcgtgaggaattgcatttaggacaactgtcgagcttctcaaactgatttctgaataaacagcagtcatttacacaagcgtgtatcttttcataacccatatcaaaggtttaagaaacttcttcacattatacaatgatgtgtgaagcacattgtccttgggaaacattttgggcagcgtctcaagaagctcatcaaagctcttgtcagaccatccattcttggtcttaagcctaaagagagacacaattgctgatagcttgctgtggtttaaacaatcaggatataaaggggtttctgcatctgctaccttggctaggaactcatcttctctcttgtcctcaccctctgcaatctcacctaagttagccactagattgtcacctacatcaccattagtagccaagtcttggtcattgtattcagcagctttgtataactcatgaatttcctcattcgaatgattgacttccctttcacattctccatcagctactgagtctccatgatggtaccaatcactttgcagcttgtaagcctcatccatccctctcgttacaagatgaaccaccacatcactacttgagtggcagtacacattacgacagtctttgcatggacatattatcttaactatatctcctaaagccgcagccacatcaaatacaaacctccgagcacctctctcataaccaggatcagctcttcaatgaagaaataaagttggaaaaaaaactcaagcaatgttctaaaccccgttttaaattgaccctatgtatatacttttattcattgccagcatagaggcacccaagacttgtctgacattatatgttataagcttaaaaaagccttattaagataatttgaaaccataatcggcaacagtcacagtcatagagcaacaaatcgagtaagagaacttatcagacaacttatcatgaagagacaacttaaactgaacacaatgctaaagacatactaagcattaagcaacttacactatctccgaaacaagaacaatgacaacagctttaacaaaacaacaactgtggcagcaagttcaacaaaaccaaaacagttacagcaagttcaacaaaaccaaaacagtcactgcaaaaccaaaacattcataccatttacaatcaagaatcaaagccacaatgactaacctgtcgtttgagtataacaaagccaagcttcagttccaaaatatttcaatcaccaacacttgccaaaaaaatgcagaatcagtataagataatacaatgtagctttaaaaaaaaaaactgataacaaatcgattaggcaaaatctatatcacaaaacaagatctttgtgaagagaatgtggattcaaatgttaaacagacatgataatcgcagaagttttttgtttaccctaaattttaaacaaaccgatgaaccctaaattcaaactaatcgaagaaccctaatttcaaattgaaaaacaaatctgatgttccttagcaatctactgaactagatcgatattagagacaatcttaaccaaaaactcaaaaggaatataaacgaagaatgacatgccttggttttaactctctgacggccgctgcgagtgaagattaggccacggcggagtacaaacaggcttaatacgacttcgatccttgagaatgagctttgaggattgagatttgaggtaaattggtgataaatctctctgtcgctcggaattgtttttttgagagactgaagagctttgggtttggttactgttctcgcgcttaagggttttggggtaagtgactgtagagggaactgaattagctaagtgtttttttgctaagtgttggcggataaagtcattttagattcccgcttattaaattcctatcatagggtttattcaacgctattataataaaatccaaaaaaaaaaaaaaaaaacatagcaggaacagaaaatgagctatccgctagtgctatcaatgttgatatttgttgtagtgccattacatgatttgaaatcttctaaaaaattgagtttagagtagtaatgtggaaataataaccaggagaaatgtttgaatgtggtttcatatatatcttgcttttcactttgaaaatttgtatttaagtttaattgaaacaattgatcaaatttctgtgcttttgaaggaacccattttttccttttttgataaaaacaaaatccaatgctaagaacattttcctccatctagcgatgataatcttagaagaaatttgtctaacatgagagactgagaccatatattcacaattccttaccatgtgaaagcaagtaaataaagaggaatgagataggagagaatagaaatgcagtaaaaacaagaataaatgttgtttgtgtctttgttaaacaagaagaagaggttttgtttagaaacaagatgtacaatcattcaatatatggttctgtttggtacaagacattcaaaacgaagtataattcaatatagttagtatagtacaagacattctgcacaaagctatatagcaagattcacgagagtgaagaatgaagatacaaattatacatgttaatacttgtgtccagttaagcagtggaagaaacactgatactcagagataagacttacttcaactacactgtttcggtcacccccaacttttgaagcaaccataaccaaagttggatcaacatcattccctccatctttataaatataatcatgagagctatgatcaagtagatttactctgggattgagttggtgagatcctataataatttaccaaaggcatgtcagatatttaatctcattctcccatcttcttaagccacatagaaactaagccacaaatgtttaaccagataaacacttcaaaacactattagcaccaagaaatgtgaaaaagatcataattaagcagccatatacatatatatttgggcaacactcaaaacgcaatttatcaagttgtagaaaaagaaacaaaggccaaacacatataaacaagaccttctaaagctagaagccacaaatgttcgaaaagagaaaaacaattaccaatagaaacgtgaagactatatcttaatcaagcatgttctagtacgagaaacacatagaaatagatgataagc

SEQ ID NO: 29957 - DNA, 3155 bp, Arabidopsis thaliana landsberg
  unsure (1)..(3155): unsure at all n locations
agatcaggaaggtgttcgataaaatgactgaatgggttacccctggagaagtaatttggagagtccaagagagatgatgattttgcgtggagatgttgaacaagatgagtttcaatacgctagtagtcactgtttgtcttcttactacagtgtctttgttgttcgcctcgctataatggttagatttccatcagcttctcttcacttttttctttgaaaattccgatcaaagtttctgtttttgcatgtttagtttatgatccaacttgaaaaccaatccatttgatgagaaaggtggaagctttatgagtttagaaatggtgtgtttgtgtgtgtatgtgtgcaggttatgttagcaattttgatagggcttttaacggttctaacatggcatttcacaaggatttatacaaagcagtcgcttcaaacattagcgtatggccttagatacgagcttcttcagcgtccagtcttacggatgtggagcgttttaaacaccacatcagagctaacaacagctcaagtcaagttatctgaatatgtcatcaaaaaatatgacaagccaacaactcaagaagaacttgtggaggttttgttttctgttttcctgtctatcctttgtttggtttgagatcctttatttgataatttttgttaactttatcagatgtatcaagcaatgaaggatgtgacatgggctctgtttgcgagtgccaaagctctaaatgccataaccataaactacagaaatggatttgtccaagcttttcacagagatccagcaagtagcagcacattctacatcttctccgatctaaaaaactattccatcagtggaacagggcctgaagatgtaagtgggtggaacaacaagtcaatacacgggaacatgtctgccatttggtatcagcaacagcttgatccagtaacaggggaaaatttgggaaagccctttaaaattccacccgatgatctgatcaacatcgcaagaatctcacaagtgcctgatggtgaagcttcttggcatgtgacagtgagcaaatacatggactctccgcttctctcagcggctttgcctgtctttgatgcatcaaacaagagtattgtggctgttgtgggggtgacaactgcactttacagcgtaggacagttgatgagagatcttgtagaagtccacggtggacatatttatttgacatctcaagaaggatacttgcttgctacctccacagatggtcctcttttgaaaaatacatcaaacgggcctcagctaatgaaagccactgattcagaagagtgggttataaagtcaggagctcagtggttagagaaaacttatggaagtaagcgccctcacgttgttcatgctgagaatgtaaagcttggtgaccaacgatattacattgattcattctatcttaatctcaagagacttccaattgtaagttgtccctatcaagattctaagctagatttagatgcccagtaggatcacgttgtttaattttctgtttacgtattttgcaggtaggtgttgtcattattcccaggaagttcattatgggaaaagtggatgaaagggccttcaagactttgattattctgatttctgcttctgtctgcatcttctttattggatgtgtctgcattttaatactcacaaatggagtttcaaaggagatgaagctaagagcagaactgataaggcaactggatgcaagaagaagagctgaagcttcaagcaactacaaaagccagtttttggcaaatatgaggttggtcatcactgtatattcaagagacaagttcttacgattgtttaacattcttaatgcttaatactgaaatgagggttttgaaattttctgcattctagtcatgagttgaggacaccaatggctgctgtaattggattactagatattcttatatcggatgattgtctttcaaatgagcaatacgcaacagtcactcagatcagaaagtgctctacagctccccttccccttctcaataatatactggacttgagcaaggtgagaaattataagaaaaaaaatcttatttagttttgatataggaagaaaaaatcttcaagctttagtattacatctgatgaccttaagttaggcaatgagtaaacattttagctgtttcagctgtgcttttctcgaaactagtatgtatgtgtacagcctaaaaagatcaatcactctaatttcttccttttccacctcataggttgagtcagnnnnnnnnnnnnnnnnnnnnnnnnagtttgatttggggcgagaacttgaaggacttgttgacatgttctcggtgcagtgtattaatcacaatgtagagacagttctagacctctctggtatgactcggtattatattgtagacagccaataatgaattttctttgcaatgaatttttgcgttatgaaatctcatatattttgctctttttgtagatgatatgccagcattagtcagaggagactcagcaagacttgttcaaatatttgcaaatcttataagcaattctataaagtttacaacaagtaagttttttgaccatatctactttctcttctttttnnnnnnnnnnnnnnnnnnnnnnncataaaaagatggttgctttgcagcgggtcacattattcttcgtggatggtgcgagaacataaattctctacatgatgagatgagcgtatctgttgacagaaggaaaccatgggctccaatgaagacaaaacaggtgcaacacagaaatcacttgcagaagtcttgtaagaacgcgaacaaaatggttctttggtttgaggttgatgatactggatgtggtatgacacttgagttccctaattatatgtcatttcgctatccgcttcatcgatctcccagattctgaaaatctctttattgtgtaaatcttatcttcaggaatagatccaagcaaatgggactctgtttttgagagctttgagcaagctgatccttctaccactcggacgtaagtgatcatgattaactgcacgcagtgaatgtttaagcaaaactttgccgttagttgaatcttatatctcactagtcttatttttcttcaggcacggaggaactggacttggactatgtattgtgcgaaacttggtgcgtcaagtttg

SEQ ID NO: 29958 - DNA, 2156 bp, Arabidopsis thaliana landsberg
atcactacctagctaagagcatcctccgccccagcgtcgttctccaggttgcatatggctacttccgctccccttcctcccgcgacatagttttcggcaaggtctcagttccttcttcttcctctgatctctacttttcgattctggattctgatttgtcttgtgggaactgcttttttttttgttaaatatctctcctttagggattgggattttgtggagttgatatgctatctgcacttgtttcacttgcttgctgttttttatgttgagggcattgttgaaagagtaaaaagttgtatactttttttttgtgggtatggtagttgcatcaggatgttgttataaaagcttatttcaaatggatttagagtctgtagagcagaaatacagtgagaaatgcttaggtctgtagtgtgtgcttttgttgttttagcagtaactagaaatggaatttcttttgtcttaccaggagacctgcatagaattggtggttattggtgaagacgggattgttgaatcggtgtgtgaacagtatgtatttggaacaattaaggatttggctgtcatacctcagagtagcaagctttattcgaatagtttgcaggtaagcattttccatttaagcacggtatactgtatttgattgatcaggtattttactccggcaaagattttttttaaattggtgacaaccaagctttttgttttgttagtaacaggaatgcagatctatatgatttgatatgtcaaccatctgttatcttttgcagatgggaaaagaccttctggctgttctttctgattctggaaagctctcatttctctcatttagcaatgaaatgcacaggtttagatcccatgtactcttatttatcccggaaacctaatgtcaccgttgctcatttcactgctgtttggtgtaggttctcgccaatacaacatgttcaactttctactccaggtaactcaaggattcaactcggaagaatgctcacaatagattccaggcaagttttcaaaaaccatgattttgttacttcattatcctattgatgacttagatactacttttaaaataaccataattgctagctgtttcttttttcttttgtatgttttggcctttgcccaagtactcactattcgattgttgagagaattgaattggagcgttcatgtttctaagccacaccttaatgttaaagcttacattttttgtatcttgaatagcaaccagtaattttgactcctgtaatgcattttgcagtggtctctttcttgctgtcagtgcgtatcatgaccgttttgctctgttttccctctcaacatcgtctatgggtgatattattcatcaggtattgatttctgccaccaacttcggatcatcttgtaacttcagtagacgggaggtttaccttttgttgtggcatgattgatattgataaagtggctaacattatatttaatttcttttattttagaggatttcttatccttctgaagacggagggaatggtagctctattcaagcaatatctggtactatttggagcatgtgcttcatttctaaagattttaatgaatccaaggagtatgctcctattcttgccattgttataaataggtattgaatcctttcaatttgagaagctctgttttcagttattgtgcctgcttacctcagtatttttctgatcgtataggaaagggtccctcatgaatgagctggctttgtttagatggaatgtcaaagaggaatccatatgtttaatatcagagtatgttgaaactggggctctggcacatagtattgtcgaagttcctcactcctctggatttgcctttctgtttaggattggtgatgttctcttaatggatctaagagatcctcaaaacccttgctgtctgtttaggacatccttagattttgttcctgcttcattaatggaagagcattttgttgaagagtcgtgtagagtacaagatggagacgatgagggctgtaatgttgttgtatgtgctttgttagagctcagggatcatgaggtcagggatcatgatcccatgttcatagatactgaaagtgacattggaaagttgagttctaagaacgtctcttcatggacttgggagccggaaaataatcataatcc

SEQ ID NO: 29959 - DNA, 2312 bp, Arabidopsis thaliana landsberg
ggttgttgtctcatgagccattccattgaagaaacattgaatgctttggttacgtaactgagcccagtgcgaattaagcgcgtagcttgcatgccaataaatggagactggttcgtaacattctctcccaggagctaaagctgcacaagtggtgttgctttgggcacaagccatcctcaatgtttcttcaagctcagtctcgttggctccttcgactggtacgcaccacacttgacctttgtaaggaacgttgttcgtcggtttaggtaacgggttgaaaccggttaagggtgtttgaccggtgaaatctacgtcgtagattggtgaaccgtcgggatgcaagattccccaatgtctctgtgtccccgaaccggatttctggttttcgttgaataaggagaaaacaaatgtcggtattggtaaaccgggtcttgatggtgtaccgattggaggacttgcgctcatcttcttgatcagattacggttataggtagctgcgttgagaatgttggctccggtttcgtcgatgtcaccgaaattaggccacccggtttcagagatcgcgaggcgcatgtgtgggtaaccgagtttggtcatggcgaagagaacagaatccaacatttggtctagaagattacggtaaaccaaaccggtttgaggatcggtataggttgagtttccttggaacagagcaaaatccaaactagtgttcatggggtttcttgaccaacggaagtaaggatgaacattaaggaagaagtaagagttcgttccgttgaggaatttcagcaacggtaacataaccggtccggtgatttcttcccggaatgttccgttcgatggaggaaacgacgaccggagagaatccatagctagaggtgtcccaactttaatgttgtgaatcccatgcaatctgagagaattcacaattttgcgcatcgccggtacaagattcgccgagacattcccggaattgtagctgaggatttcgtttccgacaaggacaaaacggatttgtgtttgtggatagtaagggaggatgttggttctgacccattcgtcagctatggtttggttagagctgagtgaggtgatttggtggttagggacggttatggtgacgtagaggttggtttgagagaggagtgtgagactctctggatcggcgtcatagagcttgacatgaccagctttgatagatttgatgaagttgatggattggtatggagatgggaggttgtttcctcttcttccatagtttataccaatcttgcttgccaaatctagcattgttttcctctgcatgtacctgtgcccttggaaccgggttgcggaacaacatgaacctgtaaaaccaagaaaaccatgttcaatatgggagatcacgtaaagaaaatgtaaacatgatgcattattaagatgacttacttgaaaagacaaggatggtgaagaggaagaaagctagaagagacatgtctttgtgtttgtgtttgtgtttggtttgcaatgtgttggtgatgatcagaatgtgattttaagatggaatggtgtggcattggagatgaggtttataagtaggagtatggtgtagtgtaggtttatggagtcatgcaagaaaagctttgttttggcttttgattttctttttgaaactctcatagttcttttgtgctatgattttaaaaggattgttggttggatggttcaaattgaaccaagaaacacgttcccaaatattgttaaatttatgcaaatacatttctgattgtagattgagagattatacatcaataatgagtttagtaagacttaatgaactaaaatgtatgtttcgatgataacaatttatttagaatttaaaagaactgtatactatatattattttaatttatcttccgtgcacgaaccaaaacttcagtaccacactgacacacatggcttttagacgaccactcagagtaatcgttatcttcattttcttaaccgccggcgtgaaaatcgccgccgcggatgagccggttccgacgccatgggtcgcctcagttccacgcgctaatgttcatgaattactccggcgacctctcgatgatcgacctttggtacgactggaccaacggtcgtaatttcaatatcatccaggagcagctcggtggtattacctacgaccttgaatggaataatggtacatccttcttctacacgctcgacgagtcaaaatcgtgccgctccggtcagctccaggccggtattttctgttcatgactctgaaacagaactcagaatacggttagtctgttttatactgatgcta

SEQ ID NO: 29960 - DNA, 1427 bp, Arabidopsis thaliana landsberg
gcttctctgtgcagtatattttataaatgaaacattcttagtgtgtggcctaatatatgactaaaagtctacttgtaacaacagggtgacatgccgtgactggttccaactcagtctaaaggaaggacttactgtcttccgtgaccaggaattttcatctgacatgggaagccgaactgtaaagcgaattgctgatgtttcaaagcttcggatctatcaatttccgcaggtaccttattttgtactccttcgaggcctcttcatgggattttttcatcttctcatgccaacttctctgtcctctaatttatcaggatgctggtcctatggcacatcctgttcgcccacattcatacatcaaggtcagagatctcttattttgccttggaaatgttgatgtacatgttatgtaaagtgttgctaaatatggatcttttcctctctctggcagatggataacttctacacaggcaagtttctgttcacaagaaggaattccattaaagcattgtattatgttaatcttagcattgtgatccaatctaacgtttgtgtgcttttgtaacctgttcgaacctgctttacatctctggccatcacctactctctcagtgacggtagggactaaaaaacactcttttattcataatttcattttctatcaatcccttacatattatttctaacagaatgatttggtttctgttgttgtttcaggtttatgaaaaggtttggctctttaccaatagtgttttgttatatgcagtaagccagaatccttagttgactttataatgttctcctagggagctgaggtcgtcaggatgtacaaaactctactaggaactcaggggttccgaaaggttgcttcccaacgctactttttgtgtggatccagtgacgagatttttcgtctaaagtgttctaatcatctctatatatccatatgttacagggaattgatctctattttgaaagacatgatgagcaagcagtgacttgtgaagacttctttgctgctatgcgtgatgcaaataatgcagactttgctaatttcttgcaatggttagtcagattattattgtggaatttcttgtgaagattcttgttttcatacttctaaggatataccatatacaacatcttaggtactctcaagctggaacgcccgttgtcaaagtggtatcctcttacaatgctgacgctcgtactttctctttaaaattcaggttcaattcttcttatatctaattctttttcttttccttttttccaaatccgtgcaaaaattgtttgtttatagaccaaacttcatggcccgtccttgaaattgaaccttcgtggatcttacatctattgaatttgttacttgacattggctttctttgcaacttttccagtcaggagatacctccgcttctagccca

SEQ ID NO: 29961 - DNA, 2965 bp, Arabidopsis thaliana landsberg
atttggtttgttatgttttggcatgttccatgtcccatccaaccaatgatggctttaattgtttttgtaaaataaaaaggactggcaaaactatgccgcataattttcgcaatgatcaaatttataatcgtggttaaacataatattctctagtaaatttataaatagtgatgatgatatccgaaagtggttaaaaagtaaaaataataattacatagacattaacgttaaagttgactatttccttataagaaaaaaaaatgaccgttgcctattttattgtaccatcatcgagaccaacgaccatgcatacatttatgtaactgactatactacctctactagcccgctttacgaaagtgacattgtcacagcagttggagggcaaacatgtcattacaatcttgattggtcactgttccctccacccaaaacattcatttttcaataaaaaaatgataatattaaataaataaataaagctaattttccactatatgaaaaaaaaattgtggtgcgtaccgtttcagtagagtgtaagatttattattttaattgagtatacaaaagatcttgtttccaaatctgtcggtacaatttttttatacatatattcctattataatttatttatagctaaaattacattaaaatgcaatagtattgtgtgtatattgtagaaacaaaaagttaactatgatcttaatggcggcaaatataattatataaccacaataaacaagttacatactcgacaaatgtagaatgaaaaattaataaaaatgataaaattgaataagcaatattctacaaaataaatactactagttttgacttttgactcgttacattaaaaacctaaaacctattctctggcactaaaaacagattcgggtaccaccaactagagcagcctattttacaagaaatcacaaaattaatgaatttgataaactaaattactttgttttccgtcaattgataaactgatttaatgatgtttattgataaactaattatttcttcggtttggtgatacaacattactatttatgatttttgtttatctaatgttataaagaaagttattaaaagaaaaaaaacgtatcgtctcgctcgctctctttagatctgcttttcgtttttgtttgtcccatttataaaaaaatcaactggtgggagctaacgctcgcgtcttcttcctcttgacgttattggaattcgtagtcgttccgattcactgagccgactcggcgtagtagtagtagtttactactggtgatgtgttgttctagctgtttgtgatgatcaatttctctacattggactgaagaagagagtagtgttgataaatggctggttctcagcgacaatgctcggagctccggtgagaaatcctgtttctacggcgatcaagcacactcgacggtggagatgtttaagtcatcgagatgacggagcgaggagagcaacagaattaaaatggttttctaggtgcagtttcatgcgactcaggtaatttgactctaggagatatatcgtgacttctggtcaaatttttctgggaaactgttgcttagattttgaattttgcagaaattgggggaaaaattactcaaatctgacatctgatgtgacctgtataaacagtgaattccattttccataattcggattttggaatttagatcttggatatgtgagatcatgttcatcattgtgtttttgattgatttttttttgtttttgtttgtttgtcaggtgacgcagttgaaggcggagggattaacaatctctgtagttcccggagatgttgggaaatcgacggggaaggcagagaaggctatggtgcttgacggtcattgtcggtgggaatctccggtgtacgagacggtgaagtttcttcaggatgtgaaaacagggaaggttaatcagagaatctatcatcttgttatgtcaacgacggtgaggaaaattaaacgttctcagagttatgaagagatttctgagattacttttctgattagttttgtttttgcagggatctacaaaatctggtgttgtgggagagacttcgattgattttgctgattatgttgatgcaattaagacttgcaatgtttctcttcctctccagaattcaaattcaaaagcaatgttgcacgttagctctctctctctctttctctttctttgcattaatgtttgtcatgagacattacagcgtttgtatccatagcaaagctcacatgattgttgcttctttgtctttttgaactgtgatactgagatttgaactgggttgtttcattatcaggtagcaatacaaaggcagttagaaaatgcagattcacaaaggtataggaaattgtttaaactcttgcaagtctttattcttttagtgttcttattgggagtctctgttttgtctgtgtgctctacagagtggtgaaagagagtgatagcttggtgaaaaagttacggggtcaagatttgaaatcccatttgagtattgaagctgatgaaagtcataaaagtgattcacaagaggtataatcgcttttgccatattcttaatttgtgaaaccattgttgtatctagaagtgagaaattctatttgtgtctgctcttataggagggtccatttggtaaagcttccaggattactgaattgaggcgtcgagcatcaatagaatctgatagtacattgtcaagctttgacagtgtctctgaactggatacactgggagaagttgaaatcagaggagatcacattcagcaaaaccactcaacaatgcatcaccattcggttagaaatgtctatgaagagcctcatatatcagaatccgagtggtcaggaagttctgatcaaggaatcagcactgatgactccatgaatagttcaaatgatacaatcccaagagatacaacgaggacttcctcggataacgaggtagaccttag

SEQ ID NO: 29962 - DNA, 1745 bp, Arabidopsis thaliana landsberg
tataaaaaaaaaaggtcaccataacatataaaactctataaatacagctagtcacaaaaatacaattaaaaaaaaagtaagccgttatacctaacgcttttagcttaattagtcaaattaaaaaatttgttcactttatcatctattagtagctctgtttcatattataagatatcttagccattttatttgtttcacaatataacatgttttctaacaaaatttgtaagtttctacgcaaaaacaaaatccatactagtttgttactatttatatttcagtaattttttcattaactagctctctttaactaaacattaaattgtatgtaacgtaaaaagttaaaaaaaaatggctaactagtctcctccccactggcattactttaacgattccaaacttaatgaaaagtgtatattgatcagatttggacttactcttgttgaagatttaattcatgacctggtaagctggccgtttgaatcagacagtctctccatttggctacctggtcgtgggagtagttattctgatgttgggtaaaggctacaccaaatctctccgtctgttccttcaccattgattcagtgacgccaccatagtaaaccggaacaatcacaagcccatcatcttttcgctccagaaactccacgagtgtatctaagcactgtttcgacaacgcgtaatcctctgagaagaccaccacaaagactttacacccttcattggttttccgcggcgtcgccacgtcagtgcagtctccaccaaggcaaacggaaacactcctgcggcggaaagcggccgagagatgactcacaaaagagttgcgcgtttcgattccactgaagtcgataaatacttcatccgcctttgaagtcgccattgattttcttactttttgcttgtattttctgtgcttgtgatataagtatacaaatatgtgggtcctataaatgtaaatattcatattatttctgcttttcaattttaattttatattaatgtaaacattttttattttgaatttcgtgtttttcttctttccgtgacttatagtttttgctactcctttttccactagcattgttatatgactaaaattagattagatcaaacaaaatcgggaagtataaaacaacgttttaaaatgaaaatttctacggaaacatgttttctcaatgctttatttagaattaccatggaagcgtaataaataaataatttaataacataaaattaggtgtgcttttcttttataatttgaaataataatgtaaatccttcacttttttttgttacgattgttaacttaggtgaaaatcaaaatgataattatttctaacttaattatacttttgtttaagttggttaattaatactatttatgtattgaaataacattgtataaactacaaggctccgcatacaatggaagctgatgttggttaaggagagtgatcggctggttcccggcctccacttagctttcaaaagtttttgtttctaattttcttctttctttcattatttcattcttttattctcttgtatatgaaaactttttgttggacaacaaatttgaaaaccaaaaaatatttatgaactgcaaaccaaccagtaataaatccttcacggaccattaaattttggtcaataaataaggattagatatcccattaccaactgggaagtcttccttagaccaaaaatcaaagtaaaagattgtacgcactcatatattagtt

SEQ ID NO: 29963 - DNA, 2000 bp, Arabidopsis thaliana landsberg
tttgatgtctagggctgaaacacgaaacctggcgggatgggtgcggtgatacagaatggttgtatgcagttggatgtgttgtatggacctgaaatccttgcgggatctttaccaggtggagaagtttgacctgacaagagtcgggttcactgcacaacggagtgagaggtcaaaatccgtaagcataatgtgtccatcttcacggacaagaatgttttccggtttcagatctcggtatatgataccaagcatgtgtaagtactccagtgcaaggagaatttcggccacatagaatctacagaaacaaaattttacaatcaattttcagtacattaaataagctagacacgaaatggaaaaggtaaatctttaccttgctgcaggttcagggaaacaccggcctagctgcttctgtctgaggacatgaagatctcctccaggacaatattccatgactagacaagacaaattatccgaagtaaattgcgcgtataatgtaggaagaaaaggatggtccaacattttaagtatttctctttctgcttgtgcccggggagactttttccttctcgccaagaactcgttgtccataacctttatggcaaacaaacagtttgtaccaatcagctcggcgagatagacagttcctatatctccacaaccaagtttcttcagaaggttgaagtgtcgtaaacccaaagagccgtattgaaccttgatatgcttaatcgcttcccatctcacatccatcgacatgtgaggcttattcccacagctaaatcggctcagattactctcctcactcatgcttgtgctcctgctataatccccaagactatcttttgaacttagagagaactcgaatttctcactggaagtcggattctcggtttctttttctaccattgcaccgattccactattattgctagaggaaacatcttgtttcattatgacaatgtcagcttcagagctttgactgacattacacgagccagaggagttctcgtcagatccttgatgagcttctttaccaacattatttgaaacagagctcaaactatctgaacaaaccttaggattatgactagaagtatatgaaggtgggttgttatcgatgctggtgctcttcaacgaacagtgacatctctggcagagaagtttattgacactagagtccaaggaaggaacaatttcgtcatcgtcttttgttgggtaagttgctgacaccaccccgatttttaacttcttcttaagcaaaatcttctttttcggttgtttgggacgtggaatcattcttgttaccttccgtactgttttgcccttctctgtccctgaattaggtgcatcgtccaacttccctttctgctctgagtctacagcagatgaggaaatattcttgtcaagctccgtcgcattaactttcttgctagagtgagaaggcagtgaggtaacatgtttgtctatttctatcacatcatcttcaacaaatgcatgagtggaaggagacgcaacattttcatctaactctatctcataatctccactgccagaactaagacaagacccagatttgttggatttatgcaacagcttaatctcccgcatttgatttccaactccttgtaatcccaaactggttccagcttgagatatctcagaaatggggttagaaggatattcaaaccgttgaggtacgctctttgaagagcttggtttatcgtttacaggcatcaaaggtatctcaaccaaacttcctttacccttgtccacaggaacaagcccagacctgctgctagtagattcattcgaaacttggttatacaaactctttatcctgtcggcttctgagaccctcggagatgcagcagcagatttcgacaaccgtttctgagcagccatttccgacgccttggaaatgcaacgatccctaagagcctgcttcaaagaaactgaatcagagagaccaacaaatctaggcgactgaggtgtccctggtt

SEQ ID NO: 29964 - DNA, 2685 bp, Arabidopsis thaliana landsberg
tctaatgggatattaaatcctacctcagtttaaaatgataagtttgttagtcccttgagtcatatgatgatttagttagtctcttaactgattgttctatgtatacatattaactctcagagtataaaagaagctttgtaatagaattaagttactgaaaaattccatacttcatcatcttctctgtttcgtttctctgtcaatgctaatatggtcgtattgggattaattagcctagattagcgttataataaagcacttgatgatacactttgttttcttaaactactggttcacgtacaaaacagaaagaagtcatcaacagattcaaaatatcaccttaagttcaaagctatctttttcttcttcttcttgatcttgctctctttgttcaacaacacagagatcttagcaaatccgaaactctttctctttcgagtcttcgtccttttctcattctctttcccttcacttctcttgcttacagttttatcactactgctattctttgcaagcatctgacccaacgacatttttcttctctcattagcaacattcatatctgaatcctctgcaagaagtagcttcttgctcagtatttgtcctattgacattgttggtttcaagactgggaccgttgaagaagatgatgacccgtcaacaacatcgtatgtcagatgcagaccgtttacatccatcagacgtgttgttgtctctcttctgctcttgaacttggaagtgttgttcaccgaagaagataatcttctcctctgtccattctctgaccgccattttcgcagcgcctcttctgcttcgatcttcgaagcatttgcagcgtcaactctctccacagcttcctccaatactctcttgctggtttcaatttcttgagccgcttcgtcaactttcttcagaacatccttctttgaaacattagcttcttcaactctcgacattgcatcttccactcgctttctcgcctcttcctctgcgtctctagcactacgagcaagcacagaatactcttcagcagagatagtcacagcctcggccttaccaacattcatacttccagtaacagcctcaatctctgcgattgcaaccgcctcagccgctctggccacttccttcatctttctagcagccaccaaccttatcttagctgttctaatcttatctcttgtgctttcagtctcagccattgctttcacaacttccaactctgcattctctccggttttcttcacctcttgagcttgacggctcaatctttgaacctcattcaacattccaagatctttctcgccggtttgaccctccttggcaaatcttactctcacttcttcttcctctaaagaaaacaccttgagagatttctccataagtctctcgcgtgtcttctcaagtgcagctctttcctcattcagtttattcttcaactgctccacagattcgcgtatacttgcaatcttgcacaaattcatcttcgcctggcttaaatcctttagaaccacacccgctggcttgatatgactgtcaacttcttctctcaacgtgtcctcctcataagcttcattcctctgctgcagctttaagactgtggctttagtcgcctcaagctccttcaacacctctagcgtttcgcgttctttaacaattagttctctttgtagctcggaagcttgtgctttgagtcccatgatatcaggttcttggatattttcctgccaccaatatcagaaagacaaactttaccttacatatcctaatttgaacaactctgatactttaatatatgacacacaacacaaaatcttcactgatgtgatgaatcaggttgcaaaatgtaggtaatgaacaattccttaaaatgaggtttaagttttcttcatcattgatgctaaacatgaaagggaaatcaagtatcgtcatcatcattatcttcatcataatgtcgtttaagacataaaccaaacatcattaaacatcaatttcaaagtttgatgatatctttttgttgtttcagacaacaacagccaaacacgcttaatctaacaacagtaaaactctaaatcatatttttcagagagaatttaaagaaaagactgcaagtgagggagatagagaaagggaaagaaacctgagaagcatctgggagtttattgagagaaggtctccagaaaccaaaaccgccgaaacgagtggctgcttctctcactgactcgaacggagccgaagtgtctatctcaggcttctcagctcgaccattcgatagatccgagtcagggtttacagtgcccggttctggaaattcggccattgaagcagaagaagacgagtcttcgatggggaagaagagagtgaagtgaaaaagagagagagagagagattagggaggaaccaaagtcttgtgtttgtgaattgaaactggtttgataaagacgtgtcggaacacgcgccacggtcgtctcgtgaacagtgttagaaagtcatgtttttttttttgtctcaatttaaatttgaaattagcaaaaatttcgcgtcttttcccctcttggatcataattgctaatctcaattcttaaattgggattaaggaataacctttaaacggctaaaactatctgaatgttttgatattttatcagattgttaaaaaagtgatcaaaaaaaaacaaagcaata

SEQ ID NO: 29965 - DNA, 2580 bp, Arabidopsis thaliana landsberg
attaataagcttgttgaaattgtacttcccaccatgtccacaacaagccaccttttggattcctaaaacctaaaccaccaaactcaacatatagtaaaccattagaaccagtctaaaccgaacccgagtaaccaaaacatgataaaaggtttgaagtataccgagtttcttggcttgagtgatgagagtaagcttgatagagtagatatcaacataagtaaacgcagcttcagagagctcttttctcaactcaatcactcttcttctaagttcagagttatagtatcgagcaatctcattacgcggaatcgcacaaccgtgattgtcgatttgagaagccggtactgggaaccggtctaaaacataaggtaaacaaccaagtggagctgtgttgtgtatccaaaatcttcttcctcctttactatacaccttctacaaagacattaaagacggttggttaattcagttaaatcacacagctacgtatctatctagtgaataaagactttatctttgcttacacgaatggcattagagaactgatcaagaacatttggtatataagccttgatttgatctgtagtcatgtttagttttaatccagcggtaagatcgttttgaccgatgtcgaatgtgtacaatgcttgagagaaatactctttcttgggaagtaatttcttaaacactccacctatatgtaaaccaaatcggattacaaaaacgttctgataatcttttgcaaaaggttgaaacttttaaagtacctcgattgcgaatgagttgtgatcgtgtgatgaaatcggagaattggaccaattgaacgtcgagagagattggactcacaccgctctgagcgatggttgcgtttggtggccggacggtggagccagcggtggcgaaattggcaccatggctgaagtttgaaccgatggagtctaagaaagcatttaggtatggtaaacctaactcctccgctgatttcaaaaataggaataatcaaatgggtcgtgagaaaactaagtaaacaatcgaaatttatgaatgtgtggtcagaactaagaacctatgaagtcaatgatgagtcgaccatctgagaaacgaccggaaggggagtggaagaaggtttggccgttagggtaaggggcttgtccgaaagcggcagagaggccacctgtgtcggagttagagtcgccgaagttgaagatcgccggaaaattgcaagaaggagagcaagcacggggatgtatgagacatgatgctaataagacacactttatcaacattagattagtttccattttctccttccggtaagtgttcttaatttggtgtggtcgaggtacgagtaaccgaatagtggcgtcgaatagctatactattcgttttctatcaaattattgagtcaacgtttaagctatacaccaactcatatgttctacgaagtctttctttatgttagacacagtctcaaattatgaggcttacaaagtcatttatttatggtaaattgcttattgataattcatctaagcaatatatgtttttttttttgtctaaaccaagcaatatatgtatgcaatacataattgtgaaagaaggtgaacgaactagtcacgcatctaagctctaaccatacatatactattcacttcattaaaataaaataactaagtcaatattttcccgacataactcgtgtgacctctttatgtatgcagttcaacaaattatcgaagtaagtgtacctattcaagcgtatattaactagatatacattaataccatgtcccaattcctggagtctagagcttgagaatcaaaggcagaggtcacgagcaagaaacaaagtagacgcagaggcacgaagaacccacaaagaatagatcgaagataaacccagtgagctatactagacgagccaaccagagaccatttggctgtagaaatttccctagttgaagaaaactattggatttgacttgccaagatcctaaaattgcacaaagtcaatctttttcctgaaaatgacaatttgttgctcatgaagggatgtttgagttccagtagccaagtatcaatcagcaatgtatatttcccaatcccatcacaagttttaaagatcagtctttaattttcacggctaaacccgagtatcagaccatcctgcatcattgtttaccagaatcaataaacggcatatccccatatataacaacatttgaattttaccaaatgtcgatctcggatattccgtggagatcaatcacgtacctgaggcttttgcatatttggtgttgggggataacccacgcattcattacgataagcataaagtagcacatctcaaattgtctcaaaccaaccaagcacaaggtttccatagggatcaacatatcaaaaggagagagagcactttaggaacatagtcgactcttgagtttagggccaaaatagagaacacatcttctttctcgagctatccaaatacattgaagaaaatagaccatcaagcgtaactttgacttgacacgagctgaaacgagaaaccttcaacttctttaactgcaaaagaagatatag

SEQ ID NO: 29966 - DNA, 2699 bp, Arabidopsis thaliana landsberg
  unsure (1)..(2699): unsure at all n locations
ttttccgatccaaatgaatttggtgaaaacgaatcgattttggaaaaaacgaacgaggacattttagtctttctttaagccaaattaaccacgtttgggtaaccattaacctcagtttaaagtttttgttagcaaaattaacgtctgttaacccgcatgttttattcaactattcaaaaaaaaattgtattttttcatacatcaatttattactttagatttttattttccaatctaaaacaattggatattaaagttcgaaattaaaattagttgggagttttttttagtttttttcccaaaaatgttttaccaattaattataacaaaaaacctgtttttttacattataaccccctacccgattttcttcaagagtggctcataggtacgtacgtgtggttgaatacaaacaaaaaaaaatgaatttggagatttagtgattctgcttgatgatcacgatatccatttcaaactataatatggtggtaagacttgagaaggtttggcaatctataatctcaagtttgtaaagtaaataagacttttttaatttcattcttaaaaggacaccgaagcgaacaaaccagattcctttatattcattttcagatcaactataatctcactctaaggtaacattgttttaattttctatgattattttcaaatgaaacaaaggtggaatttgcataactaaactaaacagatgtgtaaataaatgtaatgcaagaagaaacaagctcaagtccatttatccaaaactaaaaaagaaaacaagcccacaaaacgatattaagaaggaaaaaaaactagattgggtcttatggtttggctaaactgggccttatttaaaactcaagcgacataaaaaagagaaagagggaaaactaaagtgggccttattgggcattgaccggagccaccatcaagccgagctcgacttcggctgtctcggcagcgtcctcatcggcttcaatatcggctttctctttggccactctgtcagattcagcggttgcgcgagctctcgcagcggcaatcctcttgttccacttcacgagggaagaatcctttgcattcccctatttagtaaccctatctgttagtaacattctggattcctctgaagtccctgtaaacaaattccttctaagctttgcacatcccaaaacgattagaagccagagataacaaatccattttgatatctgtaggaaggtgatgtagccgaattctagaaagcagggtctcccaaaaatgaaccttcccactatcgccaatatgactgaagggactgcaatgtagattgtaaacactgtagtggtaaggagcaggagaacaacaagggacacaactccaatccacaatgaaatttcatctaagaacttcttgaaaggaaaccagatgtcatcaagagaaagttggtaggatttcaccatgagatatactacgaaaagtatcccgaagaggaataaacggatatccggtcgggcatgtttctgtgaagcaggaggagcagcggttgttgagttggagttggactcggaaattgtttcgttgtcatccctaccggcagctattgccgtgaacaccaaggaaatgacaatggcgttgattaagagaacatgtagtgcaaggtagacgttctggatcctgaaaacaaacggagaagactactaaatcagaggatgctaagaatatagaaaaaagcaggtttttggaagaactaacgaaataagaggaagaataaagctgtatcagaaacaaacatgaacatgtagaaaaagaagtagaaaacgaacatgattgcaagaatgagtgaagagaaactggaatactatatcatcttgaaaaacctaaacgaaaagagtaaagctagaaaaacacacagtaaacagagagactaaatccgaggatgctaagaaattagaaaaaagcaccgatttttggaaaagcaacgaaatagagagttcaaaccagagaagcaaacaggagacggagaaaaagaagaaaacgaacatgattgcaaaaatgagtgaagagaaactggaatactatatcatcttgaaaaaactaaacgaaaagagtaaagctagagaaacacacaggaaacagagagactaaatcagagaatgctaagaaattagaaaaaagcaccgatttttagaaaagtaacgaaagagagagttcaaaccagagaagaagaagaagaagaacatgatttcgaaatacctttgcatcttggcttgtgggacagaccgaggaggcatcttttctctctttgttgccgatgagtgaatatttttttttttgggtgttttggacgaatgcaaatgagtgaaagatgactgcaaatgtgctttttagagagattgtggcatatgttcgagccgttgctccctcccttagctggcaatctggcattgcccaagagtactactaaccagtcacaacttttcttacgactggaatttttttgtttttattcggaacttcaaaacattttcgaattttgaaaacaaattagtgtttatctacaaagatagtaactttttaactccggtactctactcaccggcgaactgctttccggcgagattgatagagggtgaancgncgagcattttcatataaatcaataaaagcagggtgggcccactgaagataatattgggccagatgggcctcgataaact

SEQ ID NO: 29967 - DNA, 2041 bp, Arabidopsis thaliana landsberg
cgaataagccaatttggagtctattataatcctccttcacttgaatagttcgaattgtaattgtttgataaggatttgctaactggtaaaaaagatttactaactggtttagcaaaaatacaattagtagagttaggaatagactccaaattgtaatagtttgattaatgagttgagagccaagaaaactgaaacactatttaacctccactaactggttttctaagtagttaacttgagagagcaattcctttggctggatcaacaatttctctgttttaagggcttcaccatacgccgcaatgagcagtgcttcagctcgaccatgatcctttttcctcttaagttgcgaactaagcgatggaaacaactccgctgcaactcgtctgctatcgtcctgtagcggagaatataaacattgtcagcattcgagagacttgtatttaactcacaaaagtttgacagtaaaagatcaataaatcacctttgtgcaacttccgctagcaagttgaaaatgcctcttccataaagatgcagaaactggaataacacaaaagcctgaagcaacaagtgttcctatccataatccatatccaaatcctccactataccaaccctaaaacacaaacacaaacacaaaaaattcagttttaacgaataaaacacaccatagctgaagaaaaacgaatgtgtgctgtagcataaacctgttttccatctttgggaaacggattcgattgttctatatacactctgcttcctacattgttgaatacacaagacctaagttatttctaaaaatctaacctaaagaacacaacaacaaagagagatctttcttacctgagggaacatctaagctctgaatcaattgtacaattgactttgcatccaaacgttttcttactcttttcccaactaaaactggaatgtgaggtgtatcataaacctactccagattgaaccaagacacacaaaaaaaaaaaaaaaaaaacacaatcaattttggtaataactctgattttgttcaaaactgattcacatgagttcttgcatatcataaacctacttcaaattgaaccaaacaaagcaacatgaacgattcacagattccttcacattctcgattcttctcacaaattacaaacgaaccttgtaaagatagataatctctgtaacccaaaaattctaagaattacatcaacaaatcaattcacaaaaccctaaaaccctaactgacctgagcataagaaccaaagttcaaaacacaaaccaactttggtaataagtctgattctacacatatgattcacataaccttgtaaagatatacttttgacaaaaaccctaaaaacccatactttcaccattctactgagtagtgactgacctgagcagaagaagaagaacccaagtggtcaaatttcaaaagagccaacgcaccagacaaatcagggtcaatcccaatgatgcagctcgactcagcattctccggagtcgtatcttcgtcttgtgaggtgagagagagagaatccaaccatttctccttcattaacgccgcgtctatggctttcgtcgtaggaagagcactaaacgggaaactccgccgacgagtgaacggagctgtgaaagacggcgagtgagagagaaaaggcctgaccttcgagaaaagactatgcatctgtggcagcgacgcttggccgtacactgtcgttgccattacaagaagaagcactgagcaaaactaactctcagtttcatttttgtgttttgtctatttttttattaatgttttatttatctaatattttttttaaacgggctttaacattaataaggcatcccaaattgggctttggcccgtcaacatacatccaataacatcaggtacccaaaaaaaaaaaaaaatacacattgacatacaagagcgtgttttacattttatagaaaatgtatttaacaatattaagacctaaataattctcagaatggaggagcgaacccctgttctcacttcaacccaccccgtgtttgtttcaat

SEQ ID NO: 29968 - DNA, 836 bp, Arabidopsis thaliana landsberg
ataaatcttaagtgaaccggaactatatgttcttggaataaatcttaagtgaaccggaactcggttaagatgttggttcgtaaaatataataagaacctaattttgccaaaattatagttttattcttttgactagtttgttcgtcgcattattattacaactagaggcaacaatcaaacaagatcttacacaaccagaagagatttctttggtcaaaatgaaactaaatccaaaacttcccaaagatttcaactcgttttcttacataacttcttctaaactccaccagctcaatcggcggataaaatctctctctttcaattgatgtaaaataacccatgaaaataaaaaccaaaagattgattctttaggttaaaaaaagtaacaagattttgaagggttattgcaccaaatgaagagagagaatcaaaagttctagccttctaggatagggttcaagccatgcaaccaagcagccaccaacaccaacggagagcttcacatcaatggagcttcaagaaggagacatggagaggggagggggtatatatacatatactaatatgtaatggttaatttgaaggccgagtcaaatggcctctctatactcatcgccaaggatgtaccatctgcaaagcctggatggcacaacggtggaaaaatgtcatcaccagcttgctgtaacttccccatggaaacacatttgctttgtaaagcttacccactgttgaactttcacttaactccctgccatgtcattaaactcggcttatacatatattttttcccccccacaatctgtggttctattaaacatacacttcttttatgtccc

SEQ ID NO: 29969 - DNA, 711 bp, Arabidopsis thaliana landsberg
ataagaaacataaatcacaaacctgttctgttgtacagaatatgtgtgcatcatcctgaaaaagtatgcgaacattatattaagtaacaaatatgcatcatggaaagggaaaaatgataattaagtaatactaggatacaaaatatacctgctggaaccgtcggacacgagtcaatccactaagtgctccacttgcctcattgcggtgtaacactccaaagtcggccagtctcataggtaactctacagatcagattatataagcaaaaagatggtgtcagtcaagatacatgatagacaatttctttagtaagattcataaaggagaaacagtagtcatcttgtccacggtgataggttacaaatcacaagttacactttggagcaagtctcctgtcattgaaaaaatcagcacctagtatttcacaagagagttttgatagtctgttatggagtgaactttaatttctacaactaatatcattcatagatctgtttttgatgatatcgaacagcacaacaggaacagagtcacacctctatatgagcgaaccctatgctggaatatcaagcagtgaccaggacaattcataggtttgagcccgaactcttgcttctcaatctacataaggaacattctgataagtcattcatacgtagaatataaactagagagctgcttgctaaaatagcatagtcaaggagactcac

SEQ ID NO: 29970 - DNA, 2241 bp, Arabidopsis thaliana landsberg
tgggcacaagaatgactcatcttcagtcaatgtgctattaaacattgctggtgttgatgctaatctgcaaaaaaaaaaaaaaaaacataaaccaattttcaagagatgtgcttcaataggttatatgggaaatgtgattcaaacaattatatgaccttgcagcactacactatcaaaattcttgattgttgcattgcttccagtaacaagtgagaatataattttgtaatatttgacaatgaaattttcatttacgtctgttgaggacaacaaaggctagtcaccactcacccaaactgaacaacatctaatccagaaacaccaagacctcgagaaaccgcctcctacaaagtaaacaatgaaatttccagtggataaattacttattcattgcataaagagacactgtttccagaagtgcaaaaacgtcttgggctaaaattgcgagtaaagagatatgtagaccaaatacttagaggttaatacttaatgtctcaactgttgccacatggaaaacgtcccacaaatcaaggaaatagatacataccagcaaagtttgtgcagagatgcgagagtcatggccaacagatactctcaaacgccgggattcagccttcttcttgtgtaacagccattgcccaaaagcagcagctatggcttcagtcactggttcaggaaggcttacaggttccccctcaaccccagtgaccgctacaccccgaatatcactggggattcaacaatgaaacgtagcgtgagtcaacatggaattctaaaatgtggatatttgtagtactttctaaatgttgttgaacagagaaatatatgattagctggtaagtgatgtatggttcacctgccgttttggagcttcagaaaatcatttttgtcaagagatggcacagtagcacttgacgaagtagctgcaaatgaaaactccaaagtaaggcacccatttcaacaagaaaaaagagatttaaggaacaccacatctctttgccaagcaaaatagggaaacaatacacaaatgcagggctataaaaaatttgatgccgggaaaaaaatactaaagaagcctagaacggaccattgcagtaaaaagttctttgctttgaaagaacaaactggtatttagacaaagtgtgagcacgcatgcaagagttgaggttaaatgccatcttctctcttggacagggaagtaaagtagacatgaacaggtcaggttctctttggtatcgtgtcttaaactgcttattttgtcggtagcagctctgtactacattaaagttttggaaaacctttcctgaaaacaaaaaaaaaaccccactttctctcaatttcaaacataaaacttcccggaaattttcaagtcaacagatgaaaaaattgattgctaaaaaggtgaaattgagtaagaagctagcaggtttggtaatccaaaaaggaaaacttcaaaatgagacagcagaacagagtctacctttctatagaaaatttcccattctagaatcactcttatttgagtttttacatcatcgaactgaatcaaacaccaacactaaggaattttgaaggatccagctttggaagctcgactacacaatcgactaatgaaaactgaaaattatcaaaagcaattcatttaagaaagtctaccttccattgaagacgataaagagctcacaagattataggcgacagtagcgatgatgttagtttatttctgtttctctttggtatcaagattgaatcctgagagttcgacttcgattgtgtagttgttgagaattgtgtttttggcaaaagacgtttgtgagataatgggcttacacaacataatggacttttctctagccaaagctattgggtttcaagccatttcaaaagatattcgtgtttttgaatttttcttctagttttgactcaatttttatatcctctgttaccgaaacttgaagaaaacaaaatctaggatcaatacaaaagagcacatgatcattgctacaattaacgataataccaaccgtccacgtgcatctctttcccggcccaagaacactctcacttacatgatttcactgatgtacccttcttcttcctcctctctgttccaaacccaagtactacaataattctctcccattcccatggaagctaaagccatcgcgacgtctctcggtggtgatcgtgtattgatattcccgtgttctcctcgctcttacttcgtttttacatcccggc

SEQ ID NO: 29971 - DNA, 2368 bp, Arabidopsis thaliana landsberg
  unsure (1)..(2368): unsure at all n locations
ataatagatattcatcagtgcatgatgaagtttagaggtaattattagatattcatatttttggacggtggatcgttcatgtacatatattcaatttttttgcaatttgattattccataaattttgatgttcacatctcatgttttccatgttttgaagtcaactcttgactttacattttcttagcatatatggtttaaatttatgaatacgatgggtctaataatataggggttacgatcaaataggctccacaattgagagtagcataactttattttgttatcataatcaaattctatcttttgttatgtatgaattccatcaaactctcaacgtctcgtggctcgcgctatataaaaataatcaactaaaaaaataaatcgtcttttacttattgcatacaattatgcatctccgtacacaaatgccataaaactatactttaagtttaatacctattcccgtatactatatagtaagttcaaatgtgtatgtgtacatacacatataaatattttaaaaagtcgggacccaaatatgatgtatataaatcatcgcaaaatcttgttaaatgttcagcatcttacacaaatcattgcaaaatcttagtttcccttctcactttgtgacaaagataagatgagcaagaaaaaggagacgaagctaagcaaatacataaaagttccgataaagatgctggtgaaagctagagacatgtacatacgaagcatgaatcaattttcttcccatgaccttcctggaagcggcatgagttttgggatacccgtctgcaacgtaagcactcttccgcgaagtttcagtgctagccactcccaatattccgtgagagctgaagatgatcgtgtggctaaacttgtaagagccgcatcagctagaaatgcgaccattgatggtgcacgacatgaaccatcaaaattgcggaaggctaagagttcgagaagttgtggtggtcatcgtggctttgagaaaatagatgaggcaagtcctttgattagctttgggagtaagcacaagatgtttcaaaggagtaagagttacagtgttgtcaaatacttaggctcttaaaaaaaattgttttgtttatgtgttacgggtcagtttgaatgttcatttagaatctttggtacgtatttatgtgtgatttatgtaattaagaatcaacaaatgtgaaatacttgtcatgcatgggtgttttaatttcgttattaatgcttactgttgtaaagttgaaatcaaaatgttaatgtgatattgtttgttatataatccaggattcagagttgctttcataaaatgaattttcttctcacatatataaattcacatgtgattgtgatattataactaatatctagatgtacatcaccaaactcaataattatggttcataattgtggataattgaccaaaagaaggactgaaggagacacattattacacaatttcatggtttcttctaatttcgtcgatatattattacatggattcaaatcccataagttactttttagtttagttttggtaattggttggaaacgggggaatgtttttttctttttctttttttcttctattttggntaagagacgaaggtttacctcagaaatctttacacaaactttgagtaaacttttaaaccaaatgcaaaactattggttgatttggttgtgtcatgcattaggacatggacacaaaaattacgaccaattttttttttcagttatacacaacacaaagtgaatgacattagctttttcctcttcctttgtgtctacataattttatcatatatttttccattaatcatgacttattatatatatcaaagtacttattaagaaattaatcaccaagcttcattaggataatcgaacggcagaggttgaagcggagaagtcttactcaaatcagaatgaacgtaaccatacacgcgcatcacctgattatcagcaaaattaagggctctgatcatctcattccaacacgtgtcaccatcgtaactcggattatgatcaccgctacatggttgacatcccgtaaaatgcgttataaacgcgcgtctgcgacttcctctcccaccaaactcgcctttcaaaaaccgctcttctctaaacgcaccgtatcgttcgctcactttctccgcgtgacgcctacgcaacgtgtcgtcttctcgttccatctcaagataccgttccgtcacgttggcgaaatccccaaatacaccaatccaatacccttggagataatactctgcttcgaggtatatcttaggataatacaactctttatgtttataaagcaaataaatcagagccgtttgatcatctgactctggaaacaact

SEQ ID NO: 29972 - DNA, 1682 bp, Arabidopsis thaliana landsberg
aaatgatctcaagttttgtattacacgattttgtaatttaataaagttcatagtgctcaactcttatcatttcttttcaaatcttgtcattcacctaatgacttttgtttatatggttagacaccataatttgcagttttcaaataaacaaaaacattgtggaacgaaatttcccactataaagacttatagaagcataagattcatagaccaaacaattcaaacagagcagcggtgaaaacaaaatacaaaaaggctcggaggtctactatgagaaaagcttcgagatcaatctgaatcagagtcgacattcgctgaagacctaacggaccgacgtatgctttcttgatactcgtaatcttcctcatcttcctcttttctcttttcactaagcattcctgtgaaaaaaccttaattcaacgaccaaagctgtaaactataagtaccaaaagcccagaatgtgagacattgatgctacctttcttgaccagaagattctccagcttcgtcgtggagaaatcgtccttggcacctagatcttgaaacccgacaagcctatccatcgcgattcccttgctgaagaataatgatttcaacattcgtgttttcgttagtttaaacacataaagacctaactgcgctaagaaataatgagtgaaaaatgtaggagtgacctaaaaaggataacacacggcaaagtcttgattgcaagcttggtgacgaagaagggagcgttctacatgaagtgtctcccaagtattagaagatggcaaaatggagtttcaaagaagagttaaggaagtggattactgacctcagcgtccatcttaatgaactttgtgtccacatgtctaggagcaagggtcttcaaatgcttgtccattatcctagaatgttcaaacgcataagcttcaaattctgaatattcacatatcaaaaaagtgatgcgagggagagaagggtatttcatcttacttgcagcgatagaactccttgtggtagaagtgacatataactttttcactccttgtgacttctcccaagaagtcgccttcgctaacttctcggtattcaccatgtccttgtcttctgaatgcttctctcttttccacttctatctgtccagacacatcttgggattagatcatagtccatactaatgaagtcaaaagtgttaaccaaatatagataatgagagaatgtggggggtgaagttgaaccctgagtgctgcaatcctatctgcgtgcaacttttctagctctggatcctacagaacaagagcaagttagtctcccatatagacagaagagaaacataacatttcattgtagattataaaagaacaattcaaagagagcccccattgaacttacatccatcaattcgtcaagatcaacttcctcgttgacaggtcttgatccttgtgccttttcatttgcaagaacttcctgcacaacaaaaatacggaaatgtttttgatccaagaacatcaaactctaattgcaattgtaaccaacaaaaaaacacttaaaattcgctatacactatcaaatttcctgacacgtagacctcatgtcagcacaaatagaatctagcctatctctgttaattgggctacccaacaacatgagattgattatgtggaaaaccaagcacattatttaccctttgaaaatacgcg

SEQ ID NO: 29973 - DNA, 3650 bp, Arabidopsis thaliana landsberg
  unsure (1)..(3650): unsure at all n locations
cctaaccattcccctttagtggtcctttcaaacgaaagtaataaatttgaaataaaaataagaagcctttgttctgccatcgtgcagagattggagtgcagatctacacttgtcatttactggaaacatagcaatatgtttcttgaagacaatatagtccctcacctttgaagaaggaaggtgcaaagggcatccgagcagagcatcaaccccggcaagggatccatcatttgtcaacctctcaacctgaatgtaaacaaaaaacaattcaggttagttatgatatcttgaataacctcccagtttcaagtgaaagaaagtcttacagttgatagcaaaagaaaatttgaaggaagaatctgcagacaacaggacctgcgggaaatatgattctcttaattaagtcacagttgtcagagagaaatcttcaacagtaactgaaagcagggataatctcagagaaccaactctgaggatgaagatgccagggccaaaatattcaaacagattggtgatatactaccatccaagttcatccaaagatcccctaagcgatgagaagaaaagaaacggagatcaaatccatgcaatgctcagaagagattcaattaatttaagtaggatcaagagataccttctagtccagaatatgaacccttttcggccatcttttcgttttcaagatcggctagaaaaagcgactcaaattctcccagatgcttcccaatcctgaaaagcagtataaaatttacgctggataaagcttaagattactgtgtagccttaaaaactactaaacaagctagcaataaactgttactgaaatcttcaccactccataatttctggttgaagtaatttatggctaagaatggtagcgaattcatcatagaacataattagggctaagttcgactgtctgcaagattcaacagatgtctttaagagctgcaaaatctccccacactctgaaacctgctaaatgaaaattttaatgggcataagagtgattccccatacttcccataggaaacaaaagaggtcgaaaataattttaatcaacaactaagaattgctgaatgttacctgcgatgatgaaaagtcaggaacactctttgcatccccaagtgacgaaacaatcctaagacttccaactaagcccatctttttgtacttgaggtctggatgactaacctgccaatataaaaccaaacaactgggagtgagctgccatcacttaagaaaccaaatcgaaggcaagatcattcatattacctgcttccttactatcatcataagttcatttgagattgaagatcgaaaagaatcaccacttgcacgagctgatagtgcgaggaggctgaaaacctcatagacctgcgagtatgtctactttatatacaatagattgtcataccaagcagattgcaaagataaatgcccaccttttgcaaattatcaatagtaaatccctctaagtagtccaaaatacctatacgacataaaacagccagaatattagaagaagaacagtaaatggatcagcattagtgagtaatatatccaaacaagttccagagataccatttatgtgggaagaaaaggggaggagttgctgtgcatattttttcaccagagctgtcatcatctccaagacagaactgacctcaaatttgttatcagatcccacatgtgtcactagggcacctagaatctgcaaccaattcgaattagaacaaaagtggactagttatgcaaaatttattatactaagagatgaaatgttaattatgttcttacctcttgtcttgaataattgtcagtaaactcttcaaaaagacgactatagatatgagagccaatttcccttgccttttcttctttggatgacaagaggtgttcagccaaagaaacaaatgacgcaaaattatcctagaacaatgagtgagtcgggttaattctacaaaagaacattcccacatagtgcatgtatcagacacttttcaaaatttcttatgaagatcaccttcacaaactctttattaccacctatacattgatcaagcaaggcctcttgtatgcattcatcaaccactttcttcnnnnnnnnnnnnnnnnnnnnnnnnnnnnnnnnnnnnnnnnnnnngtacatgagaataagcagccatacatcgattaccttgaaatctcgaggtttctccagactattcagctcctttataatttcttgacagagtatctatatacagaaaatgaaagtgatgccacaaaatgacaaacattcttaagcaactgtaatgaaacaaacttacattcttaaatcgaaggcttgatcttaaagcatggagaatagaaccttctgcattatatgcaggtacttttcctttgagtttattttgagaagcacaaggttgtgacattccggtgaatttcaactgttcccttatctgggagattatccttctaacatttacaggagttgcagcaagaagcaaaaacctaagtagatacggcatatgctctccgtcgattgttctaatacatgatatcgctactgtaatcgcctttaagaaagtaaaaaaaataataatggcattccatcaacacaatgtataatacagaaccttaaaccaataatgaagcaaaatctcacctgttcttgcaattgatcatctaaattaaggttggagaaagaatcaagcactgcaacaacaacagcagaatcttcctgaagcatcttttctaaagaatcaaccacagcttgacagttgtgatccccaataatctctggcaacgatccaataatttccttctttaagtgcaaaggacaaatagatagaacttgcattaacttaacggtgaacacatggggattaacaatgaaatcgagccaacgaaaatggttgatgataaggcgagcaacatcttcctccaaagaacatcctgtaactacatcaaagtactccggaagcttctcgagtagcatttcctgaatatcgagttgaatcggagatacaagcaggagatttcgaactaaactctcgtctctcttagttgttgaagaagaagaaagcattctacaacgatatatgaacaaatccgattacaaagtgatgaaatctcaggtttaataatggaaaactcgagttggaatttactgaccttcgaagattactcggagattgaatatacaatgaaaatccagctacgaaaactgagcaaagagcaccgacgttatctctctcgccggaattggcggagaaagacgataagcgaccagtgagattgcggcggaaagcgtgtagatcggaaggaagacacggcggaccgtacggattcatcagtgtgcatccaacttcggctagaatggcagtcatcttctccaccgcgtcgggctcaacggattccttttgcggctgggggattttgagagacggagcagctgaggatgacgacggaggcggtggaggctttttgcgagagagaaacaccatttttccagtgacggcgacggagattactcttaatttcgcctattgattctccgattagctaatttcctgaagaaattagatttcaaaatttagtaacctgaagaagctaccccaaattttcacaaagaacncccagagtcctcattcatgcatgca

SEQ ID NO: 29974 - DNA, 2791 bp, Arabidopsis thaliana landsberg
  unsure (1)..(2791): unsure at all n locations
tcgacgccagccaaaagaaatggacagccggagcctcacattttagtttggctttagaaacatctcccaactcaactcaacttcagagtcctcgtggtccggaaatgggtttgtggaattgtgttgaaggaaaagacgtgtctatagaagttgctatggtatctgcggatggaaaacctctgataacaattccccctcctggtggtattgttcgcataggagttgcttgtgagcaatatatttcacgtgcttcagtggagcagttattttttgttctggacctctattcttactttggtaaggtgagtgaaaagatttcaattgttaaagaaagcaaacgccagaatactgtttctttgactggagggttgttggagaaggttcctagtgatactgctgtaaaattggctttgaaggatctgcagcttaagtttcttgagtcctcgtttactagtacccaggacatgccactcgttcagtttcttggcaaagatctttctgtgaaggtaacacatagaacccttggcggcgctattgcagtatcatccaacatatactgggaaaatattgaggtagattgtgtagataccgacgtagaacatgaacatgagaatagctggaacggtcacttagttagctgtaatgggtctaccccactgaggcgtgtcttttgggttgtcaacggaagacatgatgagcatagtggcagcactcttacaccttttctggacataagcataacacatgtgattcccctcagtgaaaaggatatggagtgccacagtgtaagcatcgtggcttgtatttcaggtgtacgcctaggaggaggaatgagctatgctgaagctctcttacaccgattcggaattctgaatcatgatggtggtccaggagagggtctgtctagaggattagatcatttatcttctggacctatgtcaaaacttttcaaagcatctatagttgatgacaggaaaaagggtaataagaaaacccatcttgattgtttccgtttcatatagttcatgtgaaagtatcctctatgcagattgttcttggttacagcttcaatttttgctaaccaccgttgctaatatatgcatccagatggaactccaggaaactggaatggcgatggtttcccacatttgggaaggccagatgacattgatgtctctgttgagttaagagattggttgtttgctttggagggcagagaaggtgttggcacaagaattttgaataatgaagatattggaagagaagagaggtgttggcacacaaatttccgtactttccgagtaatagccaagagtacaccaaagaacgtggattcaaatgggacagaaaaccagtgtgatgctcacaagtatcctgtggactcaattattgtaagtatctgtactcctttccactgctcaatttctttccctgaactttctgaggttaatgataaccacttcactttaaggagagtttggtggtgatcttagaaaaaccctatgtaattcttcaagcagcctttatctttctggtgtcttacgaatgccataaggatcgtggaccattttgtggtactaagcctttaaaattttatccgggaaatataggtcagtgtcgaaggtctacagacagtgaagcctcaaatgcagaaagggaccgattcttgtaatggtttgtctacaaatggagttcacgaaaacggtcaaatgcatggaggggtgaacattgaagctaatattgtggcatctgaagacaaatctgttcatgatgacttattgaannnnnnnnnnnnnnnnnnnnaattctctgttaagcaacctgtaagtcaagcagagctcattgctctttgcttcttcctttttagtaaagtagtttttgtaataaaggtcttttgttctttgtgctgcaggttgaggcagttgtaacaaaggatgagctgcaacatttgactttcttgtgcaaatctgaaattgacgcaatgggaaggatagtcgcaggggttttacgtgtactgaagcttgaagaatctattggccaggcgactcttaatcaattaagcaaccttggtatacttatctcaaactccgctgcttctatttaagcttatagtttcaactttcccaggttcttggattttccttttcggcttataactcttatgtctgtatgttgcaggaagtgaaggttttgacaagatgttctctccaaaagcaagcagagcaggaagtccaaaaagctcaccttttgctgcatcattagattcaatgagagaaatttctttacgtgcaaacctcgaatctaccatttcgtccatcgaagaagcctcaatggagttagaggccaagtgttcagctctagtgtctgatctcaacgattcagaatcttcagcaaaacacgccaacgagctcaagcagaaactcgagagcttgcagagcttaatggctaaattacgaacccaaatctaaaatttatactcccaataagaagtgaagcagggcagctaattctttgatgtaaatagcatatatagagaaatgtgagaagcggcggggaatttttttgtatcctttatatataatgtggaaacgaatttttgtgtatgtctcatgagttatgagcaatgcttgtacttgctatcacccaaaaaggaactgtctttttggattcataagtttcgagaaatttttgcaaaaagctatgttttttttacgttcttcatggttgatttcgattaaaagagatcgctttttgtagctcaggtctcatcaaatctgaatccaattttcag

SEQ ID NO: 29975 - DNA, 3214 bp, Arabidopsis thaliana landsberg
  unsure (1)..(3214): unsure at all n locations
agcatgcttattttattagcctcttctaaagttacaaaacggtcatctaaactaaaacaagtgtgtatgtataccttttcatgatcaatactttctagcatcacagagtaaggcgctcgagctgatcataaaagcaaacaaatcatagaattaataattaaacatatcacagaagtaaagaatataagatatcaaatacaaaactcaacagagaccaaagtggctcgtatataaaaccagttaccaacaaatagtaagactcaagtgttgagtttttgcaactaatttattataccatccatatataagagtaaagtcggatcaaaatctgatgaatgaaggagaataaataatatatatatagatgttgaaagtcagatgttgagatttaaccaatgtgctacagcggattttttattattatatgaatttagaatgtataaattagatgtatgtgaatattttatttcaaatttatgattttgttacatatttgtaggtttggatacaaaatcttctatatttttattataacacagaaaaaatgatagtttctttgatataattttctttcctttttcttttctgaaatccgaaaaatctggaattttaaataattaatatatagaaaaaagaaattaatgaagaagaaagatgttttgttttttatttattaaatttttaaaatataaaaatcaagaagtagaaaagaaattaatgaagaagaaagatggttttgtttttttattctatttattaatgttttaaaatttataaaattaataaaaagaaaagaaattaatgaagaagaaagatgtttttcttttttgagtttttaaattttaaacaaataaaattaagtttttttctaagggtaaaattgagatttgtttttttcgtatgagatgtgtgtatgaatctgtcaatactttaaactttaaattttattagtcaccaaataaagtagtttgagttttttttcctggcaacagaaaaaattgaagcttttttcagacaatttttgaagaagatggttttgttttgggaattttcccattgtaaatttcacatttaagagtatctattacagaggaagatctaggtcgtggaaatcgagcaagtgagaacaacaatgaaaaagaatatatattattatttaaattacaaaatcgtccacacaattaattatgagagcttagaaagttgtctacgttttatgcacaattaacaatttcttacaaaagaaacaaaccatatatagacaaagaacgacgatcatggattctttttcaattttgatgatgtaagtaagtaacataaacggcttaagattaaaaaaaggatttgaagagaaaattaatcttacaacttacgttacaacccccaaagccttttttttttttttctctgtaaatatctcagtgttgcattttttggtcaggccgtctcatttctcagaacactgttcaagccggacatggtgaggacaagctctttctggttctcctttggtccatagaatccaaagatcgtctctttttcgagccagcgttaacatggttcctgcagttccatcccaaaatttctctcaatactcattttatggagagggcgaaagagagagatgtggcgaaattttccagcttaccaagtgtgaaagggacaatgtatagcaatgctggttggccgtgtccatccattaggttcaaagccacgtaagtaattaaaagacctgcagttttcaaatggttgaatgattgtcaatgatggttgatggagaaatagaagattcttcggattacgcagatttgtgtgtgatagtttacctaatccataggcaaccattgcccatataaaatagccggttctaagagtcttgttagctagccagtcatatctgcaagaacaaatgccggganagctatactacttgatgaaaggaaactctatatgatgatttaagagagagtttgagagagagagagagaagtatggatgttgaacctgagagcaaatgcgattagcaaaccgggcaaaagaatatcaccaaatccaataatgctgtagcctccccacggatcgaacatccgcggaatcttcagtagcatcgggatgccatcttctccactcttatcacctcgagctacctgcaaagaagaaagaagcaacgttgcattttcttgaacatatgagacgtgatgaagatttctaaaggagatttgagtttgagcattgttagaatctttatgcaaaatggtggatggctgattggttggttacttacgacaatcattacgctttcgtggaacaacttcttggagacaaacacccagaagatatcgtacaagaaggcacagctgagaagaactgtcccgacctgtttcaagtgataatgtggctttataatctttcaaaaagttttggaaactctacgatgacgtataaatacgttcaagaaattaccttaagatttgggacatgaacaatctgtagtacagttatgatcaatgcgataccctagtcaatagagcaacaatatcaaataccatctaagtaattggattgtagttgtaaatgatattgtatggggctgcaatccttacaagaacatcttggccaatccaagcaaaggagtgaactcggtatacagcccatagaacagcaaagacaatgcagaaaggagaaactgcaagagtgaggtaagagataggtccaaggaaagggacttttacataagtatctgcagcacgttggaaccatctgcaaaaagaacagtccatgacatcctccaagatgtgcattaaaggaaatacgcgttaaaaggaaccaagcttttaccttgatagtaacgcgacgaggcaagtttgcaaaccctgaagataaagaagttattacatcatacatcatctaagactataaccagttttcaaatcaactgaagtatgcattgtataatgatccttagtcgaggatgcatagaagaagaaaagaactgaaaagaagttggtacctcaacaccaccaatgcagaaaacgaccacaagaagctccacaaaccaataagacataagcttgtaaagaatcaccaggaatcccgaagcaagaactacgaaaaaaatagctgaaatagtattgatctttacaacaccactacccccatcatttgtgttagggatttcatctatagcatcctacatttgtgcagaancaataat

SEQ ID NO: 29976 - DNA, 568 bp, Arabidopsis thaliana landsberg
catggagcttggctatagctggctatgccactataacagttttgcacttgtgaactcggatagcataggggcgtaccttggcagctgaactagactcctttagcgctccacttatgaagcggccaccttgagatgactcttacaagatgctcctctattatatacgaagccaccagatgtctgccctaccaccctcaaccaatctacctaagggccaacctactttgataggaagctggacagtactatcagctccttagggcatgaaggctacatctcggaccatccacgggcgaagcaaggatgccgctcgcatgaccttgaaccgggcacatcgtttaagacactcacgctaccagtcacccacaaatgaagagctcctttcccgaaaaagtgtgattcgcttgccaactgtctgcactgaatcggaggataacatcgtcggacgctttcgcccaaaaaggctacccctagagtggatcaggtgctgatccagggggcgagcccgcgacgccggtcaccggaggtgaagaccgcttgcttcccttttggagccgagggcgcttgc

SEQ ID NO: 29977 - DNA, 1921 bp, Arabidopsis thaliana landsberg
cgaattttttaaaatttctttatctacattaaatataaatatttgttttttctttcacttttagttgtttttatatctaatttatttgattttatataaaatatatatagttaataacatattatattttttctgcatcattaactcaaaattttaaaaacggacatatattattcaatcgacgaaaaaaaaaagtaagttgaaaaagtttcacactgcttaagaaattgggcaatgatttagagtcttattataaaaagaccaaaataattttgaataagaatgaactggaagtttgatttatcaggcatccaaaaataaaattgttatcctgtttactctgattctctattttaaataactgaatctttaaaaatttcaaaatattatatctattttaactttcttaaaagttaaatatcaaaaaatttaaaacttttaaaaagttatactttattaaaaaaaaaatattaatacaagacaatatactacaggtgaaatcctatatataacaatcaaaatgcaattataaagtttggatcgatatttttgtttttaatttcattaccataaatatttaaactttataaaaaatgacaaaatgatgtttaatttcacgtgatggggttatatggtgggatgggtttggatcgatattgatacgggatgatatactatggacgaaatcctaaaattaacaatcaaaatacaattatactattttaaacgctattttttttttaattagttataaaaatcatatagaggtgtatcatagtatcatacataaaaaacaatagcatgtatctataaatcatctttaaaaagaaattcaattttttatttaataaaaatatatgcatgtgatgcacttcttgaatatgttatttatatataaataatactccctctgtttcataatataaattgttttatatcaaattttttgttttacaataaaagttattttcaagtttctatgcaaattatatgttactttaatattttatgattatctatattatttagtctcttttatgattggttgaactttttaaaagtaaatattcttaactgaaacaacttatattgtaaaacggagggagtattaattaaaataaaaatcactaattttctaacaaaaatatcaacctgcggtttaccgcaaatcaatctgtagataatacatgtttaaaatatttattacctctaaaaaaccttaaccacaaaaatactgaattttaatattaaactaatatacaacaaatatcagaacataaaacatgaattatccaaactttacatagaaaaaaaatatatgtcaaaaatatatgccgtgaatttgaaacttgtgtttgccaaaacaatcgcacatttgcaatttcgttaaatttctgtcttaaagacataatctttttgatcatttagcttccatagctaccgtagtatctaattccttcccttagattttgatttctctcattttatgtttagcgttaacgcaaacgagttcaaaattttgagttttcggtttcttatttttagatacatgcctcatatttagacttttgctggtatcttgcttgattccttttgcaatttctcttgtttaccttgaaatataattttgtattgattgataatacacttggtgtgagcagtttttgatgggaagggatcaaatggataacattgtggaatctttgcaattagataagagtaagttcttagaggaatcgagaaagatgacattactaagctctttcagccatgtctaaacattttcaaatgtacagtattaaattacattgtagataaaagcgcgctaacagctcctcgataattatattacaaaaaaaaaacctgcggtttggcgtggtaagccctagaatttttaatgtcttagtactccaatgtgttt

SEQ ID NO: 29978 - DNA, 2127 bp, Arabidopsis thaliana landsberg
gccggttagggaagttgaaagattacgtacaaaacaagtcaatttcttactcaacaaagttctaaagtcaggatctaggcttgaagtctatggtgtgacagctgcacaggtttgattattatcatttttttttgaaaaatcagtaggtatgaaaaaattagggttttaaaagtcttgtgatttgtacaggcggatgtagaagtattgttcaaagtgagagacttggagaaagcggatgtgatagaaccaagttggactgatccgcagttgatttgtagcaagatgaatgtatcggttaagtctggtttaggtccattcggtttaatggttttggcatctaagaatttggaagagtacacatctgtttattttagaatcttcaaagcccgtcaaaacagcaataagtacgttgtgctcatgtgcagtgaccaaagcaggtacgtttctttgattaagatcgggattaagtatattaatttttataatcttttgtcacaattcacaaatatttatgtttgttttaaacagtcggtcacaaaagatagatctaaaattgggttccctagaaatatccaaaacttgacttttaattttgaggactttttggtgatgtggatttgggacagatcttcgctgaaggaagataatgacaaaacgacatacggagcttttgtggatattaatcctcaccaaccactatccctcagagccttggtaattaagtctcccattttgttttttacgtatatagttttatatattaatttatgttcatatgtaaaaacgcttgcaaatatagggaagaaaaacctcctttttaaaacccatgagagtaattatttaacagcttagcctcttgatcaagactatataatctttaactatcttgttcaagtattaaggcgaatatttaattgtggatttgttaataaaagtttctgttatttgttgttgttggtgtagattgatcattcagtagtggagagtttcggtggaaagggaagagcatgcattacctcaagagtgtatccaaaattggcaataggaaaaagttcacatctctttgctattaattatggatatcaaagtgttgatgtcttaaacttaaatgcttggagcatgaactctgcccaaatcagttgatcacgtaaagatacacacatgtaaacacattacatctccattgatttagcatttatatgagttgattttggagagatcttatatggtccactttgtttggttgtcaataaaattgacaaatttgaaagtttgaaataattctaaaaggctaatatatatgacattttatttgacttccttatagtatgacttactattatagaaaggacaattttagagtcggtagtcaaaatcttccaagttccaacgaatgtgataatagtggactttcaatgaatataaacgtaaatatgtatacatgtacatactatatgaaacaaattgagtacgatcttaaagtttgcccccaaaaaaataactagtatgtgtatgtataggatcattctatgtaaatcagcacacgtaacttttttctaaaatgcccgacggctatattaccacaagtatgaaattgcccaatatgacgtaacgaacctataacactagcgcctatctatccatagcgatgccaacatgatttatttatttattacaacggcgttgggtttacattgttttcatctaaacggcccaccgttttagcatttaagaccaacaacttcacgtcaacgggtctggtcaactaattaaagcgatcaaaccatctccaccgtccgatactaatccaacttcgtctgtcccgcccaagggcaagcccgtaaatatgttcaccagcaatgatgggagtagcatgtgggacataacattgcatggtagtgttttttccaacagcgcgctaaggctaaatcgttgtcgtttagtaaacttctggctctagatttagaatacgtgcgtgagatgtagccagagcccagagggaagttatggttgaatccggtttgtgtccactttaatttggtgtgtaatgattctcgcctgcacatctctctcttttaaaatattcaagtctcaagcaatagtgatgatatggacatgtaagtagcg

SEQ ID NO: 29979 - DNA, 1015 bp, Arabidopsis thaliana landsberg
  unsure (1)..(1015): unsure at all n locations
caagaacacgatcaacaagagtatcatcaggattcagctcaggaatgcgtggttgaagcattgagtcaacaacatgctttccagtttccaaaatttttgccgtatcaacgccatttagtaaagaaaggtttgagagcgattcaagaatctctagagcattatttccaagaggtccaggtatgtcaacctacaaacaagaagtaacacgtgagctcatctctgcataaataaattttagttaactttgtacagtaacctcaatttgtatctgaataaggacaacttccaacatttacctctaatgaagacagtgaagggaagagcttcaagacttcaagtagttctccaacnnnnnnnnnnnnnnnnnnnnnnnnnnnnnnnnttaaatgagaaagtaatggcatctcgtgcacagagaatgcctgaaaatgaagaaagcaaaggcagataattttaggctcgtaaaatacaaaattgaaacatacgccttggtcaatgcttgtagcctctacggtcaataaactacactccttgcctctctgagagaaagtagggggacaaaactgaccttattgactagattgtgtattgaccggtttgaaaggtcaagtgaggtgacattgcacaagggttgatcctgctgaacacaaccaggattatccttcccaaagatatctccacagaaaccaagtgcccataacccataattaggggtaaaacacgagttgtaaatctcaagactcggacagccttgcaatatttcgtcagccatctgacgttcactgaaaataatcataaaaaagaaatacatgagaaattaattatatatccacacacatccatatattttgtaaatgcatgattacctcttctgaagaacaggattgtcattcagccacaaagccttcagattcttaaacttcacaatctcttgtataaccacatccgcactctctattttgttcccgataagactaagcgccactaaatgctacccanaaaatggcagcagcac

SEQ ID NO: 29980 - DNA, 1011 bp, Arabidopsis thaliana landsberg
  unsure (1)..(1011): unsure at all n locations
cttccgtgccaagccctactccaccagtttctccaccgcctccaactcctacaccatctgtgccaagtcccactccaccagtttcaccaccacctccaactcctacaccgtctgtgccaagtcccactccaccagtttcaccaccacctccgactcctacaccttccgtgccaagtcccaccccaccagtttcaccaccaccttcgactcctacaccttctgtgccaagtccccctccaccagttcctactgatcctatgccaagtccccctccgccagtttcaccaccgcctccaactcctacaccatctgtgccaagtcctcctgatgttactcccactcctcctacgccatctgtgccaagtcctcctgatgttactcccactcctccaacgccatccgtgccaagtcctcctgatgttactcccactcctcctacgccatccgtgccaagtcctcctgatgttactcccactcctcctacgccaccttccgtcccaactccttccggctctcccccttacgttcccccgccatcagacgaagaggaagcagcaggtgccaaaagggtcaggtgtaagaagcagnnnnnnnnnnnnnnnnnnnnnnnnnnnnnntgccccgccgattgtccccgttcttgtcaagtggattgcgtcacttgcaagcctgtttgcagtatgtcatcttaatccatcgatcgatctcctcttaaattccttattattcagttacttaatacgttctaaataacgatacattgtgatgcagattgcgacaagcctggatctgtttgccaagacccacgtttcatcggaggagatggtctaaccttttacttccacggcaagaaagactccaacttctgccttatctctgatcctaaccttcacatcaacgctcatttcatcggtaaacgtagagctggtatggcacgtgacttcacatgggtccaatccattgccatactcttcggcactcaccgtttatacgtcggagccctaaagactg

SEQ ID NO: 29981 - DNA, 576 bp, Arabidopsis thaliana landsberg
acggcggaagattttctcttctccctttttagtaagcctctaagtgatgataagggaggtggtaacggtaaaccaaatttctcagctaagcaaacaaaaacacaaataatttaattgttagaactacgtgtaatattatctcttaaaattactatattttcaacgtctgaccacttttttcaattagtgtatatatgagtgaaaatatttaatttttaatggccagcacgttacgctatctaaatcaaaccaatcgtggcctgccataacataacaccaacactaatagtttcatttcatacagaaaaaaatatgacagcggagagtaatagttattaaaaactcaccgatagcatcggcggcgttcttgccgttacagaatcttccggtgggtttcttgttcggaaaatcgacgccgttatgtggataattagctttagatattgaaattggtaagtaattattgttgccggcatcaactaacgaatctccgaacacgtataatcctggaatcgaagctaatttcccggttgcagcttctaaaccgggaaatgaatcgaaccggattaaaccaag

SEQ ID NO: 29982 - DNA, 1474 bp, Arabidopsis thaliana landsberg
tctacgtctcattggatggatatactaagcaatcgtctgcataaatgcattagacgaatcaagaattttctttgtgttttctgagttgagtcacttgcctgcctgcagcaaatgaaccaaaagatgcagacatattatggacaagtgtacaggtggatgatgagctcaaaaaagaggtgggaataacagatgaccagtacataaatcagtttccctttgaggcatgtcttgttatgaagcatcatcttgcagagactattcaaatggtaaattcagcagattatacccttagattatcatagcacgttagtaacttgtttctgaaatccctatgttttgctttacagggttatggatctccaaaatggttacagcctacctataatcttgaaacccaattgtcccagtttattggggactattgtgtccgcaaacgtgatcaattgaacaatttgtggatcttgaaaccatggaacatggcacggacaatcgacacaagtataaccgataatttatctgctatcatccgcatgatggaaactggtcccaagatctgccagaagtacatagagcaccctgctttgttcaaggggaacaagtttgatctgcgatatgttgtgctagtgcggagtattgacccgctggagatttacctaatagagatattttgggtaatgcttattttaattttcattacaaccaatacaagcgcttatttactcatatatatcaatcctatatgtttgatttcaggttaggttgtccaacaatccatattcattggaaaagcacagtttctttgaatatgaaactcactttactgtcatggtattagttaagaacactctttccacataatgattcagcaactctcgttttcccttttcatgttcattctcttatgcgtttcagaactatggtcggaagttgaatcacaagcccacggcagagtttgtgagagaatttgaacaagaacataacggtatacactatatttgggtttactttctccagatttttatgcatttcattttgtcaataacacgattcaactctcaatagttaaatggatggatatccatgagaaggtgaagcaggtgatacgggcagtgtttgaggcggcagctcacgcgcatccagagatgcaatcccccaaatctagagcaatgtacggagtagatgtaatgctcgatagctccttcgagccaaaaatcttggaggttcgttactaaaactacctgacatatacttgtttccttgagaataaactcttggaaattgcaagttctcatgattgtctatgcaacgcaggttacatactgtcctgattgcatgcgggcttgcaaatatgacatggaaaccatagatggaaaaggtattgttaaaggcggagatttcttcaataatgtattcgggtgcctcttcttagacgagactgcacacgttactccattgtgagctcaattggcagaga

SEQ ID NO: 29983 - DNA, 1243 bp, Arabidopsis thaliana landsberg
tctgaggatgaagccgctggtgttggtaaaagaaaaaggcatggtatgggtggagctaaagagaatgaacttctttcagccgcaccgaaagcacccagtttcacctctgatccaaagagaatcctgactgacgttgaacaaacacaagcccttgtgcgtaagctagactctgagaaaaaaattgaggaaaatgttttacaaggttcagaaactgaaaaatcaggtagagaaaagttacacagtggttctactggtccagttgtaatcataagggggttgacatctgtgaaaggccttgagggtgttgaattacttgacacgcttgttacatatctatggcgtgttcatggtctggactattacggaaaggttgaaacaaatgaagctaagggtttgcggcatgtgagagctgaaggaaaagtttctgatgcaaaaggagatgagaatgaaagtaaattcgactctcattggcaagagaggttgaaaggtcaagatcccttggaagtgatggctgccaaagagaagatagatgctgccgctactgaagctttagatccacatgtccgaaagattagagatgagaagtatggttggaaatatggttgtggagccaagggctgcacgaagctgtttcatgctgctgaatttgtgtacaagcatctcaagctgaaacacactgagcttgtcacagagctgactaccaaagttcgggaagaactgtattttcagaactatatgaagtatgtaggctttttctcttggattcctctactgtcgtttctgacaggttcgtaatgaaaattttttgtgctatttgcagtgatcctaatgctccaggaggacaaccagccacgcagcaatctggcccggtacatgatcttcttttgagatttaatggagtgttgactagtctgtacttttgggttatcacttgtttagcttggtttgagttttatttacgtgggttaattatactttcaacagagagatagacctataagacgtaaacccagcatggagaacagactgagggatgatagaggtggacgcagagagcgtgatggacgtgctaatggaaatgacagaaatgatcggtcagaagatcaacagagaggggataatgatggtggaaatcctggggaagttgggtatgatgcatttggtggacaaggtggtgttcatgttcctcccttcttatcggatataaacccaccaccaatgctgatgcctgttcctggtgctg

SEQ ID NO: 29984 - DNA, 2697 bp, Arabidopsis thaliana landsberg
acacaccaactctcatttagactatcatttgatttccaacaatagtttatgtgtgcgtgtattttattgatactcattcgaaatttcgatctctagattaacctataatctgttgttgtgagacaaattaacccaaattaataatatattttaaaactaatcattttgttgattgtttctcacttacacaaaattatatcaaattaattgatagtctctaactctaattaatgttttgattcatggttcaatatttaccttgtagataaaaaaatctaacaaatgtaaactctagcttttgatcttgagtaatattatgccaaaaataacttcattattgtggtttatgcttcttcgtcaagactcatatacacagctaatgattatctcatgcaatgatcatcccttttccactctgtttattagtctcgaaacatctctcttcttcctactcatccaaaatcaacacaaaacaaaaaaataacacttatcttcttcttcaagtgtatagaatcattgtgttctcaaaaattccgaccttagagtgagacaagtgaaaaagggccaatacaaatgatatcttgttcagaagaaggtagtaacaagatccttgtggcgatctcgttggaccgtgacgagagccaaaatgttctatcttgggccatcaatgttcttgctaaaccaagtgacaccgttgtggctcttcatcttcttggttagtctatatacctaatttcctctgttttttccttccgaccatttgaatagtttttttttttggttgggaaataaaattgttagtgtcgttgcagttggtgaagaaccgagaaaattgccaatgaagaagaagaagagaactcagattcgacatgccaaagctcatgttatctccatgcttggagagttcgcttacacttgctgccacaaccaggtacaaccactttcgttttgaaaaaaaaaagaattggcgtaagagaaaatttaaaccggaataaaccggagatctcaaaaatcaattattggtgcatgttttatagccattgatttgggcaatattgccccatacgattacttttcgggtcgaatcaactttttgttcgagattttataccatgttaaatttcataaattaataaatttgtttatatatttctctaagtatcatttcacttgatctaaactaaaatatgatatacactacgtgtctaatttgtctaatcgaattttcgttaaaagcccattaagcccaagcaaacacgtttccatacgcgcgtgatatcagcccagacacaaacaaacatataattatttccttaattacgaatccaccccgcattaatactgttattacatatttggtaagattcaaatttcttttttcaacttcatacttaatacaggtgaatttggaagccaaggtagggtttagctcaaacattggaagaggactaatcgatgaagtcaaatccatttctgctcattatcttgttctttctcgaccaacaacccacgagtttaggtaataaaccggatattttccggttcggtttagaaatcatccaattcaaaattcttgtaataactcgtttgtattttcctctccatttaggatatggaatgacatcaaaagatatgtctccgactttgctccatcaagttgctctgttgttttagtcggaaaccaaagaaaaccgcataaagattgttactctgactccgcgatttctctaggtttgatcatactaatataccctttaagtttagttatacgatttgcttagttgattccaagactaacaaaatatgtttttcttagacataaatagtgagaagtattcaccacgtagtgtactaaacactttatcaagagattcacttagctcttcaggcgatgatgcttcaagcttcaatggttcactggtctcttctagcttcgcttcgccttcagacaaaccgaagcataagtcaatctctccttacaaattcatatcttctcttatcatgaattctcctctgaggaaatggagaggaagtgagactaagaacaagcccaaacctcagcctctaattcaatgcttcacttacaacgagatttcaaaggccacaaatgattttcaccaaggtaaaacattagagagaccaaaattttaaaactttggaaaacaaaacaagacaaaaagattgaaacttttgattcttgcagggaatatagtaggcataggaggctactctgaagtgtacagaggagatttatgggatggaagaagaatagcagtgaagagattagccaaggagagtggtgacatgaacaaggagaaagagtttcttacggaacttggcatcataagtcatgtctctcatcccaacactgctcttctcttaggttgttgtgttgagaaaggtctttatcttgtcttcagattctccgagaatggaaccttgtactctgcgctgcacggtaacctaacttcatattactttgatgttgtgattatagtacttctacagttctagaaagaatataaacattggattgattatgtcattttataccgcgaaaaattaaaacagagaatgagaatgggtcgttagattggcctgtacggtacaaaattgcggttggagttgctcgaggacttcattatcttcacaaacgctgcaaccaccggatcattcaccgcggcattaaatcttcca

SEQ ID NO: 29985 - DNA, 2430 bp, Arabidopsis thaliana landsberg
  unsure (1)..(2430): unsure at all n locations
tgtcagtatcctcttgactgcattcgtatcctcgcttgttcatggaaccttccatttaagaaaaaagaatttgcgatctctgtgtccagagataaacaaaaactattccaaagttaggaaaaaaacagcagaagtccacaaaggaagcttcagagaagaacataaaagaaacataaccacataataagttgaatatagaacaaatagcctcaagctatagagtttggacaacccacatgggtctagacggtttgcagaagtcactgaaccgagatctgttctttaatggtagatctaaagtgttaataaaaacctttaaggaatctgtccatgtgagcattagaataatgcaacgagagaaagagagtattattaatggctgacactagtaaaaataaacaaatcaaataaacagaaaaaagcagctgtttttgtgcatgaatgagtattgaaagttggtgctgcgtaatacctggagagatcgtatgctgcattatgtcaaccctttcttgacttttctctaattttgtctcttcctctgctcttgtccctcttcacaaattctagtgttagttaaacatctcaaaagtctttgttagtgactcttgacccacacttatgcttaaaccataatcacagatgcatccaacattagttgcaaaacaaatcctcttacaaatcaaatcaggcttgctgtctcaatcagatgcacatctcaacaaacacaatatccaagttcaataagatcataattatatattttgcttttgcctggtgagaaaatgatggttgcgtttgccaatgaacatgaacaataaaatacagaagtcggtgactttgtccagtgtgactgacaaatatatatctgaagaaaaaagtcaatacaaggccaaccctttctttagcaatgtctagatccaagagcaaaacaaaaaagaactacatatatagagaacatgtgagacaaaaacattgccttgcgaattaagcgattcccatgttctcacgagttgtatacggaagagaaaatctagtttgcttccattgagaaactcgtcagagtagactgtgaagaagtcactaaacagtgaattacttactcaccttcccaacctaattgccgagctctgcgctcccacaaaaaagtgatcttccgctctttgagcaacaatgcttgagctctctctctagctgattcgcaaatttcagtggcagcgttacacttctcagcctccttttggtactgtgaagcaacccttttagcttcggcaagtgtaacattcatatgacgactatgctcgtctgccactgcttcttgaagcttcagctcttctgtgagaagatccacaaacggcttctccatctcctctttgagctctggatcatcgctgccacaacctgatacataccacaagtcaacagatatatcatattctacttttccatggactaaaagaggaacatcttctcaacagataactaaaaaaactatttgttaaaagtattcctaatgcaattggcaacagataagagaatcttaggctcctatgtctgatcaagaaacccaaataaagtctaactttaagagatatagttgcacccattggttactgattcacaaattcctaggttttcaaacgattcagtaagggttctcagtgagaaatcatcagataggcattctcattcatactaaatcagtagagatactagagaaactgaagaaacaatacatacagagtttcaaagcttgggaacgagatctaacctgtaatagagaggtttgcaagccctgcaaaagaatgaaacttcattagaaattgagactcttcttatgtatacaatttaaaagccgtagctttgatagaaagatccatcacagaaaccacaagattgttccaagcacgatctaagcatttccagatttataaagtctcctaatttatgaatcaaattgaaaacccagatgtaacaacagtaccgggagcaatctggaggagagacaaaggaggaggacaatcgcagacacaaggaggacaaatggaattggtgctacgagcagatccaacgaaacccttattcaatttccagtaaagagcaggtccacacactaataatgctgaaaccaccgagaatatcactagacatctcatgcaatttccagacctccgtgccattgcttcggttactgatgaaagctcaattttttagattatggatcagatcattcaattcacgtttgagcaatcatggcgatagtggaaaagagagcactgtaactggagggagactatctattccaagattggcactagtaacattatcacccccacatncgttggtaattacgacattatcccatacctatccnctatttacgaaatcccctcacatttttgggtagttacgtaattgcctacatctttgcgt

SEQ ID NO: 29986 - DNA, 3181 bp, Arabidopsis thaliana landsberg
ccgaaaatgataaatgcatggagtaattgtataccaactaacttgtaataatttgaatcaacacatgctcttttgtttacgcagcccatgcatttatcgttttcgaaagtatttaattcattttgttataactacgatgagaagccgagagaaccacagaattataataaatcggataagaaaaatcaacattctccccctataaatacaaaacaactagctaaagttcgaaggattcatacataaatcttcaacacaactctttaattatctagtttaatacaaatggcggcgatagaggacagtccaacgttttcctctgtggtaactccggcggcttttgagataggcagcctcccgacaaccgagataccggtggatccggtggaaaatgattcaacagcaccgccaaaaccggtgagaatcacctgtccaacagtcgccggaacttatcccgtcgttttattcttccatggcttttatcttcgcaactacttctactctgacgttcttaaccacatcgcttcgcatggttacattcttgtagccccacaggtacataatttaactatacaaaaaataattatgaatcatttaaaaggataacttacggtatgtaacatgtaacatgtaaaacaaaatgtacattaattgagattgattgttacgtgaaaagatataagttatttttatattcttgaatgacagttgtgcaaattattgccgccgggagggcaagtggaagtggacgatgctggaagtgtgataaactgggcatcggaaaacctcaaagctcacctaccaacttcggtaaatgctaatggaaaatacacctcactcgtgggccacagccgcggtgggaaaacggcgtttgcggttgcgctaggccatgccgcaacattagacccatccatcacgttttcagctctaataggaattgatccagtcgcaggaactaacaaatacattagaaccgatccgcatatcttaacgtataaaccggaatctttcgagctggacataccggttgcagtggtgggaaccggactcggaccgaagtggaacaacgtgatgccaccatgcgcaccaacggacttaaaccatgaggagttttacaaagagtgtaaggcgacgaaagcccatttcgtggctgcggattacggacatatggatatgttggacgatgatttgcccggttttgttgggtttatggccggttgtatgtgtaagaatgggcaaagaaaaaagtctgagatgaggagctttgtaggtggaattgtggttgcgtttctcaagtatagtttgtggggtgaaaaagcggagattcgattgattgtgaaggatccttccgtttctccggccaagcttgatccttcacctgagttggaagaagcttctggtatcttcgtctagatttgtgttatgtactattatcagaggggtcttgaatatttgaaaaacctatcaatgttttctagctccaagctagctattgttcatgtcctaagttgcatgtgtatttttattaaactcgatcaaaacatttgttatagttttaccccaaaactttacagcttcttcttatactaaaacctaaacacatttaaatagctatataattctctatataattcttatataatgaaatgtgaccaagcttttcaacttcgttgcaatgattcatgtaatttggtttaactccgtcacaaactctatatctttgtaacatacccttattcaaactttcttgttgtattctaaagttaatggtatttgtaacttatcgcaatttcgatcttattttcgtaaggagaaaggaaaaatttgctcctgcactacaacatttaatgagagctccaaactctacaaacaagtcaacaatgacaaattaatttgggcctgcactacgacaacgatacagcaaaatggagacaaaaccacatttaaggttttattgtaggcaaatggtcctaagattgtctgtatacgaaaggtgcgtcgtgagtctcgtgactcttgtgtatgtggtggttattttactctcgagttccacgtgtgtttgttataattgttagtatatacgaaagattgttagttataaccaccagctgacctgctgaagaaaggaattgagatgagccgaaaaggatcgagtcataaagcttggaccggtagatatttaaatgggcctaggcccatattggtcatttactttcaaagtagataaaacagtttcccacacatcccactaaagtcacatccaaacattacaaaaagaaaaaaagaaaaaaaccaccttatccataaccatccctgacacaggcgccgtacacgtggcgtccattaggcttaatttaatcggtgactgttacttgatgacttgtcagttttccacgagttaacggttcacgtcatcacggctagacactgaattctcatttttatcccttcaccacgaccattaatcaaatgcaagatattggtgaaagggtatattcgtcattgaaacaaacatgagtcgataaaattgacagagtcacagattctattttttcctctctctctgctctttgttgatctgtctgtgtgggattcttcctttagttcctctgttgatctatccaatcgaatcttacgaaaattttcggtaaagtttcactctttcttgtatttctatcataggtgattgtagagattcattagattttatgtgattacgtggtcaatttagctactaggtgatataatataaactatagttttcacttgttttgatcaacatgttttgtttttttcccgacctttttagctattgtatttgtgtggtgatcagttatttctcttgcaagtaaagtagttttgtgattttgtgaaccgagttagggttaagagatggggtgatgttggatactaaaagttttaattttgacacttgaatgtttctgggttctgcatcaaaagagtgaagatgaggtcgcttcaagcaccggttgtttgccctagtgttcgtcccagacaattgggtgtctctgctttacttgtcaactgctctgtttcgaaaactaggagtcttagaaaacaattctggggtaaccagaccaaaaatgacaagtctcaggctgctacagagaatcttcgtctgcatcttcggaggtataagagtatcaaatgtcttttcagc

SEQ ID NO: 29987 - DNA, 2238 bp, Arabidopsis thaliana landsberg
aaacaacggattagtgttggccttttaagtcatggattgtgaaaataacattaaaaaagggcatagaaaatgtggacaaacacagacaaaaaccctaaataaactcaaggatgacactttgaatgatccttcaaattcctcttcctcctcctccctatattcctgcatcatctatttgaggcccaatgataaaggagagagacagaaatggtgtataacttatacaagaagcaaaaagcatcacaaattatacaaatgattcagtccagttataaggagcacgatcaacaattaagtagtctcctctgatgtccttggccactctgatctcaccgtccatatacacattctcaaacctgtggaaccaaaacccaaactcactctctttatctatacaagtagctccgaagaggaaacagagagaagtcactcaccagcccttcccaaatggtggcagtgggagctcccagttcttccctctcaataccgcactattgaatctgaatatcaaaaacgctatcaactaagctatgatgctacacatttcgatatcagagcgtacgaagaagaagtggtttttggaacctgaaattgactctctgcggggaagcgatatcgatatcggagcgtacgaagaaaaccccgtccggcgggaaagtgatgacgttattgaggatccgtttattcacatcgatcacctgcaaaacgtctccggcggtcgtcccaaacaagcctgccttttctatgatgaacaactgttccttctccgtcgtccacaagagccgccacgtagcagatagagagtcgtctgtggtgatggagctgcgcccgataaccgtcatggattcgatggcgttcacgatttcatctcgcttcttggggtctttctgggttctcagacctcgatcctcctcggagatcagctcaagcagcttcctcttggctcgctgtgctggattcgcgaagatcgagcagcttgttcgaaaaccggcacgacgagtgcggcggagtggaggagaacatgccgacagcgagagcgcgagcgccatgtttgcaaattgcaatttccatggttaggttgttgcacgaagaagaagaagagatactctgttatttgggtttcttttctaaaaagcccatttgggttttatttgctttatctcatgagtctaagcccaagcccaaggaaatagcttgcacgtgcgcgtcacgtgtctacgataaaaccccagcaacggcgagcggctttgccttgctcattcaacctcgctcgtcgtcgtcgtcgtctccacttcgatttttcaatcagtaatattggtggttcagagatgatgatgatgaatcttttaaggagatcagcgatagccatcggccgccaatcaaaatcgaaactggcgtcgttttcctccgctacacaaccttgttccggaatcccaaaatcggtaaggctttcgtattccatctcactctgccggcatttctatataatattggctaaaagctattggttcttctactacatagacacggattgtttaggatcttgtgaaaattgaggtcgtttttttcagtgtctctagtcctgtttgaattgaatctctctagtgtccttgatctggggaaaacttacagtgttacttttgttatatatcagtccaagagggtttttagcaactcatttctttcaaaggtattttcttccctttacttgttaaatatttgcttcgacaacattttctttgctctttacacccttttgggcttatatgttagtctcatacctctcatcgtttttcttatgcaggactctactggagctaatggtcagcagtgataattgtgtaatcaaacttcaaatcctagtgttgatgtgtaccttgttgttctgacaattgtctgttatacaggactattgtttcgcttccgaaacccgcaagcaagtatatgtacggaagctcgtccaaagaacatcaactcatcttactttaccagatcttttgcatcaagaacttcaaaagaacctgggaatcagcagaataaggtgtttcttcctacaagtttctacttaatgtctacgttatgtgtttgccatttatcacaacgcaagccgtcaaaagcgacagacagcttctgtcatctaataatgatgcttgctttgtgccaattgtattacaggctacgatagagagtgcgactgtggaggatccttttgatctcctacataccacatcccggaga

SEQ ID NO: 29988 - DNA, 3802 bp, Arabidopsis thaliana landsberg
  unsure (1)..(3802): unsure at all n locations
cctctttacatgccaaaggtaaatttttcaatcagatattagtaggatagatatttatttgtgttctcaagcttctgtaatcaggtaacagaatcagatgcagtggatgttgtcgagaatgctattaagcatcatttatcagatgtcacaactaaggcaatggcactcattgctctgttaaagatctcatctcgtttcccatcctgttcagagtatgccaactcctacctagctagttgattctagattttctggttataatcacgcatgaactcatttcacgtccctgattttttcttattaattatgccgcgatgaaaattagtcaatgatacttctcaccagtgttgggcttgttgtattgcttacaggagagttaaaagtattataggacagaacaaaggtagctttgtcttagaacttcaacaaagatccctggagttcagttcagttattcaaaagcatcagaatataaggtaattctttcgatgctactggacatatctgttttcatcaatttgaatgagagagtcctatagatattgatctactaaattactcaacacgattgatataaatatgcagatcttctctggttgaaagaatgccggtccttgatgaggcaacatttagtggaaggagagctggttctttaccagcatctgtgtcaacttctggaaaatctccgcttggtattccaaacggtgttgctaaagcagcagctcctcttgttgatttactcgatctgggctctgatgatactcctgtgcctacctcctccagtaacaactttcttcaagatcttcttggtgttgatttatcgcagccttcagcacaacctggttagacttccaagcttacactattccacttcattagctcaaagaaaaaactaacttattgaagtttttcttgtattgcaactgataatattaattgttaaccatctgtatagcactatcttcctggaatagaagttagattataattcatatacgttttcttcagccagataattttctctggtcatgtcctcaacttattggcttcagctgcagtatggcctgtcctaactataacccgaagaaaactgtaaaaattttagtgaagataagtgtagtgttaagttttgtagagagtttgggatgttcagttgtgaagtttcatcatatattctaaatcgtcgacccctttgtttacccctgcatttttcaatttcaggtgccatgcagccatcgcaagctggtgcggatattcttatggatctgttgtcaatcggaactcctgcccctgtgcaaaatggctcggcgaatggagacttattatctattcaagataacaatgctccaatagcgccttctttgacttctcccactgcgccttcttcgatgatggatttattggatggatttggtcccaccccaccaaagagcggtaaagatgcgctatattaaacattgaaaagttacatagcacagtttctcccctctttcttcttgttttcaaatgtgatgatatcatctcttttcttccatgacagaggacaagagtgcagcatatccgtccattgttgcatttgaaagcagctccttgaagattgagttcaacttcacaaagcaatcagaaaatcctcaaacgacagacattgtggccaatttcataaatcttactcctaacgtgtacacagaatttcttttccaggctgcagttccaaaggtcaggtcccaaatttgctttttctgcttacgttataggccttatgattcatagctaataagaacacaatctttcctaaagaacaattctgccatgtgcttggttcttaacgttccacatttttatggtcgtgatagtgatagattcatgttttttgcaaagttcttattagtggaaatacttggaactgttttggagtaaattgggttcggtttaggtttccatgatatgttttgttgacgatgttctaatatattcatgttatcacacacattgcagtttctacaacttcacctggatcccgctagcagcaattctcttccagctaacggaaacatcaaacaaactatgagagttacaaatagccaaaaggggaaggtacattttcttctttttctttcttctcttcaccagatttatataacaacaagcacaaaacctcaatcttttgtgaaaccgataccacaaagcgctcagaataatcgctgttcttctctgttttcagaaacccattgtgatgcggatgagggtaggttacaagattaatggcaaagatgtgttggaggaaggacaaatcaacaatttcccacgtgggttatgagaacgtttcaggtattccaagattcatatacatattcctaatttatataatcacttcccatagactaaaacaaacttcttcatagaacctttgtatgtgtgattcgttggctttgtgtgaaatctgggtttaaagtgagataactttttgatggtctgagttacttatgagaatgtgtgacgtcaaatgtattcttcttgctgcttcaagttcttctctatcatttatatcattaataaaacgtttttgttttttccatagtaacattttgagaaaacaatttattattagtttagaaaataacttattttgtcttttgtaataacgaagattttcatcaactccgaattcagtataataattagaaattagacggacaattttttttaatttaaaacaaaaattgtgtatgacaaattaggcctacctatattgtttatacactattcaaaccgttcaaattgtgtttacatgcagtccaaaatgctgaattttcatttcttgcctaaccatgctgcctaaagttagtaatcgtcatagtgagatgcaatacttagccgcctagtattttcttgaacagttattaaaacataaaacaatgtaatgcaatcatttgattagttttctggtttaatagtatgaacatatccaacaaaataacagcaacttcattttaacacttattgaagctatatatagctaaacaaaacaagataaaagaagtccttgatacctaaaatctgttgattatatttgtatctatcatgatctaaagtttaaaagtcatgagatgtaattcatatggaaacagtgtagtaccagatcagttcttttggagtttaattctgtccagaattttagtccaatgctttctctgaattaatgtgtctgaatgtaatttttttgtttagctatatattttctcacttctcaactaatcggcactacgattttatcaaatttttggtgctaattataaaagaattacatatttttggaccaaatgaagtatttatacatagggcgtggtgaattgcaaataagaatattttacatattaattactttcatattttttttttatatacataattcttacgtaatattttgttcaggacatggaatctgcaacattttaacacaagtaccgttaaaacaacgtactactatgtcactatgtcagaaacaagacatatacactgctacaatgcaaatattaaaataaaatcatttatattaaatttgccaaccagtagaaaaataaaatctaagaattacaaatgtcagactacgaaaattcttagtacaatttatacttattgtacgacaaaaaaaagagagagtatttactagactcatcaataatcctcactaagaaacccaccgatcttattctctctatcgnaattattgttgctgcaattattgctatagttataaatatcattattactattgtaattattattatgattatgattatta

SEQ ID NO: 29989 - DNA, 2467 bp, Arabidopsis thaliana landsberg
aagagatccaccaccgtcatcaacacacacacacactttgtttgttctcacggagtccccaacaaaagtcaaatcaccgttcattgagccccacttttatttacttacatgtttaatagacccgtttgtattacgagacacttctagtcgcatgtctccaccgtccgatcacggatcctagctgtaatcaagggggcagatttaatgaagtgggcctcttagtaactgccttctccacgtatcctgacaatttattgttttcttgttagtattttgccatttttggtttattataggatgattaatgatcttataactcttccataaactaatttagatagatacgcattgcatagtttgtttttaggtcgatgaaagctaattatactatacgattgcttttttgtttgtttttgtgtgtcagcgttacattaacttgtctttgttttttcacattgttaacaataaactccaaaatccaaccatagaattttcgaggttatatatagttgtaatattcattaaatttcagaaattagtcactatttattaagaggatgttgctctgttaatgcttataattcaaccctcatttgagtagtactcaacattcaactgcattcaactgaatcttttggcttcaattactagttccattacaattgtccaaatgtaaaacgatttttacacgaaaatcaggaaaatgacgttggaaaatgatactattccataatgataaaccatgatattggtaaccaataaatactagtacatgtaatcgagcttcataaatcagaatacgtaatgaaacttaaccagtcaatgtaattatttacatacaggaaaagtagactgagaacggtcaaactttgttttctaaaaaagaaaattaggcacatccttgaaccacgtttgacaaaatctctggtttaattacacattaacacacaagtactcactctctctttaaaaggctctatacactgaatttaataaggaaggttctcacttctcatcaatatgaatttatcatttcttatatactttgcactttgcgcaataaacatgtgaacgaattcataactaaagtgaaggcaacatactaaccctctctatttacctttcatttcttactaacactagagctaaaaatgaaaacaatctccaattattttctgttaaagggtaactactgaatgtttgtgaatatctcaggaaatcatacattgatctaacaatacatatggttttatcttaatagaaaacttagatacatatacatctttagatggattggatcttttaaatccacttttaggtactcttattctgtgaaaggtaaataataacttcctctttattttgatttttctcataaatttttgatgtttatttaaaaattcgacatcatggggtcgttggggagcattcccttgatttaatatccacccacattttttgtcgtccccaaaaaaataatctgacccggaaaacccgacccggctttccttttcgttgttatcataacaataaatcaaaacagaacaaataattttgatgcaaaaaaaacaaaattcgagaagaaagccaaaaagaaaaagaagagagaatgctctcagtctcagcctcttctcaccaccactaaccccagaagaatcctcacagacagagagagagagagagaatcagaatgggtttgatatcagcgaaagagacgaagaacaacactagaggaatgggtttgctcttagtcttcttccccgaccaccacagcaacaacgacgactctccttcttcttcttcttcttctccggcaacaacaactctcttccgctccagatcttctcgtcttctcctctccaaagctcaatccacaatctcaatctgcatcctcctcctcttcctcactctcttcctcttcactctctccaccttcgaaccttcctctggctttcccgccgtttcttcttctcgtcctcaccgtcgatttctcctcaaccgcgacatctccgcctcttctgaatctcgtcgtcgttataaccgattcgctctccaaggtatgggtactctgtttctcagaggaaccaagagcatgcacgatttgattgttgttcatatctcttccgatactacggaagacgatctccgtctcttcatgcgcttgatccaccgctccggtgtcacttccaaatccgacgtcgttttactcttcaattcgggtacgagattcactgaaatgatcgaagaagagaacgactcgttcttaaaactcgttgatgttcatcggaattcgaattcgtcgaatcaaatcgactccgtttggggatttaatctcacgaaattcatgaagaagcaatcgaaatcatcatcgtctgagccaatttgggggaaaaagacgcatcgagctaattacaacgatacgtcgtcgttgaataactcgaccgagtcaaccgagaagttgacacag

SEQ ID NO: 29990 - DNA, 2271 bp, Arabidopsis thaliana landsberg
ttgcttcgatgctcttagtgccaaactcatcgaacgagctgggtttccttactgtatcacctctggtaatgatttataaatccatcactgattaatttttgctaaaccaattcttcacaatttgtatctggttattgtgaatttgatcgtctactgttgttgattgtgttctccataaagttgaagactttacagttttttagcttcactgaatctgataaggagtatgttttgctatgattacttactcgaatctgtttatgcaaatagggttctcgatttcagcgtctcggcttggtttaccggataagggtctaatttcttatggagaaatggttgatcaaggtcaacaaattactcaatctgtatcaattccggtgattggagacggtggcaatggatacggtaatgccatgaatgttaagagaaccgtcaaaggatatattaaagctggctttgcaggaattatcatcaatgatgaagtttgttgtgaaaatactaagagtgagagaagagtggtttctagagaggaagcagtgatgcgtgttaaagctgcggttgatgcacgtagagagtgtgattcggacattgtaattgtagctcaaactgattcccgtgaagcgatatctctggaggaatcactcattagggcaagagcttttacagatgctggagctgatgttctctccgttgattctcttgtttctagagaagagatgaaagcattctgcaatgtctatccactagttcctaaattggtaacttcactttgcgccggaaactactctttctgtatcttgatatattccctggagatacgaagatacatttttgtggtctgtgtaggctaatatgcttgaaagcggaggaaaaattccaattctaaacccgctggagctagaagagattggatataagctagtggcgtatccaatttcattgattggagtatctattcaagcaatgcaggtcacaatctttctgtttctgccaataatgtgttgacttcactgtggtggcaaagagacttaagaactatgtggaacacttgcaggacgctctattggcaatcaagggtgggcgaattcctccaccaggaagcatggcgtctttagaagaaattggagagattcttggttttgacacttacgaggaagaagagaagcggtacgctacctcgtcatcagatagaggtgagacatggaagttttcagttgtaacatctttgggaaatgtcaaatcaataactaaatatatgttttatccttttcaagaagtgagcagcagtagcgtctatcgtaatcaacgggtggctaaagatgatccagaacagagagaggacctgattgttgaagtcataacacctgaggtttataatgaaccaagaaaccccttttcgcggatctggtcacgatctttgaggatcaaaatcatcggacgcgatgggtttgagaaactcgatgtcagaattccggtaagtccactttcgagggccatttttcgtgttttatctgagctgatgcaaaacttgtcttatggttggaacaggccggattcttggaaggtgtcacaaacattgttccaggtattcaaaaactcctaagtctctcttattctgtttcagttttcttaggcatagttattgacagatcctcaaaaaattcgcagctttaggaggcgtgaacttgaagcaattgatggacgatgcagcagatgaggtcggagggaaaattttgttagattttaaagacactgcaggtgacagaatccaagtctttctagaatgacacacacctagtgaagaaaaagtaaatacagccgggaaacatttaaaaagagaatacaaaaatgtaaagattttatttgttccgtgaatgagaaatgtattacacatcttcaaaataaagaaatagaagtgaatgtgtatatatcaaattatatgcatataacaaaaaaagggcagacccgagcaaggtttgccactctcacactggtacaaatttcacaacaagctctcaatttggtccaaaccagaaaaaaataaaaatgaatgatgagtgacgagtaaggcaagaacaaacagagaagaaaattcgtggagccgtgttgcctggatgaataatgtaacctgagtacttttatcgactgatattacatatcccagagtaaagaaaaagcacaggcgagcgtattcttgattacacgaatgaagtcaagtgcatcatgtttggcttgatcttaccggtatccaccaccataggattgttgagg

SEQ ID NO: 29991 - DNA, 2932 bp, Arabidopsis thaliana landsberg
tctttagtttttacccttttacacaatcaaactattattcatgaatgtcctaaactctcaggcttatgtgacgcaagaagatgtgttgctaggaactttgacagtgagagaatccatatcttactcggctcatctcaggctcccttcaaagcttaccagagaagagatcagtgacattgtggaagctacaatcactgacatgggtcttgaagaatgttcagacaggaccattggaaactggcatttgcgtggaataagcggaggagagaagaaacggcttagtattgccctcgaggtcttaacaaaaccaagtctcctctttctagacgaaccaactagtggactggacagtgcttcagctttcttcgtggttcagattcttagaaacatagcaagcagtggcaaaactgtggtttcttcgatccatcagccgagtggtgaggttttcgccctctttgatgacctgctacttctatctggaggagaaactgtttactttggcgaagcagaatctgcaacaaaggtaataagatagagcattggcaagagtatataaccattatgctcatttatgttgttgttgcttcgacattgcagttctttggtgaagcaggttttccttgtccaagcagacggaatccatcagaccacttccttcgctgtgtcaattccgatttcgataatgtcacagcggctttggttgaatctcggagaatcaacgtttgttttcctctgcccttcttgtttttccatcaacttacaatactctcaagcttttgacctcgaccttttacatctgcaggattcttctttctctcttcaccaactacatgaaactacaaacacattagatcctttggatgatataccaactgcagaaattagaacaacacttgtcagaaaattcaagtgttcactatatgcagcagcttcaagagcaagaattcaagaaatagcatcgatcgtaagttacggttactacttctcttaaaactacaatgtatcacataatgagagtctcataagcacagttataaacctcgtgcaacaggtggggattgtcacagaaaggaaaaaggggagccaaactaattggtggaaacaactcagaatacttactcagcgatctttcatcaacatgagtagagacttggggtactactggatgcggattgcagtctacatagtgttatccatttgtgtcgggtcaatcttcttcaacgtcgggagaaaccacacaaatgttatgagtactgcagcttgtggcggatttatggcaggctttatgacattcatgtcaataggaggtttccaatccttcattgaagaaatgaaggtaaagagctaaacagagaaaaattatctttcttcacctaaaaacttatcttatgttttagcatctttattcctgaaaacaggtgttttctcgcgaaaggctcaatggacactatggggttgcagtatacactgtgtctaatttactctcctcattacctttcataatccttatgtgcctctccaccagctcaatcactatctacatggtgaggttccaatccggaggttctcatttcttctacaactgtctcgaccttatctgcgcgattacaactgtggagagttgcatgatgatgatagcttcagtagtccctaacttcttgatgggagtcatgttgggagctggttacattgtaagagtggcctctgtctctctctttcacgtaaaagctttcttatatctccaaaaactattctaaattgaaaaccgctatatccttcatctcatagggaattatggtgttaagtgcggggtttttccgattcttccccgacttacctacggtgttctggcgctacccggtgtcctacataaactacggtgcatgggcactacaggtaaccggttttctcaactttaagatgcagactatatcgtcaagtagatatcttaaatgagcacacctgataaattgcagggagcatacaagaatgagatgattggggttgagtatgattctccgttacctttggtaccaaaaatgaaaggagaaatcattcttcaaactgttctaggcataaatccagaaagttcaaagtggttggatctagctgttgttatgatgattctcatcgggtataggattgccttcttcgccatactcaagttccgggaaaaggttttcccagttattcacatgttatacacaaagagaactctgagccatatccagaaaaggccttctttcagaagaatgacacctttcccttccaggcgataccctgtacaccatgctctctcttctcaggaaggacttaactctccactgcattagaagcatatacagcatgatgcaatttccatatatttcaatatgtcagatgtcactctcttcaaacttgataaactgtcccgttgtgtaaggaaaaaaaaagaaaagagagatactatcattctgactaatgagatttgtttagcatgaggatggtatccatcagagatacataaattgcacaaaaaaagataagcatggctacattatcagagtctaccaacgaaccacagtaaatatatcaaataaggcacttcatttgctaacatagcttcagaagaaactgtgttatggaaatcaaataaacagaagatggtatggagatttgttacctggctggcagtagaacactggtccttgcttgatagcaccagttagctgacgcaaatctataatctgtgcagcacaagaacagaacagaccaggcatattcgacatttatcactaagtgccatgaaatctcctcttttagcatatagttgacagggaatagaatcaaaactaacaaaagtaacctcccaaaggcgtttgttgaacagatagagaactaacaacgagaaacttcaaaccttaaaagtgtaaaaccaagcaaaagtggtaaa

SEQ ID NO: 29992 - DNA, 1265 bp, Arabidopsis thaliana landsberg
gatcccacactatatctgcccttgccgttgggccattatactatgaatccataaaatcaagagaaccccttcaaaattcatatagagattacgaattcccttaaattcatagcccataccccaaatagagaaagacaaaaaaaataacggattatacacaattccactgaccagttgaaaaaaagttagcaaccactttcggcaagatggatcattaatggacctatatattattctacttggtccagcttagatcggcctgataaaatgggattgcaagtacttgggatctaatgaagaagaaacatatatatcttcttatctaatgaagaagagacatcccaaaaatatagttctttgacagaaataattgactattgataaacaaaaagacaacaccaaataaaaaggccacaaaaaaaacactacttattagtaacacattatctctgtgtacataccaattttcaaacaaaacaaatattattcgctagttagtaacattcatagagcttaatatccatcttaactcggaaatacttatccccttgaaataaatcagtcacgaaggtagcgatcccacgagccatgaagaagtcacctgtcccaccaacgaccgatagatctcttgttggctccatcatcaaatcagcacccattatgttcaatgtccctttgtgttccgttgagttaaacaccaacgtgtaggaaaaccacgaattgaagtccatcttcatgtcatagaaatagaagccttgtgcgcgagccacgggttttgagagatagttcttgtccattgttatgggcccatcaaagatcacaaacttaccgaacttgaagtttcctagtcctggagggctcacgatggcggcggaggttgcgtttgctacattgtcgccatcgtagaggatgtcatggaaatagaacgagaagtgtttgcagggttttttctggtcgattgtttttcggaaagataagacggtatcggagaagagtaaaactaataagaagaatgagaagagggctttgaagagttgtttctctactagaaatgccatggttagctagagattagtgagttgtgagatgtgtttaatgaaggaggcttaaacccatttatatagaagtattattcacttgttttaataaataatttatttggataatcgttttcaaagtttgagggacatatctaatgggttgttgatgttttgccgatttatatttaagatataaattagaaagatcataaggtttaacgacct

SEQ ID NO: 29993 - DNA, 1009 bp, Arabidopsis thaliana landsberg
gcagagctcttcctactctcttcaacgtcactttgaatacaatcgaggttcagtttttttttttttttattgggttaactctgtcttgttcaatgttgttgagaagatctaaaaaagataaaacctaactttaccgctttttgtgtcttggcataaatttttaacctttttgggatttagtcttgtcgggtccaaattagatatctttaaaatgtcaaactttatgtgtgaatgtcaaaattgcatgtaactgttgatctctttaatttacttaagattcttgtggttctttgtaaaacagagtattcttggattattccacctgcttccatctaagaagaggaagattgagattcttaaagatataagtggcattatcaaaccatcaaggatgactttattacttggtccacctagttcagggaaaacaactttgttacaagctttagctgggaagcttgatgacactctccaggtttgttttgttgtctatcatatttatattatttatatgtatgtaagctcttggttgagttaacattttccggggtctgtgacagatgtctgggaggataacttactgcggtcatgagtttcgtgagtttgttcctcagaagacttgtgcttacattagtcagcatgaccttcactttggagaaatgactgtgcgagagtcattggacttttcgggacgatgtttaggtgttgggactcggtaccagcttttgactgagctctcaaggagggagagagaagctggaattaagcctgaccctgagattgatgcatttatgaaatccattgctatatctggccaagaaactagtttggttacagactatgtacttaaggtacatcttttttgcatgcttctgtcttattctaacaaacaatttttgaccttatccttggtttaatgccacttgacagttacttggtctggacatttgtgctgacacactttgtggagatgtgatgagacgaggtatttttggtggacagcggaaac

SEQ ID NO: 29994 - DNA, 2728 bp, Arabidopsis thaliana landsberg
actccactttctgtccttcaattacaacccaatttttaaatttagttgcatatttgaatacaaaaaaaagttatggttgttccacattattcagagtttatatacattgtttgtaatttgttaatgatacaggcaacatatatgatgatcttcttaattactttattagttaaactattaagatccttctacagatgcaaatattttaatatatacgttttttttgacaaaacatgaaacaaaattcatgagatcttatatattttaaaacattttagggtgtgattagctcagactaattggggtctaattgtttatctgtgtttacgtttagacaaataaaaaatggtggccataatatacttgatttcttctttagacactaatttttaattaattagactaccacattgctaataaattgcataagtactctatgtttctgacttaattggattgttatttgtgacagcataagatcaaccattgagaggtacaagaaagcttgttctgatagcaccaacactagcactgtccaagaaatcaatgccgcggtttcactttttgtctccatctctttacttcactaacatcacatacgtatgcatatatgttcttatagtttgatgatgcttgaaatacagtactatcaacaagaatctgctaagctgagacaacagatccaaacgattcaaaactccaacaggttttatatatatctgaactatattttaccatcttttccagccatatatatatgtaaatttattgattgtaacacatttttaataacgttttaggaatctgatgggagactctttgagttccttaagtgtcaaggaactaaaacaagttgagaatcgccttgagaaagctatctctaggatcaggtccaagaaggtatacatctaaaacatattacaagactcatcagtttcatgaatctatgtttatacaatacatattctaaatctactcttgtgaaaaacagcatgagttgcttctagttgaaatcgaaaacgcgcagaaaagggtaagcaaagctcaagttggttgctctaaattttaattgtgtgaatctttgaatatggtatagttaattttgcaggagattgagcttgacaatgagaacatctatctaagaactaaggtaatattagtgtgtgtgaagtccatagacatgtcgaatcaatcacttgttatactaattcttatgtttcttaacaggtagcagaagtggagaggtatcaacaacaccatcatcaaatggttagtggttcagagattaacgcaattgaagctttagcctcacgcaattactttgctcatagcattatgactgctggttctggatctggtaatggaggttcttactctgatcccgacaagaaaattcttcatctcggataatctcgtctgcgaaaaaccgagctgcaataactctctgcatgcatctggggattctttgctcagatttatctctacataaaatatgttttggtgcaaaataattcaaagtacaatgaaggtattggtccttcaagactcattgcaatttgtgttgtgtaatgattaagacatactctagtttttattgcttcgtatcatagtatctattctatggtatcttatttagtgattcatatgaccataacacatagcatttacatattacttaacaacagagaacataacatatgtttttgatgtattattagctcatagtacaatgaagtattagtataataatccttcaagactttggtttattgtttcatatcatacatacatagaacattttaagatatgatcaaagaacagtacatttcttgttgagttcggtgcgtaacgaagcagtttctttctcagctttgttgagttgttctcttagcctcctgatctcatcagaagatagtctctgaatttcattcatctttttctccgtttcctctctctcggcttgtgccttagctaattgctccttcacatcctccaatgattccttcagctgattagagatctaaccaaagaaaacaacaacttgtaatgatgacattattcatttatatacacgttacatataaaccaatgaatgaatttaatcaccttctcttttatcccctcaagcatttcgttatgcgatttctctagttcctttttcatttgagatatctcttgttttgaagaccagcctttcatttcttcaatctgcttctgcttttcctttatagtggcctcattctcctagaaccaaagagacgaaattttaactcagatatttaacactatacaaaatgtgaaatcttgttttgtaactttttgtcacccttagttcatgtgataagtcagccatataagattttccattgttcttctttgagatttgttcaacgaggttgagaagatcatggacttgtttgtctttcttgctcacgggggcattataactattgtcaaacaacactttacgatcatcacattcttcgagaatctcctatataaaaagaaatttttccaagttataaagatgtaatcatacaacatgtacctctcatggtgaaagattataaaacaaacctgaaactcaggacaatcttccaaataatcatctagagtttctccgcactcaagtgcatcttcattggtgaaaacaacgatgatatagtcaacaatttgacttccgaaaaggatctttaatgtgcgaagcgttgattgttcttcttctgtt

SEQ ID NO: 29995 - DNA, 2617 bp, Arabidopsis thaliana landsberg
aggcgaataaggggattctgaaaggatagtcaaaagtaatctgtgccaaatctgctgccaactcttgaaaattgatgttttttgctccaccaccttcgagcgcctgatcaaaaaccttggccaggacaggtaatataggagccagattgaccccatcagggatgaaaccgagtttaacaaaatcttttactatggcatcataatctcggtgaattaaatgtgcaatggcttcaatcattccgtacttctgatcatcagtcaacttggtaacaagacctgtcatcgaacagacatggataagatgtcaacaaagttttttctcatatcacatcgaatgcaactgtgctacccgaatctaatttttcactaataactggaactacaatcattaccaaaatcgaggatggctagtttcccgtctggggtacggatcatatttccaggatgagggtcagcatggaaaaacccagtatcgagcaactgaagcacaaaacagtaacagtgttaatgtctgcacatcatcttgtttctaaaacaagagaaagtgtgcgagcagaataactagaaaagaggacagagaaagtcaatacagactactgctggtcaacacattaaatcaatcaaggaagtgagtaaacctgaggcaaactacaatggtacaggtcccctgcctcaaaatcacattatactcactatatgactgagaatatttggttaggaacattgactagccatgctatataggataataggaacaaccaaagaattatatgtaccatcacttcaattggtaaagaattaactatctcagaaaaacttagcatagcatgcctagatctatgtcatttagcatgattgcagaaaaagctgaacaaagcggacgatttaatgaacgcaagtaagctaggaccacattaattatgctccgtaacaagcatgtaggaagagttacctgctttaggtaacaaataacaccaacattcacaagttcgccgacatcactctcaatactttgtgacagtttctcaccatcaatccatgaggttgtaagaaccttccttgacgtgtacttttggtaggttttaggtacaacaacctgaaacaataattgcatgattacgaaccattccacggatataaatccacataggtacttgtcaaatacaattttatgatcagacgcctcatatatagacaacgaactaaagggtccattagaaaagttatgaagcctacttgtggaagatctttcttcatcatttctgcaaaatatgttccattttctccctcgttaacataatccagctcctcaaaaaagcgagcagcccattcatcaaccagtccaacaacatctactgacacctgcacaaattcccatgaaaacaagaagatcgaaagtcattgaggtgaaagagaacaattacagaactgcataagctgagccgtcagacaaaaccttgcctgagggaacttccgcagaaatagacctaaattccgtatcacaaacaagtcaacagtcacagtctcgagaacgaaaggcctctgtacttttactgccactagatccccattttcctttagtcttcccttataaacttgtcccagggatgctgaaaaaccagaataacaatgaatcatttgacataaaactctattgaaatgataaggtgtgcatgttcattgatggtctgagatttaccagcagcgattggggaaggagagagctcggaataaacgtcgtaccatggcttcccaagctcctcctcaattagagccattgctacatcatcaggatatgaagggaccttcacataaacaaaaaaacagacaagtttagcaatcaaaattatttgggaatgaatgaagggaaagatataattgcagcatcataccttatcacacaacttttgtagctctgtcattgcagcgggtgacaatatatctggtcgaatactcaaagcttgcccaagtttaatgtatgctggacccaaggaagttacaatttccctcaattcaattgccctagcaacctcattctgaaaatgatgacagacggaaaatgagactcaaactgcatataaaataattgcaagcaaaagagaattgaaacgtgaacaaagatatacacacctaaattgaataaaatactacaactgtgtactacatcgttttcaaagatttaaaccaacatctattgctcaaatgcactggggattaaacaaagttatgttgatcataggctctgcaaaaaaattcacatcatgggctccatgcttggaacaaggaagaaactgaaagataggaaatgaaaattgtctactgtttatccactcaatcctagctaaaggagtttacatatatcaccaatcttcaagtcacaactatcttttctactcttagctagaagagcagtaaacaaaatattacctctttaactttcttgtttattacatcccctgcaatacgcgatagaaaccctccagcaaccgaaagcaactggataactcgagaagcaacagcacgaggccgtttcccccaataggcagaaatggtctccggatcatataccaaaggtaagaactcactgctttcaccagtctacaaatcccaacaaaga

SEQ ID NO: 29996 - DNA, 3300 bp, Arabidopsis thaliana landsberg
attcatccggtttatgatttgaattttcaagattggattagaccaaaccaaaagcaaactaattatagttagagtggaaagtgaactgaattcgaaacgaaagtgtgcgtgtgagaagaagaagtaacaatggagaaattgaaatcactgattcctgaagatcttcttcaaacggtgaaaagcagcagcgtcgatgatcttctttccacttcttcttcgcttctccgtttgtttctgggtcttccccaatttcaccaagtacgtacaaattacccaaaacctactcttctcttatctgcgctactatcttcaattgaacttctcatcgctctccttttccttggttttgctttctcaggcggtgagtgagttagcgaatcctgaattgggatgctgtgggaagaacgaggagacatctttggatttgaaacgtagaggaaatcactgtttccgtagccgagattttgacgaagctttgcgattatactccaaggctttacgtgttgctcctctagatgctattgacggagataagagcttacttgcttctctgtttctgaatagagctaatgtccttcatgtacctctctttcttccttttaatcagtttcatcattgaatcaatttctaagctttttttctctttatagcttctcatgtatgttttgtatcttgtcttagaatcttggtcttctcaaagagagtttgcgggactgccatcgtgctcttcggattgatccttattatgcaaaggtaatgaatgcttactcaattgggatccttaagagtttttcagctcttaattcattgaaccttgtgtcaggcgtggtataggagaggcaaacttaatactcttcttggaaactataaagatgcatttcgtgacattacagtttctatgtcgcttgagtcatcacttgtggggaagaagcagctacaaaatgagcttaaggctatacctgactaccaaaataaccaaacattggaacacgatgaatatcgtccaagcaatgatgctggcgtgggtgagattttccacccaacactattgtcttcaggataatatttaggctttgaagtcttatatgctgaggtttagagaggatttttatattttgacatgtctctattaatggtctgtagatcatctgccgagtgtgcaaatggaagtaaagctgcgttgtgtgtcgacaaaagagaaaggaaggggtatggtatcagaatgtgatatcgaagaagcttctgtgatacatgttgaagaaccttttagtgtggtatgagctgtgatacaatgtttttttttatatacaatgaagtggaagctagtcaaatctagatggttctagcgttttaaaagttttctgaaacaaatgaagatataaattggttcatgctttaacacaatttttcttttgttactgaacatctttttaatgctgatgccacttattactacaggtcatatcaaaaagttgtcgggaaacacattgccatttttgcctgaatgagttgcctgctgatactgtcccatgtccatcatgctcaatacctgtgtactgctcagagtcctgccaaatccaatcaggtggaatgctgtctacaaatgagatggataagcatcacatttttcaaaaactacctgatgatattgttgagcatataaaaggcgttacatcagctgatatttattattttgcgactgatctcattcaagaacaccagcatgagtgtaggggagccaattggcctgctgtactgccatatgatgctgttttagctggtcgaattataatgaagttaataaatcaagggaaagcagctactgatctttctaaccttcaggagatattagtatgtcattttactggaaaattattccatcttctgcaacagtcacatgaaatctaataaggattgactaccctatatcttttcaacaggaactttcccatacctactctaaaatgaatccagagaacaagttggagctgcatctactttccatagtattgatttggtgccttagtaaatctagctgccctgatctttcggtttgtgaagcttctgtgacgcaggttttcctctacatctccctccctgcaccagccaatagttcattgaagtcaactttgctttctagaacttgtgcatcttctgacatattaactttaatggatgctgacgactttagtcttacaagttatactttcttttataaaagataaaggatgtcttgctgatgatcttttgtcattgaaatctagtttaccacttatcgtcgagatataaagttaatttcaaattggtttttcatctttagagtaaatctatcctcattgccaaaaacgtttactgcctgcaaaaatgtgcatataattcacttgatgagttcctgttatcataaatttatagagaagtatagctgtctacatgattcatatgcaactttatgttttggcattgttatttcgttttttcctaatttttcttattgaggtgttgaccactgtctggatttttcttttctgtgtagactatcatactgctgtcacaaatcaaggtgaactctatagctgttgcccgtatgaaatccagcggcgattctttcaagtgcctcccatctggaaacatctcaacaaaagagccaattcagagtttagagcaggtttgtctaggcagaggtactgcttattagaatgttatttatacctcttctcaatgaaagaaatcatagatatctgtaaagatggaatctagagttacagaaatgatatctgtaacctgattttttatgtttccgttatattttgagctgctcttctataaaattatgtgagcgtccactatgacatactttggtcctttctcagttgttccttttttcttatgtctattattgttgttttattcacagataagagttggccaggctctttataaaactggtagtttgttcaatcattcctgcaaaccaaacatccatttgtatttcctttcccgtggactgattatgcaaactacagagtttgttcccacgggttgtccccttgagctgtcatatggtcctgaggtattcttgtgatcctcttgtctcgatttgttacttctggtctgtatcatacatcttctgagtgttttgaagttcacaccttctaaatgtcaatatgctttacaacatacaggttgggaaatgggactgcaaaaatcgcattagatttcttgaagaggagtactttttccattgacggtgccgtggctgtgctcaaattaacatatcagaccttgtcatcaatgggtatg

SEQ ID NO: 29997 - DNA, 3106 bp, Arabidopsis thaliana landsberg
  unsure (1)..(3106): unsure at all n locations
aaaccaagtttaacacttcaataatcatgtcataaccagagacgagtaagtgttgcaacaactggatttttatcggttttcttggtgaatgaatagcctttgctgctaacataggttcttgggtttggttccatgtaattcctcaagtattccttgtgcccctgtcccaaaatcatctcaaacaatcagtttcaaatcgaagatataggtaatccatagtactggttttgtagcgaatcactttggtttagcttaatatctgtcagtcatgaagcaaacgaatttctagatacttcagttatctattaaaagcagaggaagatggagtatgaccaaccttagtgatcacacagatatccacattgctaccactaccaaggtcgttgaatataccagagcatatggcttcagcaaccaacttgattccttcgtctctctggaagatttgagtcaaccatcaaacaaacagccaagaagagatctaaaacataaagataaatgtctctgctttacttacagttagaccttctttatactttgcttcaaacactgacatggaagcaagggaaccagaacccattgtagcaaatggtagagtgtcagtggaaccgtgtgggtatatctgcattttgaccagaacgttagagatggaatacaaaatgaaagaacctggaaagagctttctacagctgagaattttgatcaggaatgtgaaactcaccgtgtgaagatgaggcccggtaatatcaactccaccaagcacaagagcagctgagacatggccttggtagctgaatgatacttgagaagttaaattatgtatgcctattagtaaagataacaattttctgagcatggtgaagcaaaaatacctgaaaagatgttttttgagaagggtcaatgcagtaacgactcgagaatnnnnnnnnnnnnnnnnnnnnnnnnnnnnnnnnnnnnnnntgaccatatctgaacagtgaaatagcaatcaaaataacttaagcattgggttttgatcgagttaacagaagttccgagaaattcaactttgatctagggtagcagtaaagaaatttggaagttaagaaaattaccagttactgcttcagtgtcagcagcggttcctgcaccacaacagtaaatgtttggtgccatgtagtgaatcttctcacagttcttatcagccacaataggcccttcagttgcccgtgtatcagccccaagtattacaccatcctatacaaaacagataaatgaaatcagcaatcatctaaaagagaatgtcacatcataatcacatgtttcataaaatgttgtagaatatagaggtaaatagaccataaaaacatcaacgtgatgtcatatggtcaagggttgagaaagcaacaacacctcagactttcatgttatcttatctaaagctatcaggtgcccaattcactgataagcagccatccacaaacacaagttcaatcacatttgcatcttagcccacaattcttaaatcttaggtcactatgttcacttccatagttccataacttgcaaacaaccaaaatagagcactcactatccaacaataacactatgctaaccattcaaaagctataaaagaaaacccaaaacccattacattgtagagaatgtgagatagaaacaaagaccttaaatatcaatccaacgatagtcgttccagtcttgagaaacgacggcgctttaagacccttctgtgtcagcatatcattccttttgcacagatcgaagctaaacccaccttttggcggtatatcgacggaagactgcgacattttccgattcaccactctacaaaatgaggaaaaatcaaatcatcacccaaacaaaaaaaaacgagtaacgaagtgaaatttgaatcttgagaagcaaaattcgagaaccaaagctagctagctgatgatacgaaaccagaagaacagagtgtagaaactaataacacatactaacaacagattttttgaaaactcctgaaataaaatcaactcaaaaagttgggatcgagatcgctcaaggataggtaaaatcgtgttcgaatcaccaaaatcgagaagatagaatccagggagacgacagtatgaagaataaaagtgaaaaatctaagcttatagaagagtgatgttacctttacttgaaggttttgctgagaggaaggaagctcgaatcggagaagaagaagaaagcaagcaactttagcagagagttttcttcttcctcaattaaactatttttgaggctctattataaatgggcctatctttactttaatgggctgaacttctgtcaaaatgagcccatttgttaactccctaatgattatgtgacttctaattgtgtgtgtgtttttcttgacatcatcacttctaattgtgtgtttgcatttgcaaggtctggatttgtttgttttttattcagttttgagatcaatttgattttacgaacaaataacattgacagaaatataaaataaaatgtaattaatactatattgataatatagatataattaaatcttaaactttagattttattttaccatccgttattaacacatcgataacactaacataaactactttaaataaccccaaatctcacaatttcaatacttaattcccaatatttttaatctataagtaggggtgatccaatacttatatatttttcatatagtaatataaaatggattatggaacttgaaacatagtatgcaaaggtaacatggttacaaaaacgaaagcagcaataatcgttcaaaaaaaaaaactgataattcttttatttcagataacaatttcaaagaaaaaaacaacaacaacaacaacatgaaaagtttgcaggagcaacaacaacataaataaagaaaaagcaacaaaaagaagaaaaacagacacaagtaaagagaatttgaagaatcccaacttcttcgaattagatgcaattgagagctgccttattcgcctttttcgaaatcaaagcactttgcatcgccaaatgcatctcaatctgcatcctctccacttctctttgagcctctaacatngcagctaactccgaattatcgagtttttac

SEQ ID NO: 29998 - DNA, 2314 bp, Arabidopsis thaliana landsberg
tatcaatgacatctgaaaaacatacatcaaaatgattattagcacgtaccgttcacattactattgaattaaagaataagaagaatgaatacgaacctattgccaagaagtgcatgaagcttgaggatgagatcgtcttcatcttttgagaagttgcgttgtttaacttctggccttacgtagtttcgacctctcaatcgacatctcttacggtgttgcatacctaagagaagggatcaaaatttaacaaattaaaacgatatatcgtcacaaagtcacgtatgtacacatgtatatctatgagttctacatcgacctctttaaactatgaataatttggtgatgtgaatagcaaaacacatgattaatactgtttaaagagaaaatagttaccggaaggtggggagagagcacgaaggcgggttttgttcatgtctttttcaaagtgagattggttgagttatgtctttttttaaaactgttgatagattgtgaggtggtttgcgagaagaaactgatatataggattaggggatggcttgaggaggtttgacttggactggtgggttgagagaagcgtgcatgctcaatcaaactattaatgaacgaggaagaacaagaagaatacatcaaccttgttaattggtcccacatttaggagttgaaacaaataaaaattggtcccatatttgttcaaatccattagaatttgtggaatcatgaatgtggaagtgtgtcgcatttaatttgccttaccaataccaatccaaatctcgctcttatccacattttcgtaaaatatatgtatggctccgatagataccttttgtgaaatatcaaagatgtgtgtgtggtatcaataatagattcactaaaatatatattaagcaagaagaagacgaagaagatatttgactagtggctcaaaattatttggatgcattatttgataaaatatctgaagcttccgaatatgacatgaaaataaacaaattaagagaaaataggaaaccatgaaattaaagagtgtaggttcaggaacagataagggagaaacatgggagcattcaattgaatttgactggtggttaggactttgtatacgaggaattttctaatttcactcaccacttccctatctcacttaccatctactccaaaatcatataagaagcaaaagagttttgttattgggcccgttaaagcccgtaactgttaaaagcccattaacaaggtgcttctaatctccgaggccaagtgaaaaacaatgatagagatataacatcaatccaatcgaattatcttttaacactttctgtataagatatttatgtaatctgaaatctcaatctatatcaactcttttgtattctgcactcgtaattgtaaattgttttcgttttagaattataggaccattgcaaagggcctcatcatcatattgtcttcatggtccaatatctgcatgtaatttcaatcatatagttagttctaaaagaaaaagctaaattcgtcatcaactttttagtattttaccaacttacgtgacagtggtaaacatagcctggctcttgagttgcgtcaaaggagtaagattcgtttgagtgaatgtaagaaaatctgacgagtatcttcgttacatgtcccggcatcatcttgaatacgtttttccatccccgctcgtgtaccgtaaccgcggtcttgttccctcgtgcgtatttgctaatctcacacttgacggcatcgtttcttttagtcatgcactctatgaactcctcactcttcaccaatgccgtttgctccaatactttaaacaatcccaagtgaatgtgcaacggatggttatcctcggttaagtttatcacttcccacaccttcattattgaaagaattaaaaaattgaactatacggttagtgaatagtgaaattttggttataaatacctcgcttgtgccgatttttggagtttcggttacgggagcgttgtaaggcagaccgttgatgtatagatgtgttggctcgtcaatgctcgacacatactggaacatagcaatgtaacgcgtacgtgtggaggtagatacatgagcaggagggtattgaattagcttatacagaataatggacgcgtccccttctgctcagtggttgattctaaacttcctgactatgctggtctcgtccacgacgggatctcccgaccagcaagggcaaggtgcattggtggcaagaatagacggacctgatgaggactttgcaaagacaaccacgacgactaccatcttcgacggagctaggcgaccagatttggtccat

SEQ ID NO: 29999 - DNA, 2015 bp, Arabidopsis thaliana landsberg
ctgagtctaacaaggtatatttgtcttaggttcatgatttgctcctgctatctactctgttccattatctttttcccctgctgtttgcctaactgaatgtctctctcactctgcttgttataggtattgccctatgatacactaatggtcgagttagatgtttccaatgttcgcgaactcgaggactttcttatcaatgaatgcatgtatgcggtgagtactctttagcagtcttctaatctctatttgacaactaactgtgacaacgcatggtgctcattttttttcttttacactttgcagggtatagttaggggaaaactggatcagttaaaaagatgttttgaggtgtgttttggtttgggcctccttttcctattttaaccattgtgctttgtttctaaacgtacgagcccccccttctaaacatcatatatctcttgcaaccatgcaggttccgtttgcagctggtagggatctaaggccaggtcaactagggaatatgttacacacattgtccaactggtagttttcttcttcccttagatccaggattttttgccttctatatctaattataagaacttgtacgtgatgttagaatacatggctaatgacgtcctactcttttatgtgttggcccaaattgatgtctaggttgaacacgtcagagaatctgctcatttcaattcaagacaagatcaaatgggcggacaatatgagtgagatggacaaaaaacatcgtaaggaagcagaagaaggggtggaagaagtgaagaagtctctgtccatgaaggtcagtcgcgcttggagtcctattggcttcacttttccctactaagtatattatgtaactaatattggttacattctttcttggttactgtcttgtgaccatgagttagagtccagtcagctattctgtcttatatttcttcagagaattgtagtgggtttcttcttattaatagcttaggtctatgtaagcggggatgggagagacttgataaaaaaatctttctaggtctttgagctttccaagtccagtcctatcatagattaaaaagttatgtttcttaataacaaacgaatcgatcagccaactgtggcgggcttttttaaccgttctttcgtggaacaagaaatcttacatgttggatgtaaacatttattatgaagttttctttaattaaaaacaaacaaggaacgcaatcacaacggctgttagtgaagtgttaaagtcattagaggacatgaattgtttggaatggtagtacttggttattgtctgattgttaaatgaaatgaaacaaggttcgtttggttttttgtgtctgaaatatgattgggaagggtggtggtcgatatagtcttacttacgttgtgggcagggggatgttgacatcagagggaataaggagatgtttggggaaccaagtggagtgatggactacgaagaagatgggatccgaccaaagaggtaacgaatattagatatgagtgagatgataagtacaaaggagatgatataacatacacacattcaactttggaacgcaggaggaggcatcctgtaacaaggtagaggagcaagagagagcaaatggtcagtgcggattgacattccatttaccgagagtagattatgattatttggttgcggattttcaacttgtataagatcctctgttctctctcacaataaccccttgttatgtttgatttccctcattagcaaatttggtgtctctctgcccattaaaagaaaaatggctttgaatttagtattcagtaatcaatagtcttgacacttgagcaaagctaggcgcttggatcataaggaatgatacagatattctcagtgttccgtcttttgaccactagccagcgccttggcccctcacatgttgaaacctgcttagtctgcgacagctgcctcttaggcgggcatcaaagtgttgtttattacgtcataaactagatcacaccatcggaattctgaccgaaccatgttc

SEQ ID NO: 30000 - DNA, 1587 bp, Arabidopsis thaliana landsberg
  unsure (1)..(1587): unsure at all n locations
gtctacttgagtataaatcaggaacaaggtcttgacatgatcttctaagggttagatgctttgaagaacatggcttgtgatatgaacgaggtgagtttgtttaagtaaagttgttaacacacttcccttattcggtacttgagctgatgatgatccatgtcacgactcttacaggaactggatagacaagttccactgatggatgaaatcgacacaaaggtagaagacaccacccaaactccatttcctttctctgtgttggttagttgtaatctgaactttctgaacttgctcacaggtggacagagcaacctccgatcttaagaacaccaatgttagacttaaagataccgtgaaccaggtaatttaagtttggaatctatttcttggactctcagccacataggtctgttcttgatacctaatataaaagcattgtcttttgtttacagctgagatctagccggaacttctgtatcgatattgttttgttgtgtattgttctgggtatcgctgcatacttatacaagtaagtttctctcatacgtttcgattatagttattcactctgaaaaaacttgtttaacgagacaaacatttgttctctgtgcagtgtactgaagtaatgagatgaaccctacgaaaggacccattagtacttatcacccgagtcaatatccagtgtgtgcttgtgtcttactcttcttctctgatatttctacgagagtttcttcttaatgtcaagaatattcaagtcttatcttcctgcatcgacttttctccatgttgttcgtgtgcatagattcatctgtcaaaatgtgcgtcaaactaattgattgctgtgtctgcggcagtgtgctattattttccagccaaaatatgattttttatttattttaaaatcaagccaaattttaatttcaaagatcagtgacagatcctgagcaaacagaattaacaatcaagacactgaaattaaaatctcatcataatgtcctcgaaatatatctacagccacagggaagaaaaagaagaagcaacgatggccacttggcgatcctcgtcctggaacccgaattaccagattagatgaccaatctgttgtcacatctctaaatagtttgattcgatctctcctagcttcaccagagctttcgatctctcctagcttccatataatgatattttgtctctctgcaatggataggctcaggatcccaaacttgtgtttttatgtccaacttgaacacctcgacagatttcgtcatggagttcctatctggggaatttcctgctacatcaatctttccataaaggacgccagcagaannnnnnnnnnnnnnnnnnnnnnnnnnnnnnnnnnnnnnnnnnnnntgagaccggcaatccagaatcgagacgctcgaggagcaagctcttaacttgaacctatcttggcttaccccattgttgtagatatcagagccaaccgcacgagactcgaaaatcgtacattaggagaatgcgggattgggactctagccaaagcataaccactctccttaccggttatggttttatcaggtttccggcagagggtgaaccagt

SEQ ID NO: 30001 - DNA, 2593 bp, Arabidopsis thaliana landsberg
  unsure (1)..(2593): unsure at all n locations
tgcgcaaaaaagtgtgggaaaaagcattctacggatcattcagatatttaagttccagtaggggtagatcggtggtagcatacccgttcgtggataatagcaatcgcagatccgataagggtatttacgaaattgtaaattagcaattgcagatcgaatggagacatgcgaataaagtgcggtacggtttcatctccattctaaggatatcaaatattactatcggaagaatacattaaaaatgtgggaaacagtaggatacagatcattcggatattagcaattactatcggtggtagcataccggttcgtggataatagcaattgcagatcgggtaagggtatttaggagattgtaaattagcaattgcggatcgaatggagacatgcggttcacctgcggataaagtgcggtgcggttccgtctccattctgaggatatcgaatattactatcggaagaatacgtaaaaaatgtgggaaacagtaggatacagatcattcggatatttaagttccaatacggtagatcggtgaaattggcctgaaatgcatatacaggcctatatcatcaacatcaacaaaggatattctgaccaaggtttacgaaaaatatacataacttatcatgaatttgactacattacttaccatgaatttgattttatatatcctaaactataacaacttcaacatagagttaggtattttcacggtctacttagagtttccaatagatcttgaatctgtgaaacacaccagtgaccaaaccccagaagagaannnnnnnnnnnnnnnnnnnnnnnnnnnnnccaactcttcttgaatgccaaactcggataaaaacatgctcccgaatccaatttatctaaagcaggtatcatgatactgtcagtatgataagccattcaggcctatttaagatttcagagtaagtaactgattttttaccagtgtattgtgcgggtggcgatagtaccaaccattgaagaaagcagccaaaatgccttcagctcccatcacgtagaccaacattgcgttcatgcctatccattttagaggcagaaacatgtgtttccactccaatatatcgacctgcaaacactcgaaataataagcaacaaatttgtccaaagtttgtcatacgtcttggttgttgtcaatgtcaatgtggtggcttaagaatcaccagagaatacaacgaagagaagacgagcgctgctgcaccggaggtcacgcatatgtagctgaaactgtagagttgtttgttcagaggcatcactgcaaaacatttttgagtttgtaatatatggtaagagaagagagactgttttgagttggaccaaaaagcaaggtgtttctcacagtgggtgaaatgcagagtaagtccgagagcgaggagaacaagaccggtggagatccaatgttttagccgcgctgaatgtccctgcaaaaatatggtaatgatgagattgaaaggacaaaacggtgatagtttgtaggagcttgaagcttatgttttattcagtttgttgaccttcaagtgtaaaataatatgtccaaaatggactccgatgattgtagaaagaatagcagatatggagctgcataacacaagtttgtgagtgttatcaacttgaagataatgctaatgctcagttagtgattagggtgacaagattagaccttaacattccttcaggctcaaacggagcacggctccataaaggtgcatcttggtgtatagctccctcatagggggaatcatcggtgcaagcgtaaatctcaaaagaacacattatgattgagtccattgacatgaaaaatatatctttaatctatcaacccttccttttatcttctatgacataaaactcaaaaaggcataaggattgacataagccatttggcagtcagaaattgccaacatggtcatttcagcggcaagcacaaccggaaattacgtcttgtaccttggatcgtctccacgcagaatggtgatacatatgattgatccctaaaacttgtctgtcaacatatccaacagcattgcaagtagggttcagctttcctctcactccacatgatacctaggaagaattcagagaatttttcattgaagtgtacacaacacttacttagtaatggtctcataacattaaaacatcgaaagactcaccgataggattttcccgtacagaacgctatctttatcatagacaacaaattcccagtcaggaacgtacgttccatagagtgtagccagataaatcacgagaactgatgcggccacaatcctgtgaatgtactaaaaacaagatcaatccgaaaatatctatctagttttcatgaaatttcagttctgaccaactaactcaaatgtcatgttttaccaatgccaataatatgacttgaatattgaaaacctcccagttgacagattctcctcatgtgagtcctttgtgaagatctcgaccaatgctactaccaaataggataaagctattctctacattgaaaacagatgacaaacatgaaccttcactaggtaacactagaggacataagtacattaaagattaatctttgagact

SEQ ID NO: 30002 - DNA, 2240 bp, Arabidopsis thaliana landsberg
agttttggaacctctcgtgagatcaaggggattcttggtttatatcccaatctggttgggtaaacagtgaggttaagcgttttggttggtccgtgataatccaagaagacttggattggctcgccgctcaccagttggaattcctctttctgactatcgttgttgttgaagtaagccactggttcttggacatctgaagagagactgttgaaatttagaccgatgtggttgcctattcgatttgttccgtctttgaatccttgtaccgtatcgaactccacagcgaaaacgtgattgctcgaattcccgtcgtttctttcgttgagaagccccatgtactgctcgggatccgcatctgtacggtttggggttggagagagtgtgaatgtgaagccgaaacctccgttgcttgttgagcttgaagggattatgaagatgaaagaagtgctaaaggaacgaaccgtcgtattggtggagttactgtcgagcaatctcaccggtttatggtagaaagcggtaccaacaacgtccgagtttcgatcggtgagcctcaaaagtccgttggatgtgatggttgaatctccttgcatatgaatttctgattggtttcctttgaaaccgtggaaaatgaactctgttgtcgtctctgttgttgctacatgagctctaacaaggaagagcaccaacaagagagagaccatggattttgctctgcccataagtgatcgatagggataagagggataaccaaaaacaaaattgaggtaggaaagtgaaacaaaaacagaaataacggctttgggagatgacaacagaagatgattcttagaaggagaagtgagtttggtttctcttacagattgtcgatgatcgagatgaagaagcaaagaagacagagagagaaaaaaaatgtcaacaacttcctaacttgcaggtttttgataaatagtaaaatgatacattgtaggatgctctataattaagggaaagtatcttttattgttataaagtccaaatggaagtagcatagatagggctgactttgacgaagtccaaattaacttggaatttcctgatactttacacattgagtgtgaaagaaaggagacgagatattaaataagtcatttggactgaggacattgtgcgaattcaactatcaaagatcaaataagatctttggagaggggaataagtgagtcacaatgcttatagtaacatagtaacatgagtgcagtaagttttcgaatttcaacgcgctttattttcatagtttagtttgtttgactgtcttttatataatcccccacatgcaatatgtttgtttgactgtcatttatataatccctcacatgcaatatgttagttaatgatctaagcattgctcgtgagatcaaaacgagttcatcgactcgattagtaagagaaaaagtcgttgtggatttgacttggtagaagtacatgtagcatactagcatttgttcgtatgttgatttattttattacagtacaacgccttagcattaaagcatacaagatcacgtcacgtgagatggcgtaactaggggatgccagataaatataatgtctgaatgtcaggtcagcttcatttaattggttatgggcttttttctaaatcattcattcacgaggtgaaataagcccaatgggctgatcccacgtttgaaatagtttatactttctcaaattaaatcggtccgttaaagttaaaccaaatctagataatttttccctctgattttgaatttttctgacggtttggggatattagcgcagaattggagctaggttagtggattgttcattgtccggtgtcggagatgagagatcagtcgaggaatttcgaaatggtaatttcatggggagatgaattgatccatgttttggatgataggaaaggatttgacgtgttggtacaaactctcgagcaactgagagctattccattctcctgcgacgaagattttaaagagatacatgaatctctccaaggttgaatgccttcttaaattgggttgatgtgtgtttgattaagtggtgaatttaattttgttgcgccaaatttgcagaagaaactcgatgtttgcaaggagaagacagatgaggcaaattcagagattgcggatgaagaagaaattgagcgtcttcataaagagctcgatgaagagctagaactagagtgcaagctgaaggaggagcttagatacgtatttcactga

SEQ ID NO: 30003 - DNA, 656 bp, Arabidopsis thaliana landsberg
tattcttagacaaacattgatatagctttttttttattttatcaacgacaaagatatagctatctatatttattagtataagatttgtcatagttggcattatcaaagaaagcaagcatcatacggaattgtattatccggccgtaatgaaaactttgaatatagaaacattttaattaatagatgaagttttaccggcccgtaatgaaaaccttgaagtttgaatatagaaacatatgaataataaaagtcttaagtcaatacaagcttgacacacgttatttgtctgcagccaaccctcggcaacaaactatatatacacaatcgaaggtagctaaacgtaacgattttgcataagatggatacttggatagtaattatcattgctattgcttcttttgttggtgttttgatatttcttgcggccttgactggagccgggggcaaaggtgggggtggtggtgacggcggaggaggaggaggaggcggagaaggaggtgatggtggaggaggagaggatggcggaggtgaagatgtggaaataggtgatggagcaaatgggggtggctttggcggtgatggaggtggtgttggcggtgatggaggcggtgggggtcatggagggttttggtccttttggagtggtggagggggag

SEQ ID NO: 30004 - DNA, 1371 bp, Arabidopsis thaliana landsberg
  unsure (1)..(1371): unsure at all n locations
aattccagaaaccccagcccactcttgagcctgtacatagtagaaatttcttaggtttcctagagatttaagattctccattggggactaagttatgtagaagagaagagcatacagtgtaataggcgaaatagctcgctgaaagtgttacagtgatctgagccaccgtgtcattgaatatgaatttaagccaaaaaactgatgcaattccaaaagctagaccaatgcctacactaaaaaaccagaacaacataagcggagaaaagaagacagcgacatacaatactactaacaaaggaaaataatccatacgctccgaatgagttttggacaagaaatttgattatggaaccccaatcagagttatgccccatcaccatcttgaagaataattgaaaaaccacaaccgataccctgaataatccaaacaactaagcttgatcatatatgacataacatcaccttgatgctaaacataagagtttgacatggttacccatcgttcatgagagattccccatcaattaacgtggtcatcttcttactagcaccaagctcctttagcaaagcaacaacagccacagggtcggtagctcctaaaagtcctccaagcaacaatgatgttttccagtcccagttatatggaaaagtaagctacaagagcataactcgaaaaaattgttaagttaattgaagctcacttaatcacagtcgaaaatgttgaagctagttaaagtacctttataagagctccgagacaaaaggtggaaatcagaactccaggtccagcaagcagaaccatttgtcccatacatctctaccaatgatgtaaaacaatcaataccaggaaccaacacagccaaggaagtagctcaatcaggaaannnnnnnnnnnnnnnnnnngcacatccatggagaatgagctctcgaaaagaagaacagggagaaaaacagccaaaagtaggtcagggttgataccattccctgtaaagttgccattttttagagctcgtaatctaacagtatggagaagagaaaatacagtagcttacagatacgaattccatggnnnnnnnnnnnnnnnnnnnnnntagttccatattctacagaagcaaaaaaatccaaaatttaactactttctaaaatcttccacgaaattgaaactgagctataaagcttaatgagcaaacaaataagacctagggatccgagaaaaatgccgatgacgagaagaacgacggtgtacggaactctagtgccgttaaacaaatatctacaagcggtgccgagaaccagcgaagttcccgcgaaaataacagcatcaacaggactcgaatcgttctcagctgaatacgaagaagatgcaattgc

SEQ ID NO: 30005 - DNA, 1868 bp, Arabidopsis thaliana landsberg
  unsure (1)..(1868): unsure at all n locations
ttattgcacggtcccagttatacacttgctacaaaacagggaaaagacacataaaaaattagttggacttacagcaactaaaaagctttacacaacaaaacatgacaatttagttgcacttacagcaaaggtttcataccagcgatcaatcactggtaagggtgtctgtgtccaattagcatgaggttccttgaaatctctttcaaagatgttccagacaatggatgcaactgcagggtcatcgtcaaacctacaaacacaaggctccatcagccagacaaaagtgaactgagactagtcctaaatattcttaaggtgatagacaaaattggcttaccagagagttgcggaggacggttagtgtaatnnnnnnnnnnnnnnnnnnnnnnnnnnnnnnnnnnngcgaacgtagaattgcgatcgtaacttaggaaaattttcgataagaaaatttagacggagttgtgggtaaatcaaacattacccgaatgatcattgatcaaagaaaggttacataaggaactcaagatcagtttagaagagagtagagattttatcggctaatgctacatatcaagaagattaggatcgactattatctgcaaaggcagttaaggctatcacagaagttattaggactatcaagattcttgtcaatagacctttttgggcaatttggttgatggaaagatcaatttgccgaggaaaaataaaggaattgcaggagactagttttatcggagaaaactagttttatcgagatataataattttaggccgagacaagcaagcggtgatcgaatgagattggatgcggacacaacaaggtttagtggagtatttaaatgacttagtcatttatttttagcggaataggtaatgatcattgcactacaagaaatatgggtattgatagcacatgacgatatcacattttccgtaactactattaaaaatgatactcggaatttgataactatattatagcatttgagaaacgctaagcctaaaaatagcaacatggaaagctaaagtactatttgactgccaatgtttagtgaaaattttacgaaaaccgccaatacttaaccaaaaatcaattttgcactaaacgtccgctacttatcaaaaatagaaaaccaaaaagaaattgtatcaccaaacaaaaacccttcatctttctccctttctctccgtcgcatcccaacttttccagagaaccagatatggattctcctcaacgtcttcttcgtcatgccgtctctcctccttcgtcgtcacatcttcttcttctttagatcctctcattcttctactttgtcttttccttttctcgtttcctttgtttttttctatctctctctatagcttcctccatcacttttacttctcattaccctaattttgcaaggtatatcaattgcaattgaaaaggtgctcataatctctaattaaccccttcgttctcagttcttcaatcttcaattttataaagccctaatttttaacctttctgctttttggaaattggatttgtttaggttttnnnnnnnnnnnnnnnnnnnnnagaggggtgacaagaagaataggttagtgccatgtcacattcatcttgcggtgaggaacgatgaggagccgagcaagttgcaaaggtttgattttagcctaattttgttaagtggaaattcaaagctttttggagatttgtgttctagctcatgaagaagttattgtaataaatcttaggggttctgtttttagagttctctctgcatcaaggtgttcgatgaattgactatgagacctaaaccaagaattttaaactaactaacaatgtcaacgagaatgttaaagtaactcattatgga

SEQ ID NO: 30006 - DNA, 1933 bp, Arabidopsis thaliana landsberg
ttttgcatcagggagttggtatgaatcaacatcgccaattgtcccaataattgctttggtaagggtgtcttcatcgacatcgaggccacgtaagaaatgcccagttccatcatatatgtctagagtctttaataggttgggatcacggtaagataagaacgaaaatactcctgtgcaagagaaaatccaaaggtcaggtctgacgcagaatttgcaacttggcgaagactctgtcagatcaaaatcaaaatggaaaagaaaaacagtttacccgaatgtgaatcaaaatcacaggaacctccatatgcaccaccacttacacgaacacgatcccataaccatatgttactaatatgctttgatataacatatgaactcccatcaagtttgtagccactgctgtatatatttcccgcttttcccacatagttcacctgtcaaaaaggcaagaatagaattgtggagtaagtagaagacgggtgaagagaaatacacgccaaaggacacaaaatatatagaagggttttcattttatttacctgggttggtattactatagcttcatttctcaaaggaagtcgagcatcccaagtgacgagttcaccagacggattttcagggagtaaatcaagaaattttccaacatatttttccgtgtttgtgagggacttcccatcagcagtcatattaactatgcaaccattcctggaaaggaaagatcttctgatttcctcaagtgaggatgaaattccttcccagtcttgatccaccttctgttcaagagtgtgtagaaattcaaggtaactacaacaaagatcaaagcaaaactctattaggctctataagtataagatcaaactaagaatatgaattaagtttcttctcccacagatgcaatcaaatcaagaggtcaaaacaaatggtacaaaactaacaatgaaagaaagagtgatcaagttccaacctgagaccacccatctgttcagacatccatccagcaacgttcaacattgcatccatcctcgcagcagcaattccttgaccacttcccctcaatcggttctaaaatgaacacgagttggtgttatattactaccaccgttttctattaagaaggcaaaaggaagaaggaactgcatacctccattcgtgctctactctgagaaacgaattgtttaaaccgctgttgatcggtaaatcgaacctcttgcagcacacagttcatctgcagcaaggcaagagtgaatgaaacataagaatcaaagtacaacttctataggaaattaactagaattttaagaatctcaaactacagctaatttctatgtctccatttttttctaatttaaactcgaaagttaggattatttcttgaatatgctcatactaaaattcagctctaaaattaacagaatcagctttcatgtagcgaacgattggctagcggacttttgtactttaccttgaacacacaaaaatagtataagacactgctcagcaaatgacatgagcacagggagaggtaaaaagcgagcatctttgcgggaagagggaagagatcaggagacagaagagatacttcatagacgcagacacaaatgaaagaaacaggttttgctttctgataaaccgatggacagaagagctatccacaaggctatagttagaggacatgaggcaaaaagttgaaacttgcactctacattttgagaacccaagacagaacctgatctgacaggtagaaaactctaaattaactatcccaacgtatggtatctcccatctaaatgtgacaagtcggaagcaaattaccaaattgaaaagggtcttcaccgcgtccaaccatggattttcccacgccaatgattttgctacacggatcatccctacccatacccagaggatggcaggggaaaaactgatatcccctcct

SEQ ID NO: 30007 - DNA, 1986 bp, Arabidopsis thaliana landsberg
cggcgaaggacgtgcttgcacaccatcgctcgatttcgacatgctattgcataaatcaagaaatgcacatcataatcaaaatcatcatcgtggcttctcttcctctaactctaagagtctctctcacaagagtagtggaaacaattctttcttctccaaaacagagtctaacaaaagcaacagaagcaatagcaatacagcgaattcgaaaagcatcaattcattcgaagacggattcaaatgcagcgctttgtgtctatacctacctggtttcagcaaaggaaagcctgtaagatcatctcgaaaaggcgattcatcgttcaccagaacaaccacgatgacttcctctcaatcgatggcaagaactgcttccattagagacaccgcggtgctctcggctcgagcctccctagagcggttcgagtgcggttcttggacatcttcggctatgatttacgatgacaatgccgatcttggaggccatttcttcgacttgccttccgaattgatcaaaggtgggccgggagggaacgatcaagacgatcctgtttcagctgctttcgtgttcgacaaggaacctaatttggacaaagaaatcaaaggtgttttgaaaacgtctggttcgaaatcaagaagatcaatggagtcaccacgtcacgttcggttctcaacctcgtcgccggtttcttatccaacgtctccgacacattcaatcacgccacggttgctacaagccaccgaggatttcagtagtttcttggaagctcaagcggtgtgaataataaattggacagtttcactattctttttttcttttattgaattttaccgaatgaagttaacacttcttctcttgctgaatattttttgtagcaattgccattcgagagaattaaaacttttccattgtaaaaagaattttttattttacttttatccgtgggatgatatacatgcaactaaataatactgtgtgtttggtaacttccaatatactatttacattttcatattatttttaagattcttcaagctattaagtattaatagcaatgtccaaagatggataagtagtaccgaaaatgtaaatatgtaggtaaaatcttatttttttatggcagtacataaactctgtgttttcagagaatattgcagctgcagaattatgcagcctcggcgacttactagtaatactcctcccgtaacgtcacatattaaatttataaccaaaaaaagaccatcaaacattaaatttgaccaatgtattgacgtgataaatcacatatacatacgtatacattaattgataacctgttaccatcaacgtacagttaatacattttagggaaaaaattacaaacaaaaaggttttgtaagtattgatgacgtgaaaatcaggaaatggtagggacgacgtagggtttattgaatgtgatatattaatcttacatgacaatttggttccgtaccgtcggtgagctttccctaaaccctagattatcctaaaacacggtcatattttgtggtttaaaatatctactgttaaattatgtttcttgtgtccgtttagcatcaaaccgagacttccatgggtctcaaaaaagtgtttcgcctccaataaaagtcataggtagtttcacgcacagaggacgctcactagaataatatggttcggcaaaatttagtctgtgagcaatttcaccgggagaccatgttgtgtaatgtaaacgaaactgttcccccaaataagcataaccaattatttctggttctgggatctttagataaccgaattaaaccgggaattaagttctatattaattgttaaaagctagcttaagtattaaagaatagaattatgatcaccaattcgggcctagtaaaattggtaatcactctgcatgttggtggggtgattaagtagattccatctgggttcgagcataatattggtatatatgcggcttaatttgactcaacaaaatt

SEQ ID NO: 30008 - DNA, 2194 bp, Arabidopsis thaliana landsberg
cgtttcagtatataataaattttaggtctttaattttcgtaaattcttatgttttcaaactttgttttgttcttgctattcaaattcttaaccttaaccgacaaaagaggaaactttgcctcttacatgtcatcatatcttgagcaacctcacctaccatatgagtataattatttattttacaagtttggaagattcaaagattactgtggtctgtggtaaaactgacaccgcaactgacctattaaacccttcagatttagtccaaatttgaaactcttcatccagcaattatataattgaggttaataatcatcagagatttttagcaataaaagtctgaaactttgcatcaaattatgcagtcatgtttttaattccaacaaagtgattagaaaggttttaataagagtcacgagaagagcaacatatgaagaatacatgtgagcattgaacattctcacttttctttctccttgaaactgtctttttctgctaaaggaaccataagagagccaaacatccagtccatccatatggtataatgaccatagttatgcttgtatgttgtatggtgtatggcatgggatcctgcacccataactggccagatgttgccatggatgcagtcatggatgttcgccgtccatatcgcttccatgaacaaaagacctatatgagttgtgaaatgaattggcactataaacagcgctatcacatgcggtacagcctgaagtatcccgtctactgggtgaaatgcaagccctgtaaacaaaaacgtaaggaagttacaagtaatattagatgtcacatccttggattaaccaagatacactccagggaagtagataaaagaacttctcgtcatttccaatcagtccgagaccagaagagaaacacaaagatctaaactctggttaagtcagaagtctctctgacatatgtgaagtaatgcagctgacatttatataattctagcctttctggttactttatggataaggaatgcaaaatgtgatttggagtacaagcagctgctgacaaagtcttttctggtaagaaactaaatgctaccaatcttttacaagaactaaagaagaacaaactgaaaacacttaccggcaaatggagagagtgtattctgcttgttgtagatatgatgggtggcatggagatacttatagagaggcttaatgtcatgaagctctctgtgcatccaataaataccaaactcaacgaaaacaagatagatggcgatgtaaacaaaatacagaatccaaccgaattcgcctatgctagcaaaacatttggtccaaccacgttcaatcatactctcggagacagttggaagaagagtgtaccatggcatagccttcattgccacaaacatttgcaaacgcatagcctttattgtaggaattgcatctgaagcaaaacagaccaaaaaagatttcaaactaagacagagtctcagagaagcagaaaaagaatgtgtctgaaagtagacaatcacttcaacaaacaatttaagtggacttaaatggcaagtagaaaattcaacttcaaagatgtacgacttctcattggttgcacaaaaacttatataagccactaactgttcaatcccttagatggagaatatgcacaaataatcaataaatgcaaacatgaactatccacatcaaatccaaattactgtacagtacacgaagaaaccctcttccttaaattgaaaaatcgataacatagaaagcgattaagcaatagtgaatacaaaagtgaaagtcgagacctttgggaaggtaaacgttgattttaaggtaatagatgtagaagcaccagaggaaaccggagatgaagtatagtagggttccggcgaggtaatttcggagccatgtctggagaaaatgaggtaagggttcccatagattcgccggcaaaagatgactcagaacgattcggttgtaaaaagaggtttcgtcaacaaactgcatcagataagcattatccgccgccatgtgaatcggagatccaccgagatcggtgccggaaaacgaaagaagattcgccggattgatcttactttacctttattgaacaagtcaacatttttaatgcatgtggcacacagagagtttgatgattgattgatcgatcttcttctctcactctctcatgttcatggtaaattttt

SEQ ID NO: 30009 - DNA, 906 bp, Arabidopsis thaliana landsberg
acggatactcagacgattacaaaatccttcgttgtgacttttttgccaggtataacaagtttaggagcatggtctgatttcattggtatagacccttcacttgctgtatattgccttgtatagtctgtcgctgttactgaaatttatatatgactttgcagttaggtcggccaagtttattccgcgcaagcaatgggttgtggctggagcggatgatatgtacatccgtgtatacaattacaatacaatggacaaggtcaaagtatttgaggctcattcggattacattaggtgtgtagctgtccatccgacccttccatatgtgctgtcatcttctgatgatatgctcataaagctttgggactgggaaaacggttgggcttgtactcagatatttgagggacattcgcactatgtgatgcaagtggtatttaatccaaaagataccaacacttttgccagtgcttcgcttgatcgtaccataaaggtgtgtaagaggtccaagcactgagcttttatggcttagttagcacgaggtacttttaaaagggttttcttagactaattttcatgcttgttcatattcagatatggaatcttggttccccagacccaaattttacactggatgctcatcagaaaggagtcaactgtgtagattatttcacagggggtgataaaccctatggaattactggctctgatgatcatactgctacggtatgcctctggttaagcttccaatatctgtgctttgattcccctgagaattatgtatttgcagatcgtttactagtggtactttttcaggtatgggactatcaaaccaaaagttgtgtccagactctagatgggcacacacacaatgtttctgccgtattgtattcattctgagctttcaataat

SEQ ID NO: 30010 - DNA, 3063 bp, Arabidopsis thaliana landsberg
cactttctccatcacttctttatcattccaatgattatcaacctgaaaattcactaactctttaaggatatacagtagacatatcttagaaagcactgctttgtgcataaggatgttatacataccatgaagaatccccacttatcacatgcatgatcaagaagtgacatggtcttgcttctcttctctccatccaactctgcaaaatcaataactggaatctccatctctctctctttgatcaaaaccatctcttttttatttactttttctcacacacagatttgttgaatgcaatctagaaagagtatttataggcataagtgaaaattaaatctctgtttctcttgtgtgttaggaggcatagttgcctacttggaggcaaaaacaatagtttctttcaacactattctgttaactcattgaatttgaagcatcattacgtttaatgaataaaaaattgtataagaatctgctttggaaatgtaaaatgaacaataggattgaagaaaagtccaagttcagtccatacaaccatgtgatcacaagtttttgaatttttcataatttcttaatggttttgggtcactcccattgtgtttccttgtaacatcatttatgtgaagtttctttcttcttcacaaggaaagttttttttttttttttttttttttctatccctactcatattcgatggacctagccatcatgtctaattgtgtattatgtttttcttttcactgattttttttttctttaaaacttcactaaattacccatctaagcgtcattggcgtacttgtaaaatgtgttattctggtgtcaccaaatttggatatgcgtggtgttgtgtttagcaaggagctctataacactcatcaaatgataatatgacccttttttggtatgaagaaatctacttggcctaaagctacagtatcgaattgttacttgagaatagatttgtgaaaaggtacagtatcgaattgtttattttgagattaccggagtactacacaccatttgcaatagaaaaagaaatcaatgtgggtctaagcggaattaagcgaaagaattggcccctcctatgggcgctctcggttttgaatatatatttttgtgtgtcatattttataacaccttgtaaagaatttgggattgtgtttaaagaatgttatcattttactttttggggtcgaatatttcggatatcgttagttagtgtagctctagtctatataaatcagcaccgacaaatatattttttatgtggtgtaaaattcaaccatgacggccccttagagcgtaaacgggccaagacctaatctacaaagacttttcagttatatataactttgtttcgtttagtttgactgtttgaggaagaaatggtaatgttattgaatcttttgttttggtcatttggtgttgtaatatgttacataattcgaaatgatggtttatcgttaacacggactttaaatatcattaacatgcgtgtatttgagattacaacgaattgattcaacatttcaacttttaacatgttggagttaattattcaaaaagttaataccttgtcaagatatctaaaccttttcaaatttcatgctattgatattagttagggtcataagacctctttagagtcttcatatattgtgttagtaaccccattaaaccttctgcttaaccaacaatctttctttccaatttaggtacattttcttttaagtatgagaatttggtaaacttaaactccaaactaaacaagccaaaagagaccaaacattacaatcaaccctaaacaaaaattataaaaatgttaaagtgtaatactcaatttgcaaattcagcaactatcacctttactttgttcactttgttgtataaatgatttttgttctcactccctgaaccacgcgctaacggtggcgcgtgttcttaacacactttttagtttccagaatcgatggagactttaattaacattttgcccttaagcaaacaataaacaataataaaaaaataaaattaatttccctctctctctcaatctttgtgctttctcgttctccaaccaccggaaatagagagagagagagatctttgtgtgcttcttctacttcttcttcttctctctatcgctccgccgcgccacattcactgagatgcggcggtgtaaaaacaacactgacaaattctctgtgataacgatgaggcttctaacgcttcttctgatctgtactttcttcttcttcttctcctttgcttattccgccgagtcagataacgagactgactcagttgttacacgtgagatcaatggaaccgtcgttgagtccaatgccacgagtgcgaaacctaaggaagatagtttcgctgatatgatcgatcgagcacttgagaaagagtttcctgataatgaccagaacgaaggttcctcctctctcactagatagatcttcatttcttctatttgttacctgagctagggtttctctagggatttcaattttgttattattgatccttcttctctagggatttatcattgattagctgagtggtttagactctctctttgtgcccacattatagcaattaatgcttttgtgttgtttcgatttttcagttcctgatccaggaagcttcaataacagtgttgctgatcagcaggttggttgttgcaagtttagatctttttttaactactctatgttttctttctttttaattaaaggcatgtgttgtgctcattaggcggttctagagactgttgcacgagttaagccaaagaaaaatgaaaccaagaccaaggaggagaagtgagtttttctgatgcttattttgccctgtttggctgtttttttacttttgtttcactggttaaagcaaactataacatatgagtgattttgttctagatccttctttaatttggataacgagaacggcgtaacagatactccaagactgatagataggaaggtaagcttcgatcttcctaaatcatttgttctatatatattgctgaagaatgtataatctgttatgtaccca

SEQ ID NO: 30011 - DNA, 1726 bp, Arabidopsis thaliana landsberg
cgatcagttttgaggttcgccatcactcagagtagaggtcatatatagatataaaggacaggcaagagcgctataacagatgctcacatacctgtccgaagtcggcaatcagaaatttagctgatgttgcataaacagcacagtggacaaatccagtctgtaagaacgctcccggcaatacaagcattatcacttggtgaagtgaaatacatctaatcccactctcacacatcagattcttcagacgtctctaaggaatataaatagtgaaggcctttttaccagtggaagctcgtacaaaggtcgaattgcattagtttcaacagcccacaaacgcacaaaaccattaccagctccagatgcagcaagatcactgcctctactagtagcaactgcattgacccaagaatttgctgaacagttattgttgactggttcatgatcaccgttttctgttaagcaaataaataagaattagatatttcagagcatcagtagctgcaacgaaacaaaagtgttttataactatatactgcaatgtcaagatccaactgcaacagagatgaaatggggaggatctaaattaggtttcacctaagattccattggtggtaatcccatcaggtatatcttgatgtgcattcttgaaaacgaacaccggtttcttttttaacatgccccaaagagcaacagttccattatccgaaccagacaggtactcattatcactgatgaaacagcagctctcaagagacgatgcaggagctcgatagatcatacgggagctctcaggcacctataatcatataacaagacttacaaatacagaataataatagaaaccttatgatgatatcttccaacagtgttgacatggaggatagaactattaccttatgatacagcatggttctatctcttccaaccgtaagtgcacgctccttcctcagtgcatcaatggctagaatttcaccctggtgtccatgattttcagttataaatgctttatcttctacgttccacaccttcacagttctatcaaatgaaccagaatagagttctgaagttccgtatctgaaacatagacaagaaactgtgttccggtgacctggaaaggcctgtagacacataattgtaatacctgagcgcaagacttgatgaagaacaaataaaaaaaacactaaacaaaaaccaaatttattatcattacctggacatgctctcgggtacgaacatcccaaatatgaacatgacggtcaactcctccagtggccaaataacgaccatcagagctaacagctaaagcaagagattctctactgtgatttttgttacgaggctccctcaatttcatcccatgcgacttgagaatttcatcacttggccatatgtatttgtcagttttaccagaagatacatcccaatgcataatagtaccatcttttgaagctgaaaatcctctagaatcgtcatccgataaagctaccgacacaacagatcgtcggtgcttgacaataacactaaacccatcagtacttagtggctcctgaaccctgaatcattgaaaaactttaatcaatactactatcaaccaatcttcaaagatatcaaattgacctaagaaatgtacaaaatcactaagtttcttcacaattaaaccagctccctaaaacactaactacccacaaaccctaaattaccaacaatctcaaacctaaactatcta

SEQ ID NO: 30012 - DNA, 1450 bp, Arabidopsis thaliana landsberg
  unsure (1)..(1450): unsure at all n locations
gcatcaccaagatctatgcaatcactcagtttaattccacttctctcaattcacatctctccaaagcttacagtggatttggactcggaaaagacagattcgttgaagtcattgccgcttatcagagcctagaagatcaaggatggtttcaggtttagtaaaactttaaaatcccttttcccctgtttttagatctgtttcgtgttcttcacgaaatctttatctctatgtatgttaacaaaagggaactgctgatccgatacgaagatgcttgtgggtatttgaagagtttccagttacagagttcttggttcttcctgggcatcatctatacaaaatggattataagatgctaatcgaagatcatagaagaagcagagcggatataaccattgttggactaagctctgttacagaccatgactttggtttcggtttcatggaagttgattccacaaatgctgtcactagattcactatcaagggtcaacaagatttaatctctgtgagttagatatttctagaatgttatgtatgattcagaatcatctgccgactaatgttataatgcaggtggcgaacagaacagcgacaagaagtgatggaacgtcttcttgctctgtcccaagcgcagggatttacgtgatcggtcgagaacagatggtgaagcttctgagagaatgtttaataaaatcgaaagacnnnnnnnnnnnnnnnnnnnnnnnngcgatctctgaaggaatgaaggtaaaggttaagagatagagagacaagaagcagttcataggctatagatttgtctgaaactctgtttttcaggtgaaagctcatatgtttgatggatattgggaagatgtgaggagcattggagcttactatagagctaacatggagagtattaagaggtgtagattggatctcaagtaatgtaaactcttgtgagagataaatggttcgaaataaaataacttgtgattcaagttaacgtttcttttcttgtagttacagattctacgacagacaatgtcctctgtacacaatgcctcggtgtttgcctccaagctccatgagtgtagctgtaataaccaacagtattatcggagacgggtgcattctagatgtaatttgcaaaactctctttcaaatccttgaaaccctagcagccgttgttaatcaaaagcttgaagaatttcgtcatcttcttgtatgtgcagaaatgtgtcatcagaggatcggtggttggaatgagaacaagaatcgctgatgaagtgattgtagaggattcgatcattgtcggttctgatatttatgaggtaaaccaggtttcttggatcgaaattagactaattaataccatattataaagttttaaaacaatattttttggtcacgaaatgtgttttaaagatggaagaagatgtgagaagaaaagggaaggagaagaagatag

SEQ ID NO: 30013 - DNA, 5684 bp, Arabidopsis thaliana landsberg
ggctgaacaagcagaaaccaagtcagtcatatacataagcttgggaagcaaagctcacatggagactaaggaaatgttagagatggcttgggggttgtgtaatagcaaccaacctttcttatgggtcatccgacctggctctgttgcaggcttcgagtggatagagttattaccagaggaagtcattaagatggtcacagaaagaggatacatagtgaaatgggcaccgcagatagaagtacttggacatcctgcagtgggaggattctggagccactgtggatggaactcaacactcgagagtattgtggaaggagtcccaatgatttgcaggcctttacaaggcgaacaaaagttaaatgcaatgtatatagaaagtgtttggaaaatagggattcaacttgaaggtgaagtggaaagagaaggtgtagagagagctgtgaagaggttgatcatggatgaagaaggtgcagccatgagggagaggggctcttgatttaaaagagaaagctcaatgcctcggtaagaagtggaggctcctcatacaacgcactggatgaagcttgtcaagttcttgaatacagagtgaagatgcttaacttcatatattacaaaagaacttcgattataagaaaactccaatagaaatgtttacattctttggaaatattaatttttgtcttccgttaaagttcataattatcaaaatttaaaacttgaacaatttttgtgttttataaaaactagaaaacagtctttccacattaaattcacaatattctaatttggtgtaattcaaactagagagaattttgtatggatatatgtctttgaatttgttgttttcaacgaggacatgaaattgaatattcttgtccactaaatctgtaaaatttgtagcattgaaggtggacaacaattattgtctatcaataatttttaaaatgtcgattcaaaatcttgtctaccaaattgtttagtagacaacaattcttagataactttttctatcattttcccacttgtttagtataggggaatttttgtaagttcaaaccacattaattcaaatttatgacaatttggaaaaaaataaaaatttatggcattattggtaagtttattggtcaaagtggcaaccaaaacttttggtcaagtgacatttttggtaagttttttggtcaaagtggcaacaaaaatattattcaacatgcaacccaaacttttgaagaaaatttattatatatggagactacaagtaaaagcctcaagacaaaacctacccaacgtggttaaaaccaccaactcttatatgagacaaaacagaaacacacttttcttggagtgtttccactttattacttcattcagaaagactagttgtcacacaaggaacacgagagtcgagagagtaatatatatagagagagagatagagcttaagcaatggagaaaatggaagagaagaaaaggatagtgttagttccggttccagcacaaggacatgtaactccaatgatgcagcttggcacagccctaaacatgaagggcttctctattactgttgttcagactaagttcaattactttagcccttcagataaattcactcatgattttcagtttgtcaccattccagaaagcttaccagagtctgatttcaagaatctcggaccaatacagtttctcgttaagctcacaaagagtgtaaggtgagcttcaaggactgtataaggcagttgttgctgcaacaaggcaatgatatagcatgtatcatctacgacgagtatatgtacttctgtggagctgcagctaaggagttcaaccttcctagtgtaatattcagcacacaaagtgctactaatcaagtttcccgttgcgttttaagcaaactcagtgccgagaagttcttggtggacatggaaggtgcctaaaaccagcttaataacctatcttgaaaccattcgtttcactaataagtcattttgttttggctttttagatcctgaagtgcaggaaacgttgatggaaaatttgcatccattaagatacaaagacctaccaacttcaggagttgggccactagatcgattatttgagctgtataggaatacagttgacaaacggacagcttcctcggtgataatcaacacagcgagctgtctagagagctcatctctgtctcgtctgcagcaacagctacaaattccagtttatcctataggccctcttcacatggtggcctcagctcctacaagtctgcttgaagagaacaagagctgcatcgaatggttgaacaaacaaaaggtaaactcggtgatatacataagcatgggaagcatagctttaatggaaatcaacgagataatggaagtcgcttcaggattggctgctagcaaccaacacttcttatgggtgatccgaccagggtcaatacctggttccgagtggatagagtccatgcctgaagagtttagtaagacggttttggaccgaggttacattgtgaaatgggctccacagaaggaagtactttctcatcctgcagtaggagggttttggagccattgtggatggaactcgacactagaaagcatcggcgaaggagttccaatgatctgcaggccattttcgggtgatcaaaaggtgaacgctagatacttggagtgtgtatggaaaattgggattcaagtggagggtgatctagacagaggagtggtcgagagagctgtgaagaggttaatggttgacgaagaaggagatgagatgaggaagagagctttcagtttaaaagagcaacttagagcctctgttaaaagtggaggctcttcacacaactcgctagaagagtttgtacacttcataaggactctatgaagacagttgtgtctactaaaacacacaaagcatcaagattcctttttcaaccattccaagtttgtttgcatagagtttatctgaacatcacttaaaaactcacctgcagaataacaaactataaaaattaatacttgaccgcaaaacctaaacacagctacactgcagattctctctaactactatgcaaattgtcacaatgagaaacatttctactacttagtttcagaaaatgaatcttacatacatcaacatgagaattaatccatgaatttacatgttatatatgtatgatcatgaagttgcaactccgagaaatttcaaaattagctccgactttgattgatttgacttcatcaaaaactataaagttacctcttttatctctttcggagtctttgactgagattctctcctgcttaattttgctacgacgatacaaaaccaccgcaaactgccgcatctgagtctggttagctgaaaaccgataaaggagggatcttggaggaagacgaagagaaaaaaaccaatacaatagatttctctaactgaatgtcccggttattattaaaccgtttcttcggatttccggtttagattaaccagcgcgtgtcttccggttcgaattggaaatgtcagtttctcttcattcagttgaaaagttcattagctaatgaacaaagtcacaaacacaattgcttaggaatatttatttgtatacaaagatataataaacataaacagtcccaaattcgatgattttctctattaacttgatcgctgttctctgatttaactgatccatcaaaccaatatcaaattctgacttaactttcatatgtaaccgatccaacaattggtatcggaaacaacaacactagcattttcttttgccaaagaaccacactagcatgatatcttctagattttctacgtggagaagaacaatcatgcatgtagccacttttgaagaatcttttgtatttggagactacaggtaaagcctcttcacatattatattattatccaaatctcaaaacaaaaacctacccaatgtagctaaaattaccaactcttaatgatacaaaacaaacagagaaacaagtttttcattgagtgttatttgagttaatgtcactttcttctcgaccatatttctcattagcaatgggaaaatgaacaattgttagttgtacattaaactatgattcttaaatcgtataccaactctttgatgcaataatttcaccaagatggagaatcatacgtgttgcaactttttaagtaaatctatagtaagtcaataccaactctttggactttgatgcaccaattgcatgcaccaagattggaaaaccacttttgaagaaatttgttatacttggagacttcaagtataatcccaactcttatatatgtgagataaaaaaaaaaaaaccagccacaagaaacacgcttttattggagttaatgtcactttcttcctactaccaaatgtcacgtaaataataatattggatctgttaataagagatgtttcgagatgaaggagagaaagagaaaaaagattaagcaatggagaaaaatggaagcaaagagaaggaaagtgttagttccaattccagcacaaggtcatgtaactccaatgatgcaacttgggaaagcccttaactcgaagggcttctcaatcacagttgttgagggacacttcaatcaagtaaactcttcttctcaacacttcccttgttttaagtttgtcaccataaaagaaagcttaccagagtctgaattcgggagactcggaggaatcgagtttatgttaacactcaacaaaacaagcgaggcaagcttcaaggactctataagtctgttgttactacaacaaggcaatgatattgcatgtatcattttcgacgagtacatgtacttttgtggagctgcagctaaagaattcaaccttcctagtgtcatattcagcactcaaagtgctgcaaattacgtttcacgttgtgtaattagctaactcaatgcagacaagttcttgcttgacatggaaggtaaccaaaacaagcttaataaccaatcttgaaataatcactcttttcacttaaccttggtatttgtttttttcaactttgcagatcctgatatgcaagacaaggtggtggaaaatttgtatccattacgatacaaagacctaccgacttcaggaatggggccactagatcgattttttgagctctgtgccgaagttgtcaacaaaagaacagcttccgctgttataatcaatacgtcaagttgtctagagagctcgtctctgtcatggctgaaacaagaactcagtattccagtgtatccattaggccctcttcacattacaacttcagcaaattttagtttacttgaagaggacaggaactgcattgaatggctaaacaagcagaaaccgaggtcagtcatatacataagcgtaggaagcatagctcacatggaaaccaaggaagtattggagatggcttggggattgtataatagcaaccaacgttttttatgggtaatccgacccggtacagagtcaatgccagtggaagtcagtaagattgtctcggaaagaggatgcattgtgaaatgggcaccacagaatgaagtacttgtgcatcctgcagtgggaggtttctggagccactgtggatggaactcaacactcgagagtattgtggaaggagtcccaaaaatttgcagaccttttaacggtgagcagaagttaaacgcaatgtatatagaaagtgttggagagtggggttgg

SEQ ID NO: 30014 - DNA, 1123 bp, Arabidopsis thaliana landsberg
agtctatcattggtctgcttagcgtctctaaaatatgacgtgcttatttatgtttttttaacatatgcttatttaattatgttacaaaaagtcgagacacacatgtttacatagcaccgtaacattttacattgcataagcttcaacataaagtacttctagatagatatcagacacgcacacgtagttgtgagctctaaagcttattctacgtcaaaaccgttgcaataagctttagcatatgtgttggtctgaactttttttccaagcagaaacaaaaactatcacacttatttacaaactcaccatgcatctccaacataacttgaggttttcaccgcttatttacgaaattcctttataagcacccctccgtagagtttgaccgcctcatcgcagttaataacccgtcctttcggcctctcaaacctgttgggattggcaacaaaaggacgggtaccaccatagtattgaatatgttctgtggggtgagaaacaacaggttcttttatagttgactcaggtgcgtacatataaatagctcgaccataactataagtactagtcgcctctcttacggtatagatttttggaccaccatatttgtaagcactttgggtaaagcgagaaggggactcgtctttaggatcatatggtttagtggttaggtttggggacttaccatacaccttatcgaccatttcaaaagccttttgagctatccttgtattcctatccttttgagccattgccaaggaagcacaaagaagagaagaaaggtggttttgtcttagtgtattatctttgtttctttggttttagtttgctttgggaaacaaagccaatgagctcccttatataagaaaaggataatgaacctacgtactcatctgttgacttatcttttaggaattatcccttcactttacatgtagtctttttttttgtctaaatatttaattcattaatcaaaagaggatgtacaaaattttttttttttatatgtacaaagttacatagtcatttttattagattatccctttttttagtggttaattgaacataaacttaaatttgacattacaaaggggtccttttttcccaaacaaatactgtttcggt

SEQ ID NO: 30015 - DNA, 1686 bp, Arabidopsis thaliana landsberg
acggcagattcttgagaataaaatcccgaagtgcaggctcagtacaatcgcactcaagtttaggcacccacttccaaagagactcccatcgtttggacaaaatgctagtggatacagctacttttgtcggaacaaacgatataatcttgaccaacaattcatcaggcaacccactgattctgtccatctctcttaaccaaacccaagattctattgcctgaaaaagaaacaagaaaactcgtcaagactctcagaatttgtctgaagccaatcaaacaagatcataaactcaacataattccatcaatttcagagaaccaaatcagaatacaaatcacaacccaactattaataacctagaataataagaataatttccaggaaaggctaagaatttttttaaaaaaaacagtaagcaaaaccgaaaccctaggagagtgacgatgatggaacacgaaatgaaacctaaacaagatccattacaaaagaaatcaacaacaaaaaagtgtaagaaaccaagaaacacaggacgaatttgcttacagaaacgtaaaagtgaagacaatgaatcgctggattgcttcggacattacgttttctctgaagttcgattttttttctttcttaaagggtaaatatatatatatatatatatataaaatattcagataaatgaacgacgacgttttacgtatttgtaataatattctatttatattaggaggagttcataagttgattaattaatgtcaaatttcttgttcaagtttcatattaaattttatttggcctaagaacttttatcaacttaagagatttggacatttgttcaaaatgatgatgcaatacacaacaaacagatgatatacacacacaaatatatatatcttctctcacagttttcagagaatggcccacccatctttctccgttttgaaatctactcatcagccacgggcgggtcgacccaacgaccatgttctttgatcagaccgatcagagcatctgttgcctccgtcatagctatcccacgcttcaccaccgtctgtccacaacatatcaaaatcagattcttttgtcacccggaagctccgagttgtatataaacacattcacaacgaagctcaagaataaaggtgttacctttccgacataaaggtcgatttttccgggagaaccacctacatatccgaaatcagcatctgccatttctcctggtccattcacaatgcatcccatgattgcgatctgcgccattattcaatttgtttacattcaaaaacagaagaaaactttttcttgaaaaacatgtatgaaagtcttgagttttaaccgaaacgccaggtaaatgggaagtcttttctcggatctcggcgctgatttcttgcaagtcgaaaagcgttcttccacaagacgggcacgatacatattcctgcgatgattttgcaagttattgcttctctctttttagaaagaaaatgcagaaatactgattctttgtgcttttaccgtcttagtgttacgcattctgcatccttgtaataagttgaaggaagtattcctaagaaaatcaaaatcttggtcaggtgcttcgagcattactccatcacctagtccatccacattaatgcctccagcatatgtccctgcatgaatcaccaattcgtctttgcattgtgcgcaaga

SEQ ID NO: 30016 - DNA, 7139 bp, Arabidopsis thaliana landsberg
actcttgtataacacaataatacaatccacatgatatataactcaaatcttacaatacaacatgacaaaaacattcttgtcattagtctccacaataacctagctagactctccagctttttttatttaatatggagtttagacacaaaggtgatatatagaacatactcgacacaaatccattcaagacgatggagcattcgcgggatcttcttctttgagtacattgctgaaatcatctctaccctttccttgtggattcctcttcctttccatgatctccgtgaacgcctctatgaatgtcttcatgtgtaatcgtttccattcctaacaaaaacacgcgaatcaaaccaatgcaccacttcatcattcataaagagctaacaaaacaaaacaaaaatggttaaatcatcgaacctcgaaatcccattctccaccaatatcagaatcattcttgttgatccatggatatgtttccactctcatcttctcagaattgtcctgcagatgacaaagcatcaaaaggttttaatcagaatcttatcttaataaaacctaatccaatatgtaagaattagttgttccagtcaaaaatgtaattaccgtcagcattacttcaacagtctttctgtcatattcaacatcttcaaactcatctaacatcttcagttcatcatctgttatgccctttagcacctgcaagaccaacacagtacttcaaaattttgaaaaatctcaatattaacagtatacactaaacaaggagggcaacaaaatcgtctctacacaataacacaaaagaacaatggccttaacgttcctctatggctggtcctagtgttttccatccttctacatacatagtacatacaaagaaacgaatgtgaaaaagggaatcagggatgataaaagaacctttccgctgactttaccgggaccgcccggcagaaatgttggatagacacggcctttgagtctaaacctgtgactgatatcccagaatcgccgttaatcaaaacatcaattggatccaaaaacgaacgaaatcaagacagatagagtcagagataaacgcacaagccggagagtacggcggagacatggtcagggacgcgattaagaagcacgtatacgacttcgggttcctggagactgccatagacaaagagatcgtaagcagctttccctgacaacatactcatccttctttgtctctcctactccgtccagttcctgcgactgagtagaagttcaagtgtcccttgtcccgccacgtgtcaagcatataaaaggttgtgattactattttgaacaatgttttttcaccataaactcttggtcactaaagaagaactgaaaatcaatttcggagaagatggctaacatttctactggatcgattcgagaacagaggaattaaaaccatagccataagaaacacgatatccgtttaaaacagaaagatcgggtcattcattacaacagaacctcaaacagagtttaaagtcttaaagacactggaaactgtaatgaaatatctaaaatgtttgcccaacagagtaagataatgatcgttgtttgctgatcacatggccattggttcaggaccagcagcgttcagaatgtctaagagtgagttttggggctccaattcttcgtgccaaagctgcaacttatctccagggtaaaagtttctcgtcactccctctgagttgatctgttcaaaaacatcaaaaacagtttgccaattaagtaccattaaggaggttacataagtttcgcttcagcgagcttctggtcagagaaagatcttactatgacagtccgtacgacaccaccactggctccatcacgggcgatggctagtgaaaccgccttcacaacaagttgctgcaatataaatacacaagcgtaaatacaatagcaacgaccagttatacaaatggggtttgtgagatttttgcatatgcagatacagtgatgtgaaccgcgttacctctgcttcttctttggtcatgttatctttccaagcctggtcgaagaacccgtagagatagctcgaaccagagcctacacaaacacacacaattccattagttgttaacagaagcaaagggaccattcaagttagtaaatagcaaagaccaattaatcgaatacatctttgttaaaacctaaatatcataagactcatatctttatagtttttacctccaatggcaaacggttgctcgactacagttccaccaagtgggatcccgtagatcttcccaccctcatatttatcccatcctccaacgatgagaccagtttggagcatgttctgctcaacaaagacatacaatgtttcagttaacaatccatgtaatcaaaacaaggaatcaccatacaataacaaactggatatgatttggagtatagaaaactgagatacttcttgagcactacatacagtagcattacaacagagactttctacatttccattaatagtgttcgtacattagactagagaacaaccataacagtaacactacgaacaacaagagattcataaatactagcatcctaggtttgacatgtaacatcaatctctatgccccaaaattttcagctttagtcataataaagcaattaaaacataagcaaactgtcatatttcccagggtcaaacttccaaacaaaagttatccgtgattgagtcgagtatgggtatgttttctctacaagaaaatggaacaacatccacattcctcactactcttagtctaaattgctggtaaaacaaccaaaccaaacggcaagcttaaaagcaaacttgtaccttgttattatatgcgagcatcctgataaggttggcagaaaccttaacagttgcgggttgtccatgctgaattctgcaaatcataagaaaacgaattattaaatcatccggatatataagatagcataagtatcaagtcatgcagcttcgtcaatcaagacactcacgtatgctggtgaaggaagtagcggacatagtcagatacaacttgagaatcagcagcctgcaaaaggaacaagaagagagcttgttgtaatcaatatcccatttgcaagtaaatcaagaacaacaaacattcgagtaagaaacccagtaagcaaaagagattcaataagaagtctagcaagctaaacagtttccacagcagaacaggtcaaacaaaaacaaaaatgaaatccctaagagagattattaccgatccagagcggcagacgtagacattatctgtcagttgtgtaatcttatcagaagctcgattcgctacgtacatacctgcgcgagtaatttacaacagatcccaaatttaacagctttctctaaattacccaaatagaacaatcgattaggattattctttgttccgattgaaacgaaaacaaaactcaaatacaaacccaacgaagaggaactaaaaccctagaaaagtagagaaggggggaaatctcaccggtgctggtacgtgagtcggctccgaggacgacacctccattgtaagtgacgccgatgatggtcgttcccatggagtgaggtgcatcgagattgagatccattgctgtagaattggaaacttgtcagaaacgaaacgaatcgctgagttttgcgagtataaattagattccggtgatgactgatgagaagaagaagcttgaaaaagaagaagaactctggcttataccccaagtcggcctctctcctttcttttttttggttttactttttttgttttgttttgttaggcgacagataaaaaacgtgaaagcccaatatctatttgtcctcatggaccttccaaataaaagcccaatacatatttgtcctcatggcccttccaaatacaagcccaatacctacttgtccatggatcttccaaatacaagctcgatacacatttcagttatttgctcccacggtgaaggaattaggaatgttatcaagttttctctaaggttttgcattttgttgaaatgtgacgtatgttgttcgatcttacgttagtttataaactttgttttagctttaatcttcttcaaaaggtgcacaactaggcactcgttaggacaacacacaagacaacaaagttcgaaacacacaaagattacacttctctactcagaaaacaaacttactttgttattattattaaaaaaaagacctgatttcactcatctctaaagccaattaagaagaaaactacaagagttatattgtagtggcaacagcttctggatgatgaggtagtatctgatgagccgtggggacattgttcttcgacttgttagctacacggcttgctcttgattccttcaccggtgtcaccttcttcgtcgaggactcggccagaaccttcctcacctcgtttgccagctctataacatagtcctcctcatgccctgtgtgaaataaaaaatggcttaacacatcaaaaacaatgtctctcttaaaaccatcaaggtcagaacctttgactacaaagcctgggcagatgttctattcatataaagacttcaaatggagcttggactaaccaatgtcgtgcattgccttctcgagcaggaagagataatctctgttgttaccacatggtccattggctgtcgcgatttgtctttgaatatacaaaataacagctaagtgtgaggacaagaatctggcacataaactaaaggaacagaagaaattgggctggaagctaagtgtataccttgccatgtcttctaatggcgcaggtccgagataatacttgttggagaccttgtcaggagtagaagtgaatctgaagattgtaaagaaatgcatccatcaaaatcacaacacaaagatttgtagaagaaaataaaaatcgatgtgagaacagctgttgatggatccgtgtcataggaaacaacttacactatcactccagttacagctggctttagaggatcatcttcctgtgtaaggaagaaacttttgaggtcaatttttagtagcataaggaataataggcttattcaataatctcggctgagtcctgactcaccttgtaaaagtctacacttgtcttgagatcatattcacactctctacgttccaagtactgtgtacaaatagaaagatcaacacaaaggcatgaccatgatacatcaagcgatctagttttcagatgcaaggacatacctccatagccagacgttctttttctggtcctccacggacacagaatgcagtaccccactgtcaagaaagtattggaatgttagtaagaaaagaataatgtgtgagtaacaagcaggcctcatgaacagactctaagatcctatacacatattaagaatagctacttacgcatatggcttcttcagctttctcgagggtgcaagttcttgcagggtgttctggtgtacctctatgatcaatgcaagctaccaagtcaaatcaaaacacaaatcaatcaatcaataatcaacagctgggacgaatagataaatcaatcaaatacgcaaagaaccaaaactgttatcttaacagaaaagggttaccaagatcaaagacacgtttatatcccttgatgaaacctaacactttctcatcgtagtgaaatcctgggttccacacaagagagccatagccaaagacccacatcaccattttctgcagttaattgctgtacatacacacacacaaaaaaaaagacaaaatctaagatttagacacaaatcatgattttgtggatggtaaatgccagaaaaaggcaccatgtagtaaagacaagacaagagctaaacaagtaagacaaatcacgatggaccagcgtttctattgtcacttcctctttaaatgtaaacagataagctcaaatattgggttctcttcaggacagctcagagttcataaaagaatcaaatcttctccctttctttattttgaaaagcaaggaagattttctaggtaggttatgcgttccatagcaatggtggtgcagttataacccgtaaatgacatgaatgaacaaacttttggaacaaagacaaaaatctagtaaacagtgttcccaaattctagaaagaagggaaaaaggtattgactttttctagccagatttggtgcaataatcatataatcaaacagaacagtaagaacatttcctgaactacaataaacataaacacgagacagagaaaatcgctgagaacagaagctactttaaccaaaatgagtaagatgaataaaaatcaaaactttaccctggaacacgatcttcgtgaagagaaaaatcaatcccaccgtgagacaagatctcctctcttaattagatgatccgagaaaagctgagaaactcgtgggaggaagagagattgcagagaaaagggttgagcgaacggcgtcgtttcggttcgtatggagctggtaatggtaatgagaccactaagctccttctctccctccttctctctctctctcggaatctctttctctctgctctgcttctcgagatgtatcttaatgaggaggaggcgatgtgtgggaagaagagcatttatagagagagagatggagaccgaaccgtattgttcatgccacgcatgtttttttcttttttttgtgttctgcagattttttgtctgttccgttttccattcgtcacgtgactggccggtgaagacgcttgtttctaaaagaaatatctttgttctctaaacaaggtatctcatgttaagaaatttttaatctaattcataaattgaaatatttgttttgtttcttatggaaactcatatatccaaaatctagaatttatttgttcatctcactatttttgaagccaaacacattcctaaaatattccaagtttcaaataatttgtctaccttggtagctaaagacaaaaaagtgttttcctttttttttttattggcttatttaaaaagtgttaaaatttgaattttgaggcaacaaaagacacagtcacaaaaccccaacggtcgaaatgaatttgttacccaaggccatatccttacatggccatcacggaggtaactggtacttaaaattaggcctaacctatcaaatgtttccaaggattattggcttcttctggatttatcccttaaaaaat

SEQ ID NO: 30017 - DNA, 2010 bp, Arabidopsis thaliana landsberg
aataattgagctggtatcagttttggatagaggcggacacacacaaaattgtgggatagaatttctgcaaatacttcaaatagaccaaacacacacaagctaagtaagatgcaaaaatctctaaatacttgcaagtataacatatatataataatataatccacatgatattttgatctatctacaaattcggccttgacgcaaattcatatgtttgttttcagatatgtgtttcagctctttagaaagagagaaatggaagaaggcatggcgagtcacccattccagccctctctcttgccaaaatggtcgataaaaatatgcgggttgagtattttagtttattttagttacttcaagttcacctatctacgaaggcggactacgatattagtttagcacttgttgtcgttagcttttctattcagtttatacttgtttcagtaacgatgtatttattgtaaaaccatattttttgttgaataaattttaaatttatacaaaaacaaaaatcttacatcaatacaacactctctacgttttatttattttagacttttaaaaacgaaggttttttgttgttgataatttaacaaaggtggttatatatagaacatactcaaacacaagtccatccaagacgatggagtcttatcctattgatcttcgcgtaggacatggctaatatcatcatttccctgtccctgaggtttcttcttacattccatgattttcttgaaagtctctatgaatttcttcttgtgcaaccgtttccattcctaagaagcgaatcgaaacaatgtaccatttttccagtcataatgagttcacaaaagctaaaaatacattgtttaaatcatcaaacctcgaaattccattctccaaacatatcaggatcagccttgttgatccatatatatgttttcactgccatcttctccgaattgtcctgcatgtgcaaaatcagaatttataatcatccaaaatgttccaaaatttataatcatcaacctttaaacttttacctcccgaacaatcccgacggtcactctctcatattcatttccctcaaccgcatctaaattctcaagctcatcacttgttactcccattagtacctacacaaaccaattcaccaaatttcccaaatcaaaaccctaaaatcccatatttcatacacaaattaaaaccaaagaatcatctaagaatcaaaccttgccatgaacttctcctttctcagaaggaacaatacatggatacaaacgtcctttaagcctaaacctttgactgatgaacaaaaccaaaaccggccattaaatcttaggtctatacagaaaaataactcaatcgaagaagaaacagagaaaggtacgtacaagcccgggagtgttgcggagactatctcaagagtacgatcaagcatgacgttgatgacgtcgggatcttgaaagctaccatagacgaagacattgtgaagctgaagagaatcggaactacacatcttggtctcttccaccgttcttgtttctgttttttttttctttcttataataagtttggtttcatgttctctaattagagtttgactttatataataacgtgaaaaataaaaatctaaacagttggcggatccagcgtaaggaacacgtggaactgattttcctacgacagcgttagtcttcgacgactagtgacaccagttagtgtatgaaagcaagtccttcgtgttccttttgttttcttctaatttgtcggcaattatttggatacatatctaattaaagttgtttttacaatgatgataagttaccttaaatatgcgacacggatattccttttcttgaagactgctatttcaatgtctttaaagggaaaaaaaattcagaacattataactaaagttttggcaaaaaaaagcattatagacatctctttttaataatttaatcaatctaatcaaattcaaatatgaattacccttggatatatcaacaggttggttttaaact

SEQ ID NO: 30018 - DNA, 2305 bp, Arabidopsis thaliana landsberg
tcctatctgatttcagtcgaatccgattcaacaagattaacttcacatcattctcattcaaccctacaagattcagaaacaattacattatttcctcaatcacagactatacaacagtaaacaggaagaagtaatccaatcggattcatcaaaaatgttaatacctttcaagcatgttctgagaccttatatgcttctgaagaaacgttacccatccacaaaccagggaaaagaacctgaaaaacgatcatacaacaattcaagccaatattgttaggtcaggtttgagtaaaacaaaggtaagattctgattcaacgtgaaaatcttacatcgagctgcttctgcacgttcttggctctcttctttggtcttctactaggttttgatccagtcaacgcgtagatatcttcatctatctccagctttgagagcgatatcgataacctcggtttcttctcctttctttccgtcgtcgccatcttagcatctacaccgttcctcgatcgtattgactctgttcttaccgttcccagagatttattctccggtaaagcaccgttacagctcttcaataccccaccgccgtgtccaattgaccgcttcttcgtcggcggtggtctcctcggcctcagattccaagtcttcggtccaaactcgtctgcttcctgaccaccaccatcggagatccgttcaccttcagcatcgatcgccggaccagctgaatcatcagtcacttgaacagaggcggcgacggaggtggcgatatcagtcgatacagctgtttcttcgttgttcttcgtgcggatccgtataaagatcttcgatctaccgtccggcgtcgttgacttcgtcgcggatctatctgcggcggaatcgctaacaccagacgcgtttcccttcttcttctccggtctcaattcaaacgaagaacctgaagcttcgttcacctcctcaatcaccagatttcctttcccagtattagcttcacgaagcggagatctactcgatgctttgcggagccggtgtgtactggcgtgattcatagcccatctgagatcagacaaagggaagttatgaagcggatgagatttcaccggcgaagaagaagctgctgcaatctgttgctgctgccgtctagaggtttcaatcccgttcaccaccgacggcggctgtggcggcggcggtgcatcggaaccatggatcggtggaggaaacgccatggattgacggaacatatataattcaatcgatcaaagaagtgagaaaaccctaatggaaatcaatagataattcaaaaaacacagagccaatgtagagcgaaagaaatgagagagaatgaagagcggcagttatgttattgctgatagaaaccccaaaccaaagtgttaaccaaaaaaaagatagaaatatgttaaatgactatcttacccttcctatatcgtcggatttacagccgctgccacactgaccacaagggctccaaacgtaagacgcacgtgacttgcacgcactcgtttgcttgctttccaagactttaaagctgaaatgtagtcaaaactatccggacgtatataacaaagcagcttgatttattttcactggcaagtgtgcgatttggttccacgttttgcaatcaagtcattactactatcaccgacacgggcctgtgacacgtgcagattgtttcagggagcccaaaatcaaccagttgcaatttcttgttgtctgatcgaagaaaaaaaagtagtatatacaatcctaaaatgtatgtaaacctctcacttcataatctgtgaagaggccaaaaacggaatccaccgagtggtacagataagttcttcccactctaattggtaaccacaaaattatccaagtgtgcccatcatttctacatcccacaaacaaacaaacgtctcatctgcaatctcccacacgcagttgctaccatttagagattttgtaacgtttttgagttgaggcaataaggttccctttgtgttcaggtccacaaatctgaaaaacctcaagggtacattgctcccaactgctgcaagatccaaagagtctttttgttcagttaggatacagtgtctctggtttttctgctggagaagcgttcgaaccaatgtttcgggattgcaggatgaatcccatatagacgagctatgaaggccttttcgcttgtagctacaatgcttgcgattgaatagcttttctcgctaaaccctttctccacaagccacttatggaatctaaaccttggactgattctgttctcctaggtcaaaacaaagataagctggg

SEQ ID NO: 30019 - DNA, 2445 bp, Arabidopsis thaliana landsberg
aaatttctaagaaaataagagttacacagctagtcagttgtttctttaatcctcccaaaatcgcctcttcatctcagggcttagtttatcgacgatcctgtgagatctcgtataggtaaatatgactttctcttctcttcacggtaacgactaacgagcacgaatctaatccgtttccttgacttgtggtgcatatgattttatttctggagtggttttgtgcgatttgtctgtattgatttgttttggcctacgtaatttgggtcttcgtttctagggttgtggattagggttatgcgtttaaaaccttttcagtgatgattgttattttcctaaatgtttattttctttagttgtgagctttgtcttaatctggacttgcctacaagaatttacattactgccgtgacatgttctcacaatagatgcatattgttgttgtgattttctctgctttttgtcttgactatgttctctacaggaaaagggaagttagtagtgcatcaagatgaaagctcttattcttgttggaggttttggcactcgcttgagaccattgactctcagtctcccaaagccacttgtcgatttcgctaataaacctatgattctacatcaggtactatgttctttaattaattgattttgtaattgtggttcttcttgctatagtgtcatggtcttatttttgtattttgttgtttatgagctatatgctcttttaagtgatgggaaatgttgttgcagatagaggcactaaaggcaattggagtggatgaagtcgtcttggccattaactacgagccagaggtaaaaagacttcaagtctttaaaactttcctttggaaagctatatttgatttttttaatagaagatcttaaaatattgttcaatgttgaataatcattcagcaactgctagtgatgtccaaattctcaaacgacgttgaggcaactctcgggatcaagatcacctgctcacaagagactgagcctttaggtacagctggtcctttggctttagccagggacaaactggttgatggctctggccaaccattctttgtccttaacagcgatgttattagcgactacccgcttgaagagatgattgcttttcacaatgctcatggaggagaggcctctataatggtgacaaaggtaaattatttttgatgaaacctttaagcatttgtgttcatgttttttttactcattatgatataattggtttaaaaggtagatgagccttcgaaatatggagttgttgttatggaagaagccacagggagagtggaaagattcgtcgaaaaaccgaaactatttgttggtaacaagatcaatgctgggatttatcttctaaatccttcagttcttgatcggattgagctaagaccaacatcaatagagaaagagatcttccctcaaatcgcagaagcggaaaagctctacgcaatgctacttcccggattctggatggacattggtcaaccacgagactacattactggtctaagactttacttagactctctgaggaagaaatctccttcaaagttagccactggtccacacattttgggaaatgttcttgtggatgaaaccgcagagattggtgaaggatgtttgattggccctaacgttgctataggtcctggctgtgttgttgagtccggggttagactatcgcactgcacggtaatgcgtggggtacacgtgaagagatatgcgtgtatctcgagtagtatcattgggtggcactcgacggtcggacaatgggctcgggtcgagaacatgtccatacttgggaaaaatgtttacgtgtgcgatgagatatattgtaatggaggggttgtgttgcataacaaagagatcaaatcagacatcttgaaaccagatatagtgatgtgatgacaatttggttgatttgtccgtatttttcatttttttgtgcgaatacgatttctaatttaaagtcatgaaaaagtaaaattttcaatgttttataagagtctagctcctagtaagcctttcgacaagtttcctaagaatatcaaagacgctcttgagattgaaggttatattagtgatgtgtcaatcttgacatatgatgctgggaatatatgttgtttgaagttagatctaattaatttatgtgtgtctcttgagttacaagatgtttgatctaagtgaaatcatgagaagaggtcgtgatcttgttcctcctttttgtacgtgccatggccttggtcgtgattctgaatttttcttaggtacattgctgacaattgaaggtcaggatgtagcaaatcaatgtatcatgcgatttggattacttaagaagtaaaagagatatcagtctcagcgagcagataaaacttttgttcaaaatgatccacagagcagacgtacgatttaatctttcaattaatcatacaaatacta

SEQ ID NO: 30020 - DNA, 2250 bp, Arabidopsis thaliana landsberg
tttttcatgaaaaaagttccgtcattgtcttttttttttacaagcatgatcgtaatatattgcatcgtgaatctagaagttagcatataaattcaatatagcggtcccttcttcttcatcttcacaagcgcacttgtttttgtcctgagaaaactcttttagtctctcagacagagtcagctccttcgccttgttgctgtgcaagatatctctctctacgctccttctgtgttttttttagaggtaagacaaaaacaatgtcagattttcacaatcatctaatggaagagacactggatagcaaatgagactgacccattcatcgatcacaagcccttctccaatcatctttggacctgtttcctctggaggtttctttcgtgcctccaccgctgcatccgcttctgctaattgacgcttcagtttttccaatgcctatgtcatttatcacatagattattaaagagggaggtcgtaaaataatagaatcgtcatcataagcaaaattattcggatactcacagggttggagcgctcaggatccaagaaaatcacacgcaatatttgctccttagagacatcatccttttgctcatcgaactgagaaaaaaacaagaacaaaagcaatagatatgtcttttagatggaaacagcattcagtggaatgcttggttatatgtttgtgccttaaaaggtaactggaaacctctactcagaccaaaacacattcttagtctagtcattgatatcttatgttttagagatgggtcaatatcttatgttctatctggattcggatatgttactactgttttcatgttcaaagatcagctaatagataagatcagaagatcaacataccagctcaggcacatagtccattggacctttcaccttcaggctcatgattttaaacttcactctgctcctttgatccattggcttctcattattctcaggaggctcaacaaatttaaacactgcacatttcaatcagagaaacattgaataagccattgttctgatagcctcatcaagaagaataagaacagaggcgagaaaacaaaaaaaacaaataccagtagcaataatagtctctccaggagcaagaatagcaccaggtggacgcataaagcaactcttcggcgcagttgtttgaaactgaaagagcaacgagtaagctcatatacaataatgccaaagacccaataaccaaaacgctttagatcaaaaaacaaaccttgaaggctacatgtgatttgcttgtatttttaatcttaatagcactcctaacttgcttcccaggctcatcttcaaaacaaagtaataatctaattcagtactccacagcattacttgtaacagaaaacaactaaacttccaaaatccaaatcatgaagaaaaaaaaaacatggcctaagtatacaccaaaaccttcctgcaaaatcatttgatagctaaaatcattcgtatctataaaagactcctaatttcagaatgcttaaaggaagaccatatttagagcaatggtaagttagaattataatccaatgtcaagattctgctcttaacttccaaaaagtttcaaactttatgtttcctattgagtcaattatcaaacttatgtatcaatccacataatcagatcagtcaaatactcaaattctactaaaagatagaaattttagactagtgtcaatggatctcaaatcttcagaaacaaaccctagacaatgaaaaaaagactgtaattccagagaaactactccgatcaaaatgagattcgaaaaaagctcacaaggaaaatagagtttctcagaaggatcaagcttcaatcttcgtttagtaggaagaaaagacttagcaacagatgaaactgaaggagaaggagtcggatgttgattttgacccgatccatcaccgtgaggaccggtataaccaagctgatgatggtgctgatggtgatgttgatgatgatgttgatgatggttatgtagatgagaagaagtagaagaagaagaagctccagatggaaacggagaagtagcagcacttgaagcggcgtttctgtgaccgcttgagttacgaaatggaatcttgaagaaaccccaacctcctttgccgtcggaaggtggtttcttctccgtcatagtcatcttcttctctcagagtttaagcatgcgaatttcgactgagaaaggggttgactcgtgatgagagctcagagaggagagatctgacgtgagattg

SEQ ID NO: 30021 - DNA, 467 bp, Arabidopsis thaliana landsberg
gccctcgatatagccaccatgaagtaaatactcttattaagaaacacaaatattcatcactacacagatagtcaactggcagggatcataaatggaattactttaacaacgaatagggatcataaatgctacttacacaccaaaatgaataaagtctcacaataacgaaagaaaagctaaatggaagcaatcagataattcagtatgatgtggacgtcaagctaattacctgatacatagaggaggagcactatgcccagatcggaagcgtaataggcgaggatcaccatcatttgtgtcaaaaatccaatctacaggaacgaggcataaaacaaatattatatgtggcaaagtggatgcatataggttcaacgggtatgaggaataatagcttactttaagtgcgttatttgctgatgcactcattagcaccggctcattggctaaaaagttcaatgagattatac

SEQ ID NO: 30022 - DNA, 1294 bp, Arabidopsis thaliana landsberg
ggatcataaatttattattattatttttgagtaatcataaacaatttttctcttcttttggcaaacagagcttttaggcaaattattaaaatgtggcctaacacattctattttgtatagaagaaattatttaaatactgttattaaaaaaaacattaatgaataaatacgatttagtaatttaatgtaaaaaaacaaacaaaaatttctataaatgttaaagagatgaattttgttttcaaaataaagtcctaaaacacattaaaaatgtgatatatgtagaaaacaaatgtggcgttttatttgattattttttagtggcctaaggaaaatgctttttttcttacatatcaagcaagactctcttgcaattgagactcatttttcgtttattgttccaaaaaaattctggtcacatgtaaaaacttattctaatttctaggtcattccctacattcaaacatagtgtttttctttttttaaacacttcacaaacattcgatacattaggtccgatatgacacgttttgctgccttaagttaaaaaaagaaagtctatattctaaatccttaaagatcgtacaattgtactcataaacccttaattaaaatgtacttaaaatctgagatgttttggtaaataacaaaacacggggcttttgttaatttgggtactttttagcacaaaaattagaaaaaatgaacatttttaattggcttacgaaaatgggtacttgctgatatataaatggactattttgcctctgtctgttcttcttcttcgttgctcatcttcgtttcttcttctctttgttgattttcttcctttatttttccaaaaaatttcaatcgtttttaatcacgaaaattaaaccctaaggtgatagtatatagagaacccaaacaacaaatattacggatttataagagaattttcggttttggtattgtgcttacatgcatttttttttttaaacaatcctaaattaactaaaagaatctcgattcttctgtaaatatcatctaattggtgtttttggtgggcaatcttcagatcgaaaatcaaatatgcattcctctcggatgacaaatttgcgatctagattcagtttgcaaattaaaattgcatattgctacttgctaaattgaaaagggtaaaatagatcatcaaaaggaaataaagtactcaatcttgtaatcactttaaaaaatgccgcatccaacaataggataagggtttttgtgtcaatcccatatttgatccaacaaaacacctcatattttattcatacat

SEQ ID NO: 30023 - DNA, 1978 bp, Arabidopsis thaliana landsberg
cgtcaaaacgacggcgttttagctcctccgttattaatttctacttagctgaaatcgtctgtgcccttgaccaccttcataccatggggatcgcttacagagacttgaaacctgagaatatacttcttcaagaatcgggtcacgtgactttaaccgattttgatctctcttgtagtctcaataaacccacccgacccgaattctatcatctatccgacccggaaccggatccgaacccggaatcgaatctcagtcataataagaaaagtctgagaattttccggcagaagaagaagaagacgaagtcagctcgtgttaacccgattacacgacggagactgagtttttccggcggtgaacggtcaaattcgtttgttgggactgatgagtatatatcgccggaggtaattcgcggcgacggacacgattttgccgtcgattggtgggctctcggagttttaacgtacgagatgatgtacggagagacaccgttcaaaggaagaaacaaaaaagaaacttttcgtaacgtgctggtgaaggaacctgaattcgccgggaaaccgtcggatttaaccgatttgatccgtcggttattggttaaagatccgacgaagcggtttggtttctggcgaggcgcggcggagataaaggagcatgcttttttcaaaggagtgaggtgggagttgttaacggaagtgttgagacctgcgaacactgcacttgaccagtacgtaaggagcatctcttagtgtgtgcattacagatttgtccattggaacttctctccttcaacagaactatcgtctgaacaatctctgaaaagaagagagaattgtagtagagagatttatcttgagttcgactgttttctctgcaaatctatgtttcgtttaccctttttattaactccactgtattggcttgctatcaatgatgttcatggtttactcaaatcttgaaatgcgacatgaagcaccaacccgtaattatgtaatttatgttatctgtaacttgcagcaaaaaacaaaccaaaaaaatgcatggtcgttatgaaatcgttttcaagttggatatcaaaacacacaaactattgaattttaatattttttatagacagaaaatattatatgtttagttccttaatagctgcatttgggggttgggctgctgatgggttttggcaggacacaacacgtgagatgattttctaagcattaaacacttttgtctttcttttgcttcctctaactattttatttcttctgttttttctataaggtttttttcttcgaaatcaaatattagttttgtcatttttcgtaaatgccaatagtctttgtcccctttttatctccttcctttttgtcttctctcactacataaccaagtcaatggtggaagttctttctaaaatcttattaaaagtgagccctgaaaaaaaggataaagtattctaatcaattcttgtcgatcaattattcctgactaatatccgaattaatatagtaatcgcaagcttttttaaatggtcaaatgatatattatgttttctcaattcgttttgatgtttcacattaagagaatctaactctagctcgtacatgtgtgcgagtgtatctcactgttgctcaaatttggccgaacaacttataaaaggacaaccttatttgcaacaaaaaccttagaaaagttataagcttgtaggtgtgttcttaatattgccaaggttcattcatcttacccgtgacttgctcatatgcacctaaacctttttcgcccatatttcaacatgctataaaagtaggggaaatagttgatccattgtagccacacatggacatattagattttcctccgatgccattttagcatcttagatgatttgatatgatggaaaaaaacaatgcctaaaatttaagtgattaacaataggggattagaatagtcatcaagcaagaattattcatatacgctgtat

SEQ ID NO: 30024 - DNA, 3491 bp, Arabidopsis thaliana landsberg
aaggcaattcttgaaggtttccatcacccaagaatacaaagctatagattaattatgctaatcgcaaggctaagagtgtaatttatttaccatgaaaaacataaagcattgttccatccaccatattaaacacaccacatacttttgggctagtacttcatatcataagccaaaagttacctgtctctgcgcaatatattgtttgccaaaatcaacatcttccaaaagtttctgttttaaatcggcttttgcttcttcctgccactttttccaaccatggcgtagatggagctggatagctttcggaacaaccacctctttctctccaaacatccatttcacctctgcttcaggaaatcccttgacagcttcaccttctggagtcttttgaacaaaaagcttttcttcaccaaactttttcatacgttttctgatacgattctgaagatctctctgcagcttttttgattcctcaaggcgttttttgatgcgtagagaaaaatccactgagtcacgatcgaaaaagggatcaacctcctctagttccaaaacattgggcagtatcatttgttccaagtgctttctttgagcgttcactaattcctgcttaatctcagacctcgagagttttgtaatggagctttcaggaacactacaaccagaaaatcaattgatcttgtaagtgaaacatgaaacatttatgtcgacaggaaaaacagcatagacatgttaaaaacatatataaaagccaacaaaaagatacagttagactaggtgcaggagtacaaacaagataattggtaatctaacaagtaaaagatacaacattaccatcaccgctagaagtgcacgcaataagatgaatgcaaagagaaatcttgcaaaaagatgagcttatgacaatcaactgttagaatatcctcattaaagggcaaccaaaatctcacctacaggtaaggtagaataatattatatctgctaaaatcaaggctagagatatcacctttcaaaacttttttgattcaattctcggttgaagctcttaaccaactctacacactctctttcaatgaaaataagctccctaaccccaaaactcaatgttggtgactatttctttaaaatgatatcatcaatctcatctattctttcccatatcttattgtgctcgctctccataatatccacactctcttccagtttctccattttctccctagcaccttttctcaacagtttttcactctgtttcttcaaacttagggcctcatctacaattttatcagctcgtttcattaacaaatctctctccttcctcaaccgcctcatatcacgatataacccactcattatctccttctgcagtttctccttctccaccttaactgcatccaaagccgctcccacttcagcaacctctccattttcctttctaactatctcaatagtcttcagtaaaaccgagactgtctccaacaatctccgagtataatccgagaactcatgatcaactgctttcaaaaccacctctttctctctcactctctctttctttttcttccaaataacatcactgacgaaaggcacagctaaagctggagcttgaaaagagcgaatcggagaaagtccaattgcaatacaaaacaaggcgtaaactagaggcttggtaacaaactgtattacgctctctctcgtctttgcgctattatactcggaagatagcacaagctcatttccctctccacataatctcaatgattccgaaacagcttcactaccgtaatcagactgtttcgacctcaaaaaactcccggaaaaaccaaagcagcctctaatgggcacaattttcctagatttattattggattctctagacccaaagtttcgatttttgactcgatgtctaggctttaacgatactatacctgagctcaaataaatcggagacaactgtgtggaaaagggtgaagataaggaagaagcggaaatgaaatccatcgcagcaataacggcgaagtgaaaatcaacaccatatctttgtcacaacctccatttcagctcctcaataatgctatatgattgaattctccgtccgcaattcgccggattttaaactgcagctaacgacggaagtgaaagctcactacacagcgcagtgccgagaggtttatcagaagaaagagaaagagatagagactagagaacggttcaagtttacaatatacacattattaaaaccgattatcggagccgaattatcaataaccgatttcgtccaatactacacactaaccggaacgatgtgtcaaaccggaacagttgggggtggttctgaattcaatctaaccaatagcgtaaagaacacagagagatacgagaagatagcagtacaacaaaatcaatcattcatattgctcatgagctgtcgcagctgattacagccgcaaacacagcgttttaggtcttacatcaacaaattacaaccaccaagatcaaaccctattctagtatactgtaaattacatattagtcacaattactagtagagtagagatcaaaaccctccgattcaacaagagacttcatcttccattaaaccgtcttgatcacaaagaggtttgtcttctttcagcacatctcatctccttcccagttatctttctcctttggccctgtgggaccttcttctccataaagagcaatgggaaacaaatcaacaatgttctcaatagagaacctaacaaccaaaggaagaagattcatgatcttattgatctcagaccctgaatcatatgcaatggtcggaccccattctctcatatactgaaaccagcacggctctatcacagctcctttacctaaatactcagctgctactatcacatacctttggcttgaatccacgatgtacttgctttttgcaacatcgtttctgactccaatcccgagctttgacgagccttggaggtacattcctggatgagggaaactcgcatgtccgtgtttagatgagtacacagccggtttgttatctttcacaaactcaatatctgatgcatcaacccaaccaccaccactatgctgagaaaagaacatttgccaaagctcaccagagaaattacatatgcggaaagtgaaatgttcccaatcaccgacatgttctcctatgcgggtcataggtaacgtgaataggccgattttgagcgtggctgggccattaaaggggcagaaaatccacataacgatgtcggtgaaagttccaccaagtgctggtttcacatgaacgtaaagctccgagctttcaaggttttctttcttgagattactctatgcttcttcgtcttcaggaagatctatccagaaatccatatcattgcatcctccagcaggcaagttcgagcccgtggagttaatcggttgaccttctgatttccctgaccggtacaacaaagctccattcttaaagaccattgtacagatgaaggcatgta

SEQ ID NO: 30025 - DNA, 2689 bp, Arabidopsis thaliana landsberg
acaagaatggttctttcgatgattccttgtcccttaatcttgaaaattcgtcaaaacctcgcttggatccagtctctatagccatcgccaagctgatgtatgggtcctccaatgatttcttgtcccttacgcttggaacttcacagaattcagagacgattactgcttcttccgatgaattcttgttctctgatcttggacatttgcagaaatttagcttcgatcccctctcaatggcctccaccaagccgaataaagctctgtccatcgtctccatcgaagctatttccaatgggtaccgttttttcttttcttagtagacaagaagcttctttttcaaagaagttttttaaatatcgcttcatccattattacaggttgaaacttcctgcgacaatcaaggtaattaagcctttcgttcgtctctggaggtatagttagtaacttagtatacacagataagtttgaattggtgtgtttcttgatctgcagagtcaggctaatgagatctttaaggtagtggagagttatgccagaggaaaggaacgaaacgtccttttggctgcttgtatctacattgcttgtcgagacaatgatatgactcggactatgcgtggtatatatatttgaaacctgaaagattcttgttcctttcttggtgtagcttctgccattgtagctgaatcagctttttcaaaaccatttgtgtagaaatatctagatttgccaataaagcctcaatttcggatattagtgagacagttgggttcatagctgagaaactggagatcgagaaaaattggtatatgagtatcgaaactgcgaactttatagtgagtttgtgcactaagcttttgttgcattgaccaaatagtcaatagctctagtttactgacattgtattcatctgcagaagcggttttgttctatatttagattggataaggaagcagttgaagctgctctagaagctgcggaaagttatgattatatgactaatgggtaacttacattatctgagcagttcctggaatttagtggatgagtaagctctaagcagatgtatgatgcagcagacttaaaacccatatatttctacttattgcagttgcagccgtagggctcctgtatcagttgcagcaggaatcgtatatgtcattgctcgactttcttatgagaagcatctgctcaaaggtcacatttaaatctcaatctatatagcagcccttaaagcaaagtctgatcagctcttctctttctctaacatattgacacataatgagttgcaggtctaatagaagccactggagttgcagaaaacacgataaaaggaacatacggggacttgtatccaaatctgccaacaatagtacccacgtggtttgccaatgcaaatgacctgaaaaaccttggagctccttagatctttatgtgcgaggatacaaacaatctcactcaaagaagctttcgtctttccctttttcttttttcctgagcccttataagattcttcctagaaccctttacacataatacctcatgaatacgcatcatcaaagttactccaagtgtatgtaaactctcagtttgattcgactttgtcaaaagaatacaagatcattccagttttttgttacattttatgataagacagggaggtctatagaactgaaggaaaagaaactggcacggccctgagcgatatgacagaatgttaatggtgcagctatgcgcttttgcaggactttaatatcttctttgcttggtggagagtccctgttaaagaatatgagtatatttagtaagacgcatagtgaaaaacttgcattcatagtcgaacttcaaactaacaaaaacgcttaccccgagaagcaagccacaaagcttggttcaccaggagaagacttcttgaaccggctgtttggtagatacacgtcaaacaccgcttttgcatcacaaatctgcatatctcccaagagtttagttacagtatcattgtctgcaggacattcaccagcacaagctgactcttcttcaccattcggtcttgcagcatcctttaacgtccaagaaactccatgcctacctaggatgtaacctagacccttcaagtatctataaacctcgtagttttcccaagagcaaccgcttttctcctctgcaattttctcatacaagtccttcaatgggatcactatgtcatcctcattacctaagatctgtaactctccaatttcactcaaatacctgcaaagggaagaagaataaacgaaaaaggaagagactttcatcagatctttggtaaagactgatctaaaaaacttgtaaaatatttagtttgccacatacagagcctcttctatgaagcaatatgtctttccactacgaatgattccagttgtcgtccaaagttttccccttttaacctcaacttccgccattcctagttcagtaatccaacgagccttggaagatcctactctacattttgcaaacacaaaaaacaaaaagagaaactgagtctaagattagttgacttagcagtttatgatttgggcaaaagtaaatctaaattcacctgaactgtaacttgggcactgaaccaccagaatgaaactcttcgtcatcatcgtttggaaaaccaccttcgttttcgctcgaagaagaagattcccagtcaatttcctcc

SEQ ID NO: 30026 - DNA, 1250 bp, Arabidopsis thaliana landsberg
gagcagcaagtggcagctagatataccctttgatcacatacctcatgcagtatcctcacccatttttcatatgcaaccaccataaggaggtgatcagattgtctatcattgttgtttaaattactcgaactctccagcttatcagacaaaagagcaagtttcacccggtccacattttgcttgaaagaaaagaagagcaaacatagagtcagttcaaaacctccttgcacaaaacagccaagtttccgagaaagtataaacatacctcatctttggcatatacaaacggcgatttgcagcagctcaagaaagcagcaatcgagagaataggtgataagcaaccaaaaatgccaccatataacagcatctgcattatttaaaaggtgtagtgatgataacaaaacatatgtttgagcggcctttattagtacaacaatgatgttactgaagcaaacctttccaattaacaaattaacaggaagttttgctaaatgatgtcctagtggtgtcaactctttgtccccttcaagagcgccgacctaaaaaatacagggttcataaagaaatatcagcagagaagatacaaaggtatatacacatagtttttactgactggatattaaaatcagtggttgagataacataaagtagagacatcaactatatgtattataacttttggaggtatcaggaactaataatttttataaaataaagacttatctccaatacaagtacatggtaccttgtgcaacaataaaattgcagagtttatagcactttcactcggaggttccaaagcctaaagatagtaagaaaaaaagagtaagacaaattataatgtaactttacttcttttggcacgaaaagttgttgtcacttgccttggacagaaacggcttaatttgacccaagccaagtaatttgatatgtaaacacagctctactaaaggcacccgcagcatctcaggaacctggacgacatcaagatgacacatgtgagtttaggggcaaaaaccaagtgatcgagaaaccagcaaagaaaacatctataaaaaagacacctgatagggacgcatgagcttctcgaacctatgcgagtgtataatgaaaagcaatgtccaggtttgacacgtccagctcttcccattctttgtcttgcatttgctttggatacccaatcttccaccatgcttgacattttctataaaatataataattgaacaccaaaagatgacatctcagagac

SEQ ID NO: 30027 - DNA, 1007 bp, Arabidopsis thaliana landsberg
taagaaaaaactaatctgtgctatattgtccaaaaccactgtcagatacattcactggctactcaattaccgatacattcgtaaagattgtgaagacgccccaaccttcctaattctatgttgtgctatttgtgtatgtggaataaatacaggaacaataattagcattagttctttatacaattataagcatcttgtgtcagaggaacaatgactgaaagtctagtagtcacattttttttctttctaaaatgaataacgaaattcatagtcgaatgggggttggagacatacttgaggtagtttatgatagcttctatttcctgctatataccttcctttcccgttttggtcattttatacttcctcttaaggggattctaacttgacgtttgtgtcataggagttgtagtgatagatatgctgagcatctctttatattttatatgatatctttttgtctatcattaccagtcagcttaactggcacattggttgtttgaaggcgttaagagctaaatctatgtctcaactctatctcttgggttttggttggcatagctttaaatcatgatttgaattacttttgcaggcattgctaagggggagattcttgcgaaatggtgacaacgatgataaagagaaaccaacatcatctgcagccactgagttgggctttctaagagagaggcacactgtatctgagctgaggtagttaattcttctgtaataataaattctattttagaggtgttaaaaaggtccttgcttactgtgtgtttgtcatatgctagggaggaatttatatccagactggaccggtctgcctctggtcaagcgagcagtagtcactctgagacctcatcaaatgctgaaactgatcataatagaggtgaacaaaacgacctgaattgtctagatagcatcaatgatgcagacggtggttcagatcaaaatggccgagaggctgacaaccaaagttcactggatgagataactaactaaag

SEQ ID NO: 30028 - DNA, 5296 bp, Arabidopsis thaliana landsberg
  unsure (1)..(5296): unsure at all n locations
atcggattttacagatcgaagaataaagcgatgaaagataaaaatcgacgaattttttaaaaaacgtaaaatttgggatttacccagagattttcagaccaaggtaacgaaaatctccttggtttatgaaaattcaaagacagaatcaggatgactaaaaaaaaaatgactgtaaaatctctcacccttttaaatctgaatctttaactttcccggcgaataacacgacaattacgagatcggaaaatgaaaagacaaacgcaaagaaaggactcacaccaaaaccccttcttcctcgagaaagtgacggaaactttttattcttttttttttttacttgtttgaaacgctacccacacgatgcgatcttctctcaccacaagcaaaaacaatctcctatttctttctctctctgtgaaacgccacaaaaacaaaaacccttaagaaagacgaccacgttttttgcttaaaccctttttaagcctatattgaccttttccccaccggtcctaccggttatactctttcttttcaccggctattatcggtcgacaccttcatctttttagaccaggttcttcgccacgcttttacattgcttgtaatccctcagatcttaccacgtggcatagatgtatcatcacatgactcctgaatctacccaatcagaatattccatgtcaaaccaaaattacatctcattaaagttacactttatttacttgcagattcttgaaaaaaatatatgcaactttcattttcttatccagttttagtaaacaatttacaaaaattaatttgattttcctagttcttatctttgaagaaatctaagattttttatatggaatgttataattacacactaatttttttaccaagaatatatctttactcattaaatttaaaattatctattttcaagtatttaaaagagttgagtttggtttcatagtattaaatctaaaagttcaactatagactatagtcatggattctatatatatataaattaatatttaggttagtggagataatctgtaaactataactatacgacattctgtcacgtggcaggtggatctaccttttttttcttttttcttaataccttaatctatagcttatataattatactcagttttagataattttgtacatcattatcgtctctttttacgtaaggaaaattgcccccaaaatcatgttcatcaatttttgattagtatataaaatttctgaacacttgctccaatcggacggtagagatacttgcagaatctaacgtcaagtgagtctctgttttacactttttcagttatgttttgtaggataataaaaacaaaccgtcaaaatcttaacgtctaggggaggataaaccataaacggcgttggattgacggcatcgagttcggtgtgtgtatattggaagggaagtgtgtaaacggcgttaagttcggagataagaaaccttgggtcgcagtgggcccctgtacctaacaggtgggcctcctcctatgacagggataattatcgagagtggcaaaactaaaacaaatgttttaatgttaagtatacgttaaaaatagcatcaaccagcttttgaatgttaattggtctattttcactttgaaaacataaatccaaacaactatttaaattttgattacatgtttaattattttaggaacaaaatgctatgtgtattttctaatgatttcatatagcacgaatgttgttctcttgtctagctactgatactatagaattataatttaataaattatatattatagatgataagatattttttgtttgttacaattgtaaataataataaacaaacaatatattatatagatatacatatttgtaaaactcaataaatatattatatattattttcgtagaacagtgatgtgtgtgtgataacatttcaaaaccacccaccttagaaaggataagatgaaataaaaatatttctattgtttttttttaggataaaagttgaaataattaaacgctttatcatgatcgatggaaatctattggcccgtccattttaaataatgatttcacgattgtgaggataaatacaataatttgaattacttcttcttattggttctcatctaaactgggcatcaatcggaaatccaatactaggattataatttggatttttgttgttatccgaaatttcttgatatttttagtattggaatggatttaatatcttggccaaatattattatgaaaaaaaaatatatatatacgaaattgtctaaaatagaaaccaaactcgtgtgggttacgaaaaaggttccatgacgtcttgaaacttaagacttattgaaaaatgcatgagagactatcaatgaacctaacaagaatctcgtcattgctcctattatcttcttttcttacgtttattaaatttgttctggttttcatattctaagcataagcttttatcgatggacgatggtgattggtcgttataacaaagccatgtaaatattgaatattgaaaaagccgtaaatgttagtttaacgaatctgtagaaagaataagaaatgtctaaaaactgaagataattacatctgacttatgaagaagaagaaaaaagggaaaatggttagaggaaacttgaggagacatggttgacgtagaagagatgattcacaacacttcaaacttcaaagttggtatgcttcacaaggcggctcacaatagtacactttttttttccaattaataaatatgacagtgaaataaatgaagaaggaattattttccaattaatgttgtaattaatactccttaatttcaatgtattcttgtattgttgtatattaagaaaagaaattgaatcacatttattttgtaggacgaataattcaatcaattattatataaagatcaataccataacaaacataattactattgatcgaaatggaacaaagatacaatgagacagaaacacaaaacttatgttttatcactcaaactacataatcagatttttcactctgaaacaaagttaaaaacaacatgggactcactttcaagtgaacatgaatcacagcattcgtatatagagataacaaattaaactataagagttacttcattcggttgagatattaccatattgccaaggattaaactcgatcgatttgaggtccgtttcgttggaggcactacttgagctctctgccgtgtctcggtgttcattgtacttcccgttgtattggtatacttcaatatctccccatggagtaggtgtgatctcatccgttagatcgaaccatcttggagtgaacttttgtccctttgtctctctggtcctcttttcggccctttgtctctcctcaaggctgagattaaaagacagcacgaagaacctcatgagcataacattagtgttttgtgtgatctaacaatgtaatcattctcaaagtatctttcctagtttgaagaaataagatcagtcttggccactgcaagtgagtagcatctcgactaacaaggaagaaagaagtgactaagaaggaagaaaagatgaagaacctgtgtttctcggaaccagctttagaaaggtcaccctgctcaagggaatatctatcaggacggatacgtgagtctgaagccaagagcttagcaggcgctgtgtcgaagctgtttatcttgtgagcaaagtgagtgtactgaaatttgtcgtttttggggacatcagccaaatgccacacctgaagaaaacaagaaaaaccaacgacaagcataagcaaccgctaaaaagtcaaacaatgttggtcaacaataacccaaggttgcaaagtataatcacacagaaccctagcaaaggccagtaaaaatgtaaaacggaaaagaaacgacatacctctttcagctctgttcctggaaggggttccccttcggcatcacaaggttggtagctcattttctcattccattttcctgtcatcatgattttcggttcttcagctgcgctgtaaacgtagccatcaacttcatagcggccagaactgcgatcaaggtagcaaatttcaatttaatagcatatcgggattacaagacgagacaaaatgaacagagtatcaatgaacaataagatgaagcaatgtcttgtcaattacccgaaccagccacatggctggaaataaagcacaactttgtctccagtggttaaatttgtcatgaccatttccccaggtgagtcaacccaggttcgtccaaatattagattgtgaatcttagtgagaggcggcaccaaatccagaaccacaccatctttcttgagggttacacgcgttctgcaagccaatagaccggctgcatgagcttagatgaaggtataagacagaaaagctactaacatagtggttacatcacaatctttcgtatctctttcgttataacataagagtataagacagaacacagaatttagagaactatggaaaggaaagagtacatgaagcaaaaatttcttcctagagcctataccaaagtgagagagaggtcggaccataaataggaacaaaattaccttcccacagggtaaacatcaacagagttacccaaaagtttagttttcaactttgatgtgatgtcgtaaatgaagtgctcgttctcggcatgaccagcactcattggtggatgatggctaacctgaaaaattacagtaacttattataaatgaaacaaatatatgacttattgcgaattagtcattatccactatgtgagtaacaatgagatgtatagccgcacctgctcagaaataaaagaaatcccaccatggttgaccatctcatatgtctccccaagaataggattgaaaggcttccaagttcgttggaaggcatagtaaacagatatagcccatgatgctatataaaaattcacgtacaaccacaagaaaagtaaaactcttaacatacatcttacaaagtcggaagtcaatacgagttttttgtgtgtaaatactaatacttacaagcatatactaaacgcnnnnnnnnnnnnnnnnnnnnnnnnnnnnnnnccaacaaatgagaatactccattatctgtgagaaatttgcaaatgttataatacagtacacacaaaaaacaacaaatacttacaaacacaggagaattagatgtataacactaacctcagccatcttctggagcatagtcataggctcaaatataacaacaggaagagtcaccattgacgtaatatccgaacctatatatttatgcatcatcttcagtac

SEQ ID NO: 30029 - DNA, 1601 bp, Arabidopsis thaliana landsberg
  unsure (1)..(1601): unsure at all n locations
gtaagtatctcttggacaaataaaaagctctaatttcactacacacagttgtcatcgtctgaaaaataaaatgaacggctgagagaggagaagacacaacttttcgcggaaacacggagccgctcgcacccatcatcttggaatattttaccacacacacactctctctctctaaggtcacttcacaaacgttaccaaccaataaaaagactattattaaaaaaatgtgtaaaaatccgtttctaatttattgtggaataaaaattgcagtaatcaattaatataattgttttaattggtgtatgattcttctacggcggcgagcctcacgcaccaatacgcttcctttttctctatgtctcttcattattttattattcctatattttttttaaaaaaactcaaaaatattccaatttggattttaatatatactaataatgtgtgtgtatatatatatatatatacntgtggcttgtctatcttcataaaacattttaatctctcttctcttttttttgtctgtgcaaagatatcactttcttgctcccaaagcaaaatcaactcttcttcttcttcttctcccagacatcagcaagattcaggagattaaaaccttaaattaaaacaatacaaactccaaattcaccggaggaaataacttataacttgaatctgaaaagatgagctgcaatggttgccgtgttctccggaaaggttgcagcgagaattgtatcctccggccatgtattcaatggattgaaaccgccgatgctcaaggccacgccaccgtcttcgtcgctaaattcttcggccgtgctggtctcatgtcctttatctccgctgttccggattctcaacgtcctggtacttactactaaaccagatctttaaaccggattttcagtttcatcgttcgtttttctcatctttgttccggtttttgtggtgcagctttgtttcagtcgttgctctacgaagcttgtggaagaactgtcaatccagttaacggagcaatcggaatgttatggactggaaactggaatatctgtcaagcggctgttgaaacagtgcttcgcggcggttctttaagaccgatcccggagcttctcactcacggcggcggtttcgctggctttccttcgcctacatctgaagaagcatctgagatctgcaccgaaatgttgaatctccagcaaaatgattccaccgatcgtaacatctatcatcattcacgattctcaagctctagatctagatctactatggattcttcttctccgacgaaacgtaagagattatcatcggaagaccaaccatcttcggagcttgatctatctctcatccctaattttcccattaagcaaacaacaccttcttctacacggcggcgatcagtaacaccgtcgatgaactcagaggactccgggacgacgacgactacgacggcgttttgtgacaagggtgatgtgtacggtaacggaggaggagaaacgaccaagttgcttaacctttttgtttaatgcaaaacggcggcggttttctcagagttagtctagggttttaaatgtaattttacacacttttttccctttttctgg

SEQ ID NO: 30030 - DNA, 3416 bp, Arabidopsis thaliana landsberg
acgctacatttatacaaagtggtcgagacatactattgttgcgaaccgtctcgtaaagtgtcatctgcatccagtcatcatccaatactatatttgtttccggttccagacctcggaaatctccgagcacacaattggtatgcaaagttaccccacaatctttacaggtgtaaaaccatttagttggatcagtttcttcctcgcaaatatcacaccaatatttaccacttgcatctctttcaccaaagcataaagagagaaaatgatcgtcgactctatgcttgacctcatgtggtaatagagcgcatttgaaatccaaagcgtatccacactcatcttcaacgcatctgagcacgtgagatgtttccttgttgcaagcactacatactccttttggtgatgtgtaaaacaaaggatgttggtgacttggatggacaagtgacccagaaaaggaggcacatcgcacatctaatccaaacggaaaagtaccgtatatgaaacaattaaaaaagactccacaagccttacacttagagtagttacgttgagatgcatgtagaatatacggtttattgcttagcacatgacgttttcgtgtaggatgtttagcacagttctcgtgtagaagaaaatcacaactcatacaactgtagaagggatcatgatagataggataagcacatgccttgcaacttctctcctcaacaaaggtaccagacttgtcgagttttaagttatgctctatatggctgaaatgtcgtattatatcttcatcaatcacctcgaatggttccataggttcatcttcttcgggctcatctttcatctctattccatcccaaacatcttctctagtagcgcatttggtatgaaacgtagactcagaacacctcttacaagaatagcccccacaactccaatccattttcttacgacaaactccgcatactgaatcaataataccaagaagagaagtgcgagaaacgcgatgatcatgacggttgatattgatgacccatggaaatccagagcaattgttatgggaagtgaaattgcattgaagacagacatatgggcttcgatctccatggaggccgcaagtggtgcaagtaaaagagatcaattttggcataagggttagttcatggttgtgggtgttttggtcgtgaagatttagtggtggtggaagagaaacacatcgcaaatccaaagtaaagttacaagcggaacagtgataaaacatttcgtcaaaaatctttttcccacataaactacaattcccatcagtataagccggtggtttaccagtgatgagttttagtgtgtgtaaggagtgggaagggtggtttacctctgctccatacttttcgcaatccacatggaatgccaaatcgcattcatggcatttgtaaggaaacccatacataacctccccacatttgctagcaccacagtcgaacttgatccctttcttgagaagggtgagcttgtggtgatgcgtctcggaaatatcaataacttctggtggtgggtaccttgcacagtatagatccacattgaagtcacagatctcacaatgatagcatagatccacgatcctcttatcacatatatcacatatatggtctggtttactttgaagcttaagagggtgaacagagtgagacgggtgttcaatatattcagaagagtcgtcaacacatttcctatgaaccaagaagctacagctttcgcagtaataaccaccactggtaaaaccgaagcgtccacagcaatcagccctagttagataattacacggcatcataagatgctcgtggatcaagggtagtgacacttcctcatattccatggtcgtctgcaacaagattgagaagaagaagaagaagaagaaaaaaaagttgaatctaagatcacagagctatgttcctttcaagtctatttctctctctaattaaaagtcaatgtttactctcaaagatgctctaataaaacttggtgatcattggaataacaattatattgatttttataacggagtagttaggagaaaaacgattttaaaagtcactagccgttgatataattataaacaaagagacaggacccacaataataattgtacattgaaaaagttccattgatatataagatcctatgatcgaagtctcagttttattgtcttaattagcatatttttatccagataaataatccctcaagcaataactttgatgaacttgtaccttttcattgtagcatccatgtattataccattagctaatgacataaagcattgtatcatctaatgtaaacaatgaaagcaaatcaatattcaaaacaggaaccaatagaaggttttgttagcgcataaacgcattgatgtatacgagacaatccaagaacattaactaatttgtttgatgaagctttgatcaagaacaaccttgtgttcttcgatgatttcaacaacctcgctcttcactgcaaaatcatctgaacaagatgaagtggagttaaagatcaggggtaatgtcatctcctgtttacacaatgaagaattgagtagtaagacaatcttgaaacccagttatagattggccaccaatggagtctaataccatcaagtgtcctcatgatacggacaccattaatggaaagcaaaacagcttggggggcacacacatactggccgtgtaatttccatcttacaagatgagataatggcacacaaatatccaaatctcaagtctctcaaaaggtagaaaatttggaaatgggcatattctggtggagtaggagaggcaagatgataaaaaagggttatgacgacagtaaagtgaacggtgttagtgacagtcgtatggaccatgtgtctagtgccactaacttgtgtctatcgattcatgtacttccctacttggccgtggtccaactgcattggatcgttgataaagacaaagagactattgtcgacaaagacaaatcgacaattattgataaagatggtgcactaaaataaaattccataagagaaagagacagttgatacattgcccataaccaaagtcttagttttttttgtcatgataagctttatccgacttaattatacggttaaccaactgttaaaagtgaaacccagttcgaattcagacccgaaactctaaacataaggttaaaaagttggaaaccctttactctggtttcttggaggcttcaggattgttgtcaacgttcgagtcattggtcttcaaggcttcgtcttttggtttattagtttcacgaggactggtcaaattcttctcaatatcctccttctctgtgccttgggcaggtttatactgtgactattgtcagagttgatacctcatcccttgaggcataccaggaatagccacagtcaacacactcc

SEQ ID NO: 30031 - DNA, 3285 bp, Arabidopsis thaliana landsberg
gacattatcttgcgttttcttgtctagttcgactctatttcactacgtatcacccacatggtatttgatcctctacacgcaaatgaatcattctattttgggcgctaagccaggttattgaacttctgtacaactatgttctgacactgcaatttttaaaattgatttggagttgttttcaaatctgcaatagggacctagataattcataactggagttgacttcaatttattgagtttactgaaacaaaaatgaatcggagaacgtgcaaattgtgcaatggacaaaggaactgtaatagtatagagcaaattttaggctaagctgttcacagctgcaactgcaggctcaggtggattagcaacaatgacactgaagcagcgtccacagagagtaggatggtcagaaaatgatccgacctggcccgagtaattccagcacctctcacacttagacccctcggctcgtgacaccccaatccacactttgttctctccctccacatactctcctgtgtgttgcacactgcttatcatctccttctccattgaagacaatacttcaacctgtaatatgcatccacatcagtttcatggctatagtctcatagaattacactcagcatgatcaaatctcaacttcaatcgaaaattgtggataataattgaggaatttgagatgaatcaccatcaccaagtataactaaaaacacaatatattggaattccttcatacctatttcttagggatttaaagggcttttcgagagtggcttctatagatctgatcagtacatgtgtctactgctacaaagtactcttcttttaacatctaaacatttagcatttctcttggggtccaaatactatatctaggataaagaaccagactggattaaaacaaattccggtttgtgcctaatcctattcacactaaatcttttacttatctgttttgggaagagcctacttgtagtttggcctgaactttacacagaaaaaccacggttcacataaaaacggccctacttgttgatggtcaccatgattctaatttatcttaagctataacaggaatatgaattttccagataaggagatttagtgcttacttgtgatgttatgaatatgcgttgcagagtgtcagcctcgttctttgcttcactcatctctagtaattttgcagccatgcctgcatctgcagtatgcaaatacacctttgcttctaaactggaaccaatcattttctcattacgtgctagctccagcactttgttcacctcagtcctcaactgtcacacaaacaccataagtatttctaagatcctcattacaaaaagcgcatcaagaataaggccagtaaaacaaagaataaacttaaaagttcttccagagaaatttcgataatgccatatcataagaactgattacacgatcaacttgacataacatcgagttgaatattctgatattgtgtaagatttcattgagttcatctccactaagtagctaaggaactctattactttaattacaagcagagtagagagtatacaatgggctgaattgctgagtttttccgaattgatttaggagagttttgatacctcgagaagcctttgccagaagagaacatcttcagcaggaaatgaaagccattgttcattcaaagtaggccatttaagttcgaagacaaattctgctgcagagccatcttcatttctgtactcaaatggaagattctgccagacatcttccgctaggtgaggtacgattggagcaatcactctcaatatggataaaagatgtgttgaaagaactgtttgacagcttcttctggtaaaacttgaagtacccctgagaaaaaagatttttggtccagattacgttgaatagcacagacgtattaagaacaggtctacataggttctagcaaatatcaaccaaaagaagatgagaaacttacccagtatacagtctatctttagctatatcgaagtagaaatttgacagatcaacaattgtgaatcgttgtatgatctgaaataaagaaagctcatttagtaacacagatgatctagaacatgaaattaagcctcatgaggttcaaaggtccattgcaaatacatcaacctcactctcaccttaatggatagtgatccaattgctgaactaaagtttcttagatatattaaagcttttaactgataaattaactcctgtaagagtgatctatgtctgtttcccgtcacaggaaaatcaatacatacgtgaatgatgtaccaaaataagatggagaggttacctggaatattttaaagaactggtagttctcgtaacattcttgtatattctttacaacattctcaagctgaaagagagcatgctgatcaatgataggtaaatcctggtatggaacagcattatcaacctacaaaccaacacaacttaaatattaacagattgtcaccaaccccagaatataaaacagaagcaagaagtcttgacaagtgggaaaagaggtgaaaaacactactctatgtaaagcttaagagttagaaaacctactctccaatcatgaagatttcccaagaggtatcttaacgttccccttaacttcctatatatatcagacatttgacgaagaatctggggacctattagtacatcccctgtgtaatctacactagaaacccaaagacgcataacatcagctccgtaagcaggtgcgtcctgtcgtaagaagacaaacccatgtcaggaaacagattaaataacgaagatagttctatacaatgggatttacaatgtgacaaacctttgaatttttccctccttcaatgaccaaacgtgggtccactacgttacctagagacttgctcattttcatacccttctcatccaatacaaatccatgtgttataacagcagaatagggggcttttcctatatacaatcatgcaaaatgtgaagaaaaaaatcaaaagccacacaaagatagctaaaaatctgtagaataatctcaatttaaggcaatatcatggcatgcacttctcaccttgcgttgcgatgcttgttaacaaagaactttggaaccatccacgatgctgatctgtaccttctagatacacgtttgcagggaaactaagaccttcgcgtttccctaatacaccagcccaagaagatcctggacatacagatgggaaagaaagtgatgtaaaataggtgttgggtgcttagtgtgactatctgatttaattagcttcttttatcatagtacctgag

SEQ ID NO: 30032 - DNA, 3140 bp, Arabidopsis thaliana landsberg
ttattgctcggttacctggatcaggtccaggtttgcatcttatattgaatggttaatcatggtgggataagtttaggtaaagggaccggatctgccatactggtcgtgctttgctggattcccagatcaaaaagatctgagttgctttgcctctttttctttgcatgtgtacatttacatacgctctgagtcatgtgtacatttgatcattgtgtgtgtgtgtgtgttatagattgaaaaaatgtgtgtgatagtacagatatgcaaacaaattgatagaaaacaaatgttggtctaatcagattttctctctccgatccaggcaaatctctaatgttatcttgttgataatttctttgcctaaagtttgtataatatgaatattgaatctgattcccttacatgggggaatggaatccattgaacgtggctttgattttgtcttgtctgtagtaataataagaaaagaacacgtcatcctcatctctacctaacgactcatccaatacgatgactcgttcatgggtttgttagttgcgcaattccatcaccaaaactttctattacatactcaacttcttttgattactaaattcagccaacatttccttctcatctctaatcagtgaacacgttttctatgcaggctttggggcctatcttaccatagctgtctaagaagactattatcttatattctttattgtagatttcatttacttgcgtatggaattggaaacaaatttctaattgttgaatcatataccattatttttatattggccatgcatgtgtataagtggaagatagaacaatattaaaacaatattattgtgtttggtcctatttattactctctgctctcttcctgaagcttcttcatctttttgtttgacaagaagaggtagagaagaagatgtctcaatcaatctccctcagcacagaggcagaagaagttgatagtgtagatgtgagccaatccaagactctcctccagtctgggcatcaatatcttgacgttaggtgagcttctgatctattctatcatatcaccatgcatgtaccagctgttgcggttgttaatgaaaaatccttgcacatggcaggactcaggacgagtttaggagaggccattgtgaggcagctaagatcgtcaacattccctacatgctcaacacacctcaaggtaaatcaaatatcaatcacctttaattagagatatcaaccagtacatgagttaaagccttgtgatctctactcttaggtagagtgaagaatcaagagttcttggagcaagtatcttctcttctaaacccagctgatgatatccttgtggtaactcttttcttcctcatcacacccacaagaattaaaatctgccggtgaaaacgatgataaaatctggaaaatgatattgatacaaacagggttgtcagagtggagccagatccttaaaagccacaactgaacttgttgctgcagtaagtgtataatagtcccctagtttacatacataatttacacctacttgtgtgtttaatctcaaagaatcaattcatatatacataaaaaaaatagggttacaagaaagtgagaaacgtgggaggtggctacttggcttgggtggatcacagctttcccatcaacaaggaggaggaggagccatctgctaattaataatcttaagattctcttcttttcttaatcaaataatataactgcctgtgtgatgtagtaatcattttcaatttaaaattccagtttcttgtaatcaaaactttcgtgtaccaaattcaataaaagctgtgtttctctataagtgaaaaccaaaaaaaaaaagatgaacaagtaaaagtgtaaaaactaagtaacaagcctttgtttgtttcatcggtcaaaacgtttgggctttttgagtatacatacaaaaaggctttgggcttcagcctaagcccttatcttctctgttctcgcccggcgattctccgacttaattaattttccgaccgaacacttctctctctctctcgggtttctcatggaagaaacgtccaagctacagttaccggagagtttccttagctttctagaggcgaatggccttgatccttcaatctatactcacggagattcaattccacgttatgtaaggtaacttgagacccctcctttgcttttctcaaaatttctgaatttggcattgaaaccggagaggtccgtttgaaggttgaaacctggattcgaggatgctttcgaagagattgaattcgaaattaactgtaaactggagaaggtgaattggttaccaggattttactccatccctccagatgttcatatagccagaaccaaggcctatcagcaaggcatggtgagagagagcaatcaaataccaactctcctctcgctcattcggtttttcttaaccttacttgttctttcttcgggtttcagatgtacggaatcgatgcagcttccggtgccgctgtctcagctcttggtatctccccaggagaccatgtcttggatctttgtgctgctcctggtatttttttacattgatcagctgatttggtttccttagtgtgtcaattcgtccttgtaactgctttagagggaataataatactctcaggtgctaaactatgtatgatgcttgacctactgggtcagaagggtactgccaccggtgtcgatgttgcaaggcatcgtcttgctgcctgcagaactatgcttctaaagtatgggcttgctgaaaggagccggctttttcttgctgatggaaccactttctcagtcccaccaaccagaaacctaccatgtagagcagcaacatttcaacatcgtcaaaacaatatgttcctttaagcttttcctaactttgctgatgagctcatttgatatgctaatattcaggtgagtcatgtgtggacgatcatgaagacacattcaagcagtggacctcccgtagaccttacaaagaaaggaaacaagaagctaaggcaaggaagaattctgttttgccgcagaatggacaggcagaaattattttctacggacagggttctggagtaatcgggctaaaaaagaatgaaccttatagatcccttgacaaaatgatatgcatcttatggtatgat

SEQ ID NO: 30033 - DNA, 1016 bp, Arabidopsis thaliana landsberg
agcagcgtgtttgttaattttgtatctttaaaattaaaacagtggtgatatcaaacaaaaactctaggagtatctacacaaaatactctacaacttcggtattcaatggataattaaattctgccatctataagttctaaaacatctgacaagataactgactgaatttgttttagacagcagcatagttaacttcaaaattcgatatctcccaaactactgaaccaaaaattatgaaattcttctggcagtaagaacctttatccctctacaaaagtctctatagatggaagagccaattcggccagttactagatgaaacccaccagtgaacagacccgctcatttttgtgaggcaaatagaaacagccacagtaaaacaaacataactggagtttaaacattcatatgaatacactctttatcaatctggaaagcttatgaaattatctacaactttttttacaaacccaaggtttaattctgttgataaaattgcgtaaatcttaagagaacagattctgcacagaattatgagactgaaaaacgggtataatcaaactgcaataactctcagatatgatgtccgattgaggtgttcttcacggccacggaaagatctacaaattatctacgactcatatcgagactttttatttttttgaggacaataagaccacggaaaactggcatgaatagaaactatcgaatcttccattctgcagaaactaaattcgagatcaaaatcaaaccccatatctaatccaacctctattcctttaatccccatgatccaaaacctccaaaaacacttagttacagggaggaacatggatctcatccttaccttgggtttcccaagaaaatctgcaagaagagatgggaatagaacatctctttggtcctatcttcctcttcaatccatcttgctctcctcttctcgatcattgctgcgtgggggggagactagagggaggaggaagtggtggagagggtggaggcgctgcccatgggag

SEQ ID NO: 30034 - DNA, 3123 bp, Arabidopsis thaliana landsberg
tttgaatttttaaaagatcctctccaatccaacaccactaactactacagttgtggcgtcaacggtcctgaattttccttcaagacccctccatcaacttttcctgtcgagttcgcaatcgtaggtaaacttcctcaaagactcttttctcaagttaccttaatgcaatatgccaatatatatgttaattaggttgagtttcatctatagatagtgacttggttcagatacacctaacgcataaaacactaaatccatgacagtttggttggattgtatttattttcacaccactatactatttgttgggttctggtttgaaccggttaaggaccaaattttcatgccaaactaatgaaagaccgatttttgatgtgatattgaaggcgacctaggccaaaccgaatggtcagcagcaacgttatctcatataaatagccaagactacgacgtgtttctacttcctggagacctatcctacgccgacactcaccagccactctgggactcctttggtcgcctagtggagccactagcgagcaagcgtccttggatggttactgaaggaaaccacgagatcgaattcttcccaatcattgaacacacaaccttcaagtcatacaatgctcggtggctcatgcctcacaccgagagcttctctacctccaacctgtactactcttttgacgtagccggtgtccacactgttatgcttggttcttacaccgactttgactgtgaatccgatcagtatcaatggctccaggccgatctagcaaaggttagtttgtagataatgcaactaaagttggaaaaatgcttaacacttgatcatagtataccttacacacacacacacacaaaaaaacctacttcaaacatttaatcaaatctattaatcttaatatgtatcatattaaatagaaacatattggtatatataatacgtaaaatatttttttggtgctgtataaattatcaaaatatgacatacctgatacattatgaagaagttgctttcaaaaatatatatgttcaagcattatcggtaaaataaatattacatgaaaaaggccgaaagattttttaacgcaataacccatatttataacatgttacgtaatagttcaaaatttctatcaattcttgaaacttgtttttttttttaattaattgaaaaaaggttgaccgtaaaacgacgccgtgggtggtggtgttgctgcacgccccgtggtacaacacaaacgaggcacatgaaggtgaaggagagagcatgagggaagctatggagtctctgctctttaatgctcgagtcgacgtcgtcttttctggccatgttcatgcctacgaacgtttcgtaagtcctcaatcatcgctaatcaatctctctttttttactattgacttcattgaatcattattgtaccatgtggattaatagatgtcgaattgtgattgatgcagaaacgtgtatataataacaaggccgacccctgtgggcctatacacattaccatcggtgacggcggtaaccgagagggccttgctttatcgtaagtcacctagctctcattataaatccaaatttaatttcatattcttcccaccaatccaaatgttttttttcttctaataaatttgatcatttaaatgaattcaatagactcactgaaatatgttttctcttttcataacttgaattatagattcaagaagcctccttcacctttatcggaatttcgcgaatcgagttttggacatgggagattgaaggttatggacgggaaacgagcacattggtcatggcatagaaacaatgactcgaactcacttcttgctgatgaggtctggcttgatagtcttagcacatcatcatcatgttggccttcaagtcgctccaatgatgagctctagatcatcatacccgaaaacgtcttgtacttcttttgctcatcggagcgctcgtagaatagtaaggaactacgaatattcattttgttacaaattttactattttaggcatttctttttgtgtttaaggatgtatttggagtttctatttaagtactgcgtgcttttgttttaggatccaacaaggtttagtatatcatatcataccagataaatgtctgtctgatctacgcttacatattcgatcaataagaattttcctactcgttaaatattccttttctttgaattatttggaaaaggatgcgggagggagtgtatatattcaatcaaaatttttggataaaaaataaaactattagcttatgaaaattacaaaacccttcacatttcttatttattttgttttcttataggcaaaaggaagatgaataaagctacaagctaattaagctttttataaacaaattaacaaacaaacactgtgacttgacgagttgtataaacaaacctgaagcatccacggatcttttcaatatttgatcaatccatcccatcttcttctccttcatctttcaccaacatcaactctttgaaaatgaagaagatgaaaatatttggtttcttaattagcttttctctctttttcctctctccgtttgtatgtcaagctaactatgattcaaacttcacccgcccgccgcctcgtcctctcttcattgtctctcacgggcgtccaaagttctatcctcaacaggttcattaatttacttctctttctcattgccctctgctctcgatatagtttcaatttgttaatgttgatcgtctatatattaattgtatacacatataggtgcacatatcattggcgggtaaagaccacatgagagtaacatacacaacagacgacttgaatgtggcatcgatggtggagtacggtaaacatccaaaaaagtatgacaaaaaaacggccggagaatccacttcttacacatacttcttctacaactctggaaagatccatcatgtcaagattggtcctcttaaacccaacaccaaatactattaccgttgtggtggtcacggtgacgaattttctttcaaaactcccccatccaaattttcaatcgaattcgccgtcgctggtaaagtccccttctttaactcactagtgttttgtcatttattatattgggattcaagatttta

SEQ ID NO: 30035 - DNA, 2324 bp, Arabidopsis thaliana landsberg
  unsure (1)..(2324): unsure at all n locations
tatcacttgtatgcaagcgtaagtagtttccttccctggagctggttcctagaatactgtattagaggcatcgtatatttataaaatcggaggtttgaatctcaagcaacataaaagctttcaacaaaagaaatattatcattaattttgttttaagaaaaaaaaacaaaaacaccttttctttatctagagacatgagtcagaaacacgtcagaaagtatccttcgtacgagaaatattgtaattataaatataagttacatttactgatcatgttttcttcgtagagtggtggaaacaatttgtttttaattaagagaagaaagaaaaagtagtatagacacacacacacatgaattggaacgttatacatataatatggaaaaaaacaataatgtgaactctaagatccctactaaagcatcagcaagcacttgcgtgaaatccacaagcgatacgataacgtaaaatatattttcgacgactttttttcgctttcaatgaaaaatgtaatagttcgacttttgagttgcacaaatcgtccaataacaaaaggaaacttttaatagatttaatgatataaaaagacccacctttcctacttatttttcagaaacctatgcatcatgtttaatagcttttattagaggttatagtcgatttcttgtttcgcaagtttacgcaaaaacggcgccataattttgcccaactacaaatctattgggccatattttcgggaattgctatccctattatttagctagacaccctacacctagtttttcaagttttgaatctctgacttcttataactcgagcatgatgcaaatcttcagcaacacgcaaagtgaattcgcgtttacaatagcagacctcgattcttctgctcctactacagaaccggaaccttatcgtctccgaagaactgtactgtttaggctcgaagtggttgtggatcatacaccagcaagcactactgttcttaagcaatggcaacaacaaaaaaacaacaacaannnnnnnnnnnnnnnnnnnnnnnnnnnnnnntgagaggtattttcgagaagctccacgattccaagtgcttttgtaaagccctagaagtatcagaggggttgattgaaaatnnnnnnnnnnnnnnnnnnnnnnnnnnnnncacagttcgatatcagataagtttatacctcgggtgaagagagacgagataaaggatgaagagtattgaagtgtaataagctctttgttgaagcttgaagatgtagaaggatcttcaataaccaccgttaatggttaatttggtcactacatgcaatgtagccgaaggaaatattatcatataaactttttttatcaagtgttttatgtattttgaagatgacatgttacatagcttgctgcgactaaacctgatgttgagatatataattaacatggacaagaatattaatgtagctagaaagtcatatgttgtaagaacttgttactaggaagtttccataatatgaaattcacattggatattctcagccgcattgatcgaagctgagaatctacttaacgtgagcaacatgagctacatgaccctcaggtccgcgagatcgatatctgtatatcattctactattgctcctccttgaatgacttctacaatatgtgcaagtgtaaatataaaaacataatgatttcaaaatgttgcaagaacagtttgttttatttctcaggcagatttgttcattaaagaaaactatactgatcttgaaatggcaacacaaatgggtatttgagttccaatcaagaactaaggaccggcctagtcatgacggatgattgattcgatagtacactatcttaggctgtggatgctttgaacgagtcaatacagctctcagtatcaaatgctgtgtcccaaaacttttcaaaatactcagcatatgtaaagtttctgtaaatagcaggagagtcttcttcctcattgatcagctcttgtgctggactaatcacagcatcttcagaaggacagtagaatgtcggtatcgatatccgctccttgtcggtgttcacaaccgctctgtgaagaacactcttgtatttgtcattgcttataacctatgaggaaaaacaagcacataaagttagtacaaagagagtgaacaaaacagatgatgttttttaatttgtctcctaattacctgcatttggtcaccaaggttgactataaaggtgttgggaacaggattgaaagcgatccatttaccatctttaaacacctgtaaaccagagacttcatcttgaagaagaacagtgatcaagtttgcatctttatg

SEQ ID NO: 30036 - DNA, 1318 bp, Arabidopsis thaliana landsberg
catataagaaaaatctcaatccgatgcaacaactccatcattaaagagatagatgactaacaaacataagcaactcccaattaagcattgacttcgtttaagataaagcggtccaaataatgattcaacaagcatgcatagagaaactgtaatatcccaaaaaaaatgttgaccaaaagttgatcttcggtgcgtggatgtgagaaagggttgtgggccgttggatgcaaggcagaagtcatctggggcgtcggttcttttctcccacaaaaccctagggggccaccccttttccctccacccccccctctcttggccgccaccctcccccatttttcccttggttggccgtcccctctcctcccatggcagcctcccaccatttcttcctcctccatagatcttcccctcccccatgcagcaaggatcgagaagaggaggagcaagatggattgaagaggaagagaggatcaaggagatgttctacccccatctcttgcagattttcttggggaaacctaggtaaggataggatccttgttcctccctataattatatgcttttggaggttgtggatcatgtggattgaaggattagaggttggattagatgtggggttaggttttgatctcgaatttaatttctgcagaatggcagattcgacagtttctgttcatgtcagttttccgtggtcttagtagcctcaaaaaataaaaagtctatatatgagtcgtagataatttgtagacctttccgtggccgcgaagaacacctcaatcggacatcagatcagaaagttattgcagtttgattatagcagtttttcagtctcataattctatgcataatctgttctcttacgatttaggcaattttatcaacagaattcaaccttgggtttgtaatagaagttatagataatttcataagctttccagattgttaaaaagtgcattcatatgaattatgaaactccagttatgtttgttttactgtggctgttcctgtttgcctgacgaaaatgagcgggtctgttcactggtaggtttcatcaggtaaatggccaaattggctcttccaattctggagacttctgtagagggataaaagttcttactgctagtagaatttcatgatttttggtgagtggtttgtgagatatcgaattttgaagttaactacactgctgtccaaaacagattcagtcagttatcttgtcagatgttttagcacttatagatggcagaatttaattatttcactgaataccgacgttttagggtattgtgtgtagatctcctagattatttgtttgat

SEQ ID NO: 30037 - DNA, 902 bp, Arabidopsis thaliana landsberg
  unsure (1)..(902): unsure at all n locations
tgtcggctttattggtgcattacttcgatagactttctcccttttgtggggtgcaaagaatgttagattacatgattatcttttcatgatggcaagaacggggtttaggaagattaagagttttgcttcaatagaactacttgttttgtggtgctgtgaagtgaggtgtttgatcttcatatacgttcatctggtgtggatgttttaccattgaattaaaatgaattgttgaagttggnnnnnnnnnnnnnnnnnnnatattaccccttcataaaagagtgtcgttttaagacattgatgctgatgtatggctgcatccaaattcgatgttgtgaaatcatagtgttgattgcaactatgacttgctttgagcttcattgcatgttgtttcatgcttgatgtcaggtcatgtagtttccttagacaattagtccaaggtagaagttcttgtgttaattaagaccaataatggacccatgttttgaattgtggtgctatatggggtaccttgggtgttttgcttggaatggccgaattcgaggtcgaattctttttaaggggggtagagtgtaatatcccaaaaaaaatgttgaccaaaagttaatctttggtgcgtggatgaggtaaagggttgtgggccattggatgcaaagatagaagtcatctaaggcatcgtttctttctcctacaaaaaccctaggtggccacccctttttttcccttcacccccctcttggccgccaccccctttctcccccttggctggccgccccctccccctatggcagccatcctccattgcttcctcccccaagatctccccctacgcagcaaggatcgagaagaggaggagcacgttgaattgaagaggaagagaggatcaaggagatgttcgttcccca

SEQ ID NO: 30038 - DNA, 2960 bp, Arabidopsis thaliana landsberg
  unsure (1)..(2960): unsure at all n locations
caaaatagttaacagccttagagggaagcatgagtgaaaataggggatggaacagatcagtgggactgttgtatgtttggttggctttgaggccttttggagggtattgggaaagtttaggttccctagaataaacccaatggtgccttagatttctttttttcttggtccagtaagtgtgagtcatttctcaaggagttatacagcagtaatcgtttctaaattgtttcagtttaaatatactttattgtttctagcttggatgatgtcacggtagcaaattatatatgctgattttttgcaaactgctataattttttcatcattttttatttgcaaactcctgaaagtcccttcaattctctagttttgacgtggattcttctaattcctgaaagcaatcttgcatttgctttttctacagttggcacaaagaataagttgaaccatctttctctttaaactgcttttgatgaacttaaaaaatcttgtttggtttcagattgttaggttcaaagacaaagagtctcatcaaatattcctcgaaccagagggccgagatgttcctgagatctatgtgcaggttgatgcataccttagttatgttttatattttttgttatcgtcttagtgaaaaagtgtgaaggatgagaaagaaacctagcttgtcgcctatatgttaatatctaaaacatatgcttgtccagaaatttccttatgtatagtaagagcaagcctgaagtttgttactgctcagtggtttaatgtgggcgtttgtaagtcgagttttcaagactagagaaaatatatcttagctttgttgctaattatcaaggcgtggtatatatcttcttatgagtgtaatgtctttgatatcactagcattctcatgaattggtaatttggtattttcgtagggatttttaactggcctgccagagaatctccagttgccacttctaagaagcttgccaggacttgaaaattgctccatgcttaggcctgcctatgctgttgagtatgattatatgccagctcatcagtgttccaggtcccttatgacgaaaaagattgaaggtcttttcttctctggacagatcaacggcacaactggttatgaagaggctgctgcacaggtgactgatctgtacgagtttttaatttccttaattatggaccttgagttcatgaaaaaggtttattcggatgatatggaaaaaaattacgaatactataatgaaaactgctgtttagactttgtacatatatagtgatagcattctctgttattcttttcaaatttagggtattatatctggaatcaatgctgccagacatgcagacggtaagaaacacgttgttcttgagagggaaagcagttatataggtacgttgattgatgatttagtcacaaaggatctcagagagccataccgcatgctaacaaggtaagttccatttcgttctcttgttcattatcctaattctcctgcattcttttatactttcatgatcaatcctccactctactttctgaaatatggtcaggcaggctagagatatgattccgaaattattagaagttgacatctgtgtagaaagaaaatatgttttttcataacattcgctttgtatgcggtacccatctaagtctgtctgatggtaataacagtgacatttttcatcaccaatttttctgcgttacataagagcttgtatgggggaactgaagagagaagcaaaaaaaaacctcgctggcagtactggaataaaacttgactttttaacttttcttgatgcggctatatggccatgacttgttttaacttcttttttttttcttttccacgtgaactattttgtgcatgtactaatagcctattactacttatgtgtgtttagtaacacggaataatcaaatgtgttttttttctcaacgacagccgttcagaacatcggcttcttcttcgatttgataatgcggatagtcgactaacgcctctggggcgtgaacttggattgatagatgatagacgatggaagttataccaagagaagcaagcaaggatttcagaagagaagaagagactgaaaactgtcaagatttcaggttatctccgtattctgattatttcagaacgaacttatgttgctggtccctgcatacatttaaacatgggatagcaaaaattttaaggcttgacaaaactggattaggtgcaatgcatgagttgatgagtgtattgcttgcagttgcagtaggtgatttggctgccgaagtttctagtgtgtcttctcagccagtcaaagaatcagcgacactagagagtctcctaaagaaaccacatatccactacaagcttcttgagaagcatggctttggaaatgaaacattatctagaatggagaaagactgtgtagagatcgatataaaatatgaaggtnnnnnnnnnnnnnnnnnnnnnnnnnnnnnnnnnntatcttgtgttagcttcattactccattaaatactacttgcttactcggatatatggacatggagttataagttatatccttaatagatggtccaccaacaacatagacgacttccagacgatttggattactattcgatgacaactctatcccatgaagggcgtgaaaaactttcaaaggtgtgttaaagtagttttcgagtagaatcagtgtgatttatagattatcttcttatgatgtgaaacaattataaattcaggtgagaccagagacgatcgggcaggctagcagagtgggtggagtcagtcctgccgacataacagctctgctcataacacttgaatcaaaccgaacaagaactcaagatgtgaagacagggaaaatattggaacatgccgtggcagaatccaatccacagtgggtagaataggnccccctgggttactgagtattaaagtgacaaatgagaaaactctccaat

SEQ ID NO: 30039 - DNA, 1556 bp, Arabidopsis thaliana landsberg
cgtcgatcatgaaaatgacgtgcgtcaaagcgggaagtccttacctgcccttgggatgtagcctcctcgagctgctgggccaaagacttgttcgcctgttcttgatcgtccacctttttttggagtgtgccatcatgtttctcagttctgctaggactgtgggagtggtggtctcaggagcgttcgtctggattggagggatcggttttcccttcgcgtcaacggtggtagcggggatctgattattgaccattgttgattgatcggctggttctgtgttctaggagtaagagaaatctgtaccccctccttctagcgccaaattgtgagagtcaaaactctcacaatcgaaattgtatttagggtttcttcaaagaatggatttttgtgagactctcaaagaacaacaaaattatttgattaccgcggacggtgctcttgattttattatcgaagtgatgatgatttgatcgtacaagtcgttcaagcacccaactgggataacccatttgagatcatgtgtgacgcatccgattatgtagttggaggtgtcctaggacaaaagattgatggcaaacttcacgtcatctactacgcgagtagaacgatggacgaagttcaaacaagatatgcaaccacaaaaaaggagctattagttgtggttttcacctttgagaaatttagaagctatttggttggttctaaagtgaaggtctacaaagaccatgccgtactaaggcacatctatgctaagaaggaaaccaagccaagacttctaaggtggatactgttgcttcaagagtttgacatggaaatcattgataagaaaggtgttgagaatggagttgcagaccatctctctaggatgagaattgaagattcagtcccgatagatgatactatgcctgaagaacagcttatgttctacaacctggttaacaaaagcttcgacacaaaagacatgctggaagaagcatatgcagttgaagaagaaaagttgccctggtatgcagatttagtcaattatttggtaagtggtatgatcccccaaagtttggatgcatatataaaaaagaagttctttaaagatgtccaccattactattgggatgaaccgtacatgtataaaaaggggagtgatgagctattcagggggtgtgtctctaaaggagaagttcaaggtatactggaacattgtcagggctccacctatggaggacatttcgccaccttcaagactgcccagaaagtgttgcaggcaggtctctggtggcccacaacgtttaaagatactcaggaattcataccgaaatgcaatccatgccaaagagtcaaaaacatatccaggaggaatgagatgccacaaaatcccattcttgaggtagaagtttttgatgtgtggggaatagacttcatgggtccgttcaaccctccctcatatgaaaatgcttatatcctggtatcagtggattacgtctccaagtgggtggaagcaatagcagcaccaaccaacgatcacaaagtagtactgaatatatttaagtccatttggttcc

SEQ ID NO: 30040 - DNA, 1961 bp, Arabidopsis thaliana landsberg
ttacagaacgtaaaaccttcatggcagcagatgctggaccagcctggagcatcagcattaggaatcccttcttagctttgttacagaagaacaaccaacaccgagaaaagcataaaaactaagaaagataagggaaatatacagtgccaatgaagtacaacactctctagctgcaaaacctctcataagatactctcccgctccagacacacaacatccaactagaaatggagctccaaatggtcctttagaggatgcccagcaaccagaaccatatgttgccgccaaacctacacggccgctaatctgaaatacatgatcagaaagagaagatcagttttactttcagctcaaaagaacaactaagaatttgttgatatattaccttcattgcaataccgccacttgaggacccacacgcaatgtgtccttcattgtcaacacagattacgccaacagtgtccatgatcttatcctcatctgcagctgcacaggatgatacgttttcctcacatgtttcattattctcggttcctctgggatgttcttcagcagagagaatactctttgcccctacctcagaaagcatggccttgaaccttctccactgatttcttgctctctctgtaaccagccactgttcaaaaataacttaaatcattctcaaggaataaaacaagcaggtgattgacagtaaagcaaagataaagtggaaatctcaaacctgatcagcttctgtgacagttccaggtataagaacacttttggatttaccccaacgtcgagctccctcaccaaccaacaacctggggaggcaaatcagaaagttcaacccaacgctagcgacaaaacaagattcaaatttgggttgatatcagaacaaagaagagtgattcgttacataggaggtatacggcctaagagagttgagccagtaatctgctctttcaccaacaaagcagcaattttgatagcatttctgacacctgatctacatacagttcatcgtacaaaatcttcagccattccacaagtataagaacaaggttaatatgagagcttttatgagtacctggaactgctccaacaccaccaaacatccctgaatctccatccataagactagcatcacattccacatgaccatcttctgtcagattagagcctctaccagcatttgtgctcgggtcatcctaattcaacaaagattcacataggaatcattaggaaactgaagaaaatctacagagttataacatgtcttctttaatcagtgacaaagacccaacaagtacctcgaggacttgaatggcagctgaaacagcatctatgcattcaccagaatcctaaattcaacagataaacctcaaggtatgcaatttggagattctaaacgatttgggctatgagaagaaactgaaactcaaataagcacctgacgaagaatggtcgacgcagctaggcaagcgcgtctcatgacagatctaagagctttctcgttagccgccgcatgatatccggccccgacgtgaaccgccacgaaaaagcgtcgactttgatctgctccgtcgccagccatcatcgtcttcaggcaaaaacaaaaacgtctaccgttgttgaattaatgatgcaaacatcgtgtcgttttttggacaacataaactttaaatgggcttaagagaaagtaaaaagagttagaaggctcaaataaactttaaatggttttaaatgggccttaagagaaactaatggattttgaaggcccaaaataaagattactgtccgagacataaaagaccctgagaattcagaaaatttacaaacaaatgccataactcgtttcgctcaccctcttaactctttagaacaagtagaagaagtctcatcttcttcgtcttctttgcgatccttctgatttcactaaggtaagccgatttctgatcaccggttcgccggagtca

SEQ ID NO: 30041 - DNA, 2228 bp, Arabidopsis thaliana landsberg
  unsure (1)..(2228): unsure at all n locations
cgaagaatcaattgatgttgatctagattcgctattcctggaaagaaagacaagattctgtttacagtggacttcaggtttatacctccgttgctttgattaacatatccaatgaatcatttactcaaaagaaatgattctacaacatactgtctgttctagttcatataagcttcaagtttatttctcataggaaatcgatgtgaactctgagcttgtttgtattcacgactctgcccgaccgttggtgaatactgaagatgtcgagaaggtatacttatgagaagtagcaaaagattaaggagaatgaaacaaaattctcgaagtccctttagaatttattgcactgttgtgttttgttaaggtccttaaagatggttccgcggttggagcagctgtacttggtgttcctgctaaagctacaatcaaggaggtacacaatcttaagttagttagtttttttgacatcaccacattctcgatattcgacttgttccattttgcgatatgcaggtcaattctgattcccttgtggtgaaaactctcgacagaaaaaccctatgggaaatgcagacaccacaggttttaaagtatactcatgctttgttgattgatttttggtttcaaaccacttcaatgcatgctttttctgtaggtgatcaaaccagagctattgaaaaaaggtttcgagcttgtgaaaaggtttgtgaaccttcaaatgattttctgaagtgtggattagaatataaaaagactgattactatttgtgttctatatctaaaacagtgaaggtctagaggtaacagatgacgtttcgattgttgaatacctcaagcatccagtatatgtctctcaaggatcttatacaaacatcaaggtaacaaaacactaattttgtgttttttcgcagccgtagaatgaaaacaaactttctcatccattgcaggttacaacacctgatgatttactgcttgctgagagaatcttgagcgaggactcatgagatattatatcatttacttagtaagaagacgtgtcaagggtatgcatgaaaaatgttttattgaaatctttgcatcctagtttggtggtttataaaatgtgcaagataattgtttcactgaaaactacttgctgtgaatatggattcgaacagagccaattcgaagtagaatttgcatattgtagtaaaggttctcactaaggcaataagggtgccacgagcgagcacaaatatggatccaagagattagtttgttaatgatgtttattaaaacttatatttaaataacccctaaatatatcataacttatatctcaagttatgttcaagtagggctgtcaaaatacactcgcatgagatgaagaagaaatacagagaacgaggaacaaagaggaagcgagaagaactccactgtaagatgaaaagtcagaatcatacatatatgattttaaaataaaaagtatttggattcatctttaggggtaaacttttgtattcaccctctttagtttaagccaatcattatgtcatgccatacattaattaaggaaacaaaatctatatacttttaattaaataaagttaaattcatataccctgcaggtacaagattaaatttattaacagatggttaaattgattatcggattttagtttagggttttatttactagaaaaaaaaaattcagggtttaaaaatggatccgcccaatggtgagagtttttttttccatcaaattcccaatataaaacaatactttttgtaaaattaaaattaaatgtttaacaattattatggatgaagtaatatagatttatgatataaaagtaaacaataatatgaaagtgggtttccaatgtaatgtattatatttattttttatttaaaaacatataactttttgggctgcaatttttacaacgcaaatgagaaaaacatatgtatgagtattagttcattgatatcttcgcatactggtatggcggatgacctggatgttttggaggttctggataatgaagaattggaattatgcccgggtattggttcactgcgactttggcattttggtggggtggatgtcctgngcgttttggaggccatggtagatgtgggataacttgaaattggtttactgatatattctcattctggtttggtggaggaggaaatggctcggttggaaaagtcgggtatctagcaagggcaagaccaatatgcag

SEQ ID NO: 30042 - DNA, 3606 bp, Arabidopsis thaliana landsberg
agatacctgcgaactataagtgaattaaaccccctcaaggaaagatctttcttcactttatttgttgtatgagcatccccacaaaggcggctccgcgagtggtcaaacctacgagaagcaatatcattatacacagactccatttattaatgtcgtagccactcttcataagcgatccacatcgagtaatcatccatactccatagtacctgaaacccaatgaatgaatcaaacccagcttttgagggaagaaatataatttatttctttttgctttttatccttacttttgagcatttcctatcacaaatgcttccaaagcccactttggataactcaaatcagctatgatcctgataagttcactattcttcggttgggttgcaacaagtgttaaaacgactggaagaagaacagaaaactgcaaaatccccaaaaaagttcgttaattagaataagtagagagagtatatgattcttctataaaaggaaacttaaataaaactcaccagctgggctgtgctcggttggagaaagatagccaacgcatatgcaataccggtcacacaatatacgagacagaccaaaacaatatagttatcgaaaaatgtggatcttgggttcgtgaagaaatagaacatggagagatagaccaatggcttgacaagtatattgaaaatgtctattgtatctttggcaaggaagcaggccgaactactcatccctgaagcactttctctccagtaatgtaacttgtctagtgagaatgatcttaaagctgctattttgcaaagaagagctgacagaagaagaagaggatcataacataagatacaataagaacatgaagaaacttctcaaaaaatgattaataacagtaatgatagtttagtaaagggtttaatccaacttacagactgcgataatagtataaatataaccaggagctccaaagctctcatcacttgctttaatcagtgatcctaaacaagctccagcaagcaacaatatcaaatagtctgtggcttgtaattgagcttctctcattcgctgcttcgctatcctgaaatcaagaacattaatccgctttattccaatatccaagaatcaattgatcgtaagtaagtcatggagaatgtcagaagtaaacctttcaaggaaatatttgtattgcagccacgtactaggggttcttttgtgggataaatctctagactttaagaagttatgccgtattttatcacgacgcatcctgaaattactgttcacatgccgccacagatctctcgcaaatgtttgttctgcattatctggtgaattagtacctaagtctggattcgtttcaagtccagcagcactgttgttccgcatatctaatggaaccgagtaccctttgtgaagcatccacctttgaggaagctctttgtaaccaataccagaatttcccattgaaatcactactccttccagaacatcgatgtaatagtcaggagggttgatacggtctggaacatgtatccccagacccgagaagtattcctcaactttgttgactgatccgtggtaaacagtaaggccacctttcgcgagaagtactagatcattgaacgttttgaacaaagtataactgcaataaaagataaaaacattatgaattaaaaacaaactttatgacacttgcagaaatttcctctatgagaaacttgttttcaagataccttggttggtgaacaaccatgcaaatatttactccctcgagagcttcatgccgaagtgctctaagaagaagctgtgatgaggcactatccaagccagaagtaggttcatccaagaataaaaccgaaggctccattaccatctctaaacccacattcactcgtttcctctgccctcctgagattccccgcttctctacagtaccaactaaagaactcctcacagcttgtagccccaaggagtcaatgattctttcaaccacaagaactttgtctgctttggatagatccgcaggtaatctgcatttagcatggaaccaaagattttcctctactgttaagtttccatgaacaacgtcatcttgtggcacaaagccaataatttttttatatgagtggattgattcctgcttcccatttataagaatcaaaccacttaatttgcatccgacagctttcccagccaaagcagaaagaagacttgtctttcctgctcctgatggacccatcacagctgtgatccgacctggtttcatacttcctgtgacacatcttaacacttgcttaccattggatttcaatgtaagagttaaatctttgaaagaaagctccatgagatgcctctttctcgtctcagaattggtagccattttgactattcctgaaaatgtgagatttttattctcttgctccatggctttctccttttcaatccgatcataagcatacttgaagatttggctttgtgttttcttaattttggccaaagtctgtccttttactctctttccttctatgccaagacttgctcttccattactcccagcggctgcatgatcctcattctcataactagattgtgcagcagaggaactcgcaggacttgaacatgtggacatgtctatatcttcatctatttctgaagagtccccacgacccaacatcttgttggtatccccatcttgattggctcttttacctgaaaatgtccgagttatttgcgcacggatcccactcacatgctttttagcagcctctctagcagctttccatctatgatgagctctcgctttcttcaccgctgcttcccttgattttgcctgcctcctttccctagttgttaggatttgatcggaacaattgtagataatgagtagaatagtactcactgcagcctgcacaaacaaattgaaggccactctttcagtagaaaatcttaatcttggatttacattcattaatatctgaaaaaacttacgataaccataatcccaaatgcatgcatgttctgatttgctgtgttaggattgcaggacgtcaacttaaagcaggctgcaaaagacaagaagtcattaatagatgacgagacaagcagatggaaatggtaatgggtatgtgacagcacgccattatataatattcgaagacttacgtttctcagaagtagaccccatcctgcagtagtgcctgaataacataaaagtaaaaccagttaagctaaaatcaattcaaaccaaaatctgactatcagcttaatcattattttgatatagtatagtaatacatctttgaggacaatttggagggatggaatggagtttgaagggaagtaaaaatgactacccactatcacaaggtactttttgggttgtggttggacaatatgatcctgcggaacagaatacttcaccgctggatctgatatcggcccatacatttgcacctccacaagtgtggtttggtcgtcctgatggtaattgataagtatacctatagatttgacatttcaacatcttatcacatgtatcatattatagtatctatatgtaagatgaaatgaaaaaaaaaacgtacggttcacataagcttgtagttttattaagggtagcta

SEQ ID NO: 30043 - DNA, 553 bp, Arabidopsis thaliana landsberg
gtatgaccttcttgtttcactcaggttcttggcttatagtcgtgttttacgtcttcaagttctctaatgcttactatgccttgatgctgaaaattacttgcagatctgcaatgagtttgtgcgattcagtacctatctgcctgatacaaaagtttcggtgttctatggtggagtcaacattaaaattcacaaagacttgctgaagaatgaatgtcctcacattgttgttggtacccctggtcgggtgcttgcacttgccagggagaaagatctctctttgaagaatgtgaggcattttattcttgatgaatgcgataaaatgctcgagtcacttggtatgctgatttctgacatcattattacatcgatccctgaataattttatgttttaacactttaactttttttttaccagacatgcgaagggatgtgcaggagattttcaagatgactcctcatgacaaacaagtaatgatgttctcagcaacgctcagcaaagagatacgcccagtctgcagaaaatatatgcaagatgtaatgttccatggccaat

SEQ ID NO: 30044 - DNA, 2239 bp, Arabidopsis thaliana landsberg
catatcggtcactgcatcgttgcaaatgtctagacgtggggtcactgtggatcctccttcaatggcaagatctgggtacttcttgagaatctcctctgacatcacaacataccttgtcttcaccgttgttgtcttgcctgtatatagtaaacgaacagttcaaacaaacctcagttgctgttgcaggagcttacagaatgagataaaaagttgaaaacagaggttaaaatgaagagattacagagacgagtaagtttctgtttgagttcagggtcatcacacttggtggttttgaagtagccatcgactaagtactcttgcattactagctggtgaggaaaggcttttcccagagcaagaattgtggcttttcccgggtttgatttcttctctgaacccaacactgcggcatcgatgcttcccatttgtatctgtttgttgaagactcaaatcttgggtctgtaaataaggttcaaagtgaaggcatatatatacactgcagcttttgcagttttgtgacctgcatattgtgcggtatttctgtctagttgatatttggtgaagagtaggtgtgagatttagaagcttcatgtttattgcattggctctttctaaaatccaactccagttctttgagatttttttcttgatacatagtctttaggcttagttaaaagccaacacaaaggtgtgttatagttatagttgttttgtacatcttcacacttaaaaagaatgaaagagaaactaactaaattttttcttctgttaacatcaatcattcgaaattgatattaaaaaattatgactctgttgttgggtatcaaatttgctgagtttctacatgtatgatggatcatcaatagaaagacagcaaaaagaaatagaggaacaaatgagaaaaggtgaagagttgaaatttctgctcaaacctattccctacctacgccctttgcttgaatcttcatatgctttcttcgcccaatgcacatactgaacagatgaaacttaatacgtatgacttgttagaggtctgagagacatttcccactgatgaagtcaatcactttggtaagtgactcatcaagtttggcagtgactgcagctaagttctccaaaaattcttcagaagttggtctattgccatccacaatatcagtcacaccttttattagaatcgtaggcactttaaagatatcagccacataggccactgctgctccctgaaatgccaagaatccgtaaataagtcgtagtaactgataaagacacaaagacaaacacatagtatggagccaggtacatcaacacaggaaacttatggattgttgacctccatatctttaactgtagcatcatttgctgtgatggattcttcgtcatgtggagacatatccatagaatcgccagtggataatcttcccacctgggaacattgcaactaaatcataaatctaccacttatgcaaaccatatcaagaaataaccaaaatcttgcatgaggatcaaatggtgaactcagagcaactaataaagtatacacctttaggttcagctcctttataaggttgggtgtggggaaggtgttccgcataccaacaccatatatatcaaggacctgcagaaagtataaaaatgtttaggaaagggcaaaaatatatggaattagaatgcaagtataacactcaagaacatcaggtttactttgcaactcatactgatacatgaacaatacaaaggagcacttacaggaacaggtattcttctgtcatggaaagcaacagtagagacaacataaacatcgctaatacatgctcctttggcctgaaaagaccatttaaaaacaaggaagggtgttcattatttctgacacataagaggcatgaaacgagaactatgtagagaaatttgtaatgttgataccttaaagccaccagcggttcccgcattaatgattaagtctggttgaattgctagaatggaagcataagtcacgagtgatgcaggaactgtgccaacactctcaacccctgaaaaacgaattaacatcaagaacttcacaaaacatcttgaaacactatttcacttacaatcacttaaccacatggatacacataccaagagttgaatcttttccaggacacactatattgatgttcaagtctttatacattcccttaaacataatccaagtcacctcttttggaaacctacaaaaaagctatcacatttgatttcg

SEQ ID NO: 30045 - DNA, 2131 bp, Arabidopsis thaliana landsberg
tgtttttgctagtttaggttacacttaccggttaatgtgcacatgcactctttgacacctagcacaatcatgcacttagaccaacactgaccaacacatgtgtagatctcagccattatccaagattccatttcaatcttaaccatccaagtccaaactgttcaatctcttaatttctttaatcaattcgtaatttggtaaacttttgccaattagtttaacaggtcacaattcaaaactggcccaagactaaaacacgaagttgagaaaatttactactattttccaataccaccaaaatttgcaaaatggtatctaactacgtaaatattcattccacgtcatattagtcgaataactccaccaagaaagtccttaattttaataacagtcaaaatataatttatttcctttatttcaaacatttatttcctctttatggttcaaaattattaggagtatcacaatatatttatgtatttaacttctctccttatgttttgtcaaacacaaaaaaaaaacatcttgtataaactgatacaaacccgtttcttatttctctctcgttttctccaaaagacttatcaagccgcaccatcacaaagcttgagagaaaacgaaagactcgttaatcaagaaaactctcagccaaaaccttcaaagtcaatttgattaaactaaacacatcaatcaaatcccctcgtttctcaaaacccatatctccttttcttctctcaccttgttttagccgtaaagtaatcaccttttcaacttctcaaaagccctctgtttctctcatctccctctctctgacgatgaaagagtattggacatctttggcttctctactcggcgttttagccttttgccaaagcctaatgaattctgtattcccaccagagctccgtttcgccatctcgaaactcttcaacaaattctttaaactcttctccaccttctgttacttcgacataacagagattgacggcgtcaacaccaacgagctttacaatgccgttcagctttacctcagctcttccgtcaccgtcaacgacgcagtttctagcagcaacaacaacacacgtctcagcttgacacgtgttcctaactcaagctccgttactttcggcctctccaacaacgacagaatcaccgacgtatttaacggcgtcactatcctctgggaacacgtcgttgtacaacgtcaagtacagagcttttgcttggagaccaatgccggaagagaaacgagggtttacgttacagatcaacaaaagagacaaagcccttgtcctagattcttaccttgattacattgtcggaaaatcagaggagattcgtcggagaaacgaggagagactgctttacacgaactcaagaggtgtttcgctcgacgcgaggagccatccatgggattctgtaagattcaagcatccaagcacgttcgatactctggctatggatcctgagaagaagaagcgaatcatggaggatctaagggagtttgcgaacggacaagggttttatcagaaaacgggaagagcttggaaacgaggttacttgttgtatggaccacctggaactggcaaatcgagtttgattgctgcaatggcgaattaccttggttacgatatttacgatcttgaactcactgaggttcagaacaactctgaattgaggaagctgttgatgaagactagctctaagtctatcattgtcatcgaagacattgattgttctatcagtttgacgaaacgaggaaagaacaaaaagaagaatgggagctatgaatatgatccaggtttgacaaacgggtcgggtttggaggaaccgggaagctcggtgactctgtcggggctattgaacttcacagatgggctttggtcttgttgtgggagtgagaagatatttgtgttcacgacaaatcatatagagaagttagattctgctctgttcagaagtgggaggatggatatgcatgttcacatgggtttttgtaagtttccggctttgaagattctgttgaagaattatctgaggcttgaggaagaagatatggatagtgttgttttgaagcagatggaagaatgtgtggaggaagcagagattactccgcctgatgttagtgaag

SEQ ID NO: 30046 - DNA, 2056 bp, Arabidopsis thaliana landsberg
gagtgtgactccagcagacatgtgttattcccttcaagtaagactatcacgtggttaataagttatgaattctgtcacatgaatgcatattttggactgtttaagagaaatatcatgaactcatgtttgttgatcttgcaggagacggtgtttgcgatgttggttgagatcacggaaagagcaatggcgcattgtgacaagaaagacgttttgatagttggcggtgttgggtgtaacgagcgtttgcaggacatgatgaggactatgtgctctgaacgtgacggcaagctatttgcgacggatgaccgttactgcatcgataatggagctatgatcgcttacacaggtctactcgcgtttgttaatggtattgaaacaccgatcgaagactctacctttacacaacgatttcgcacagacgaggttcatgcggtgtggcgagagaaagaagctgtactacttggggataagaaagttgcagcgaattgagtctgtgcccatttttgttcatttttcatcaaatttgagattgaatctctctctactcgataaattggtttttgctaagtagttaagacttttaaatgtgttttattagccaaattatatgattgatatcttttggtttgaatgtaataacactttcaaatttcaaagtgagctttgtaaaaagttcaaatgtttcttgtgttgcatttcgctatttgttttattgctttaataaaaatatgatatctcaaagtcgacatttctaccgagaatggtggagagattagtgcattagtcttccttaatcatacaaaaacaactgtgaaaatacagcactactaaaaagtaaaaagtaagaactttttaatgtagaacgtatgagatggttcaattaatcacaagacacttctatggcattgcgtattaaaacgaaaagtgagtaaatagaatttatacataatgatctaatcttgatcttgctaataaaaattgtaaaggcaacaacaagttgtcaaaaatttcaatttgacgtagagataaattctatctaataattttgtaaaaacattcgagatatagtgtatcatttttccatcatctagaactcatttgcgtattttcaagtgtaaatcagaaccttgacacataggctacacaaattttggtcgatatttgtattacttttgtagcataatttggatatccttctagagactagagttctagataaaaacattcatacatgtaactttgtaagtaagcatgcatactaaatataaaattttcaaaagttttaaaagacatcatataggattcaaaaagacgtggggaaaaaaaaggagaaaatgacaaaagttattagcaaaacaatcaaattaaaggtcaaagtagttaacgaaaagataaaagtatttcaaaagtcttcctttcatcttgaaatgccaaaaaaataaaagccgaatgattgaagataaatcaaagttgtctgattgctattgtatacatctaaaaagccttgaagtaatcaagatctgaattaatgtatagccgttgataaggttttatgctttcacattgaactcgatcgtcgtcgtcaaatctactagtctcgttttttagttttaacgtgcttaattacttcactaatttgttttttgttattattttcaccaattttattcattgtgtgaattaagttttgtccacatagtaagattcatcagtataatagtacatatgataaaagtttgtatataatcaaagagtatatctaagaatatctaattagatgaatgtttcagtccacattggattcttctaatagtcactgtcttgttcttaaacccaattaggttataattcatgtaccaacaaatagtatttctataactaatcttttatcaatttactttatagcctacaaataattagaggtggaaaaaaggagagttgggggatgggtggtctcttaaattcgatattatcaataactcttatagaccgcgaatactatattatatagtaaatggggatgtgctaatcatattagagcattataataaatatg

SEQ ID NO: 30047 - DNA, 3157 bp, Arabidopsis thaliana landsberg
ggttaattcttttcacattagtcgctgtgtaaattacctcgcacacacacaagaccataatcacaagtgtgaagtcacaacgaatatctattgagtttgagcctcttcatccatcatatgaaaacgatcacaatgaaatgttgttgtaaacttgtacgtatccattcctcatttccttgagattatttaatatagttacatgtagtatatagtgtccccttatgacgatttcatctctcaatgaatcaatcataagataagcaataccatattaattttgtttataattaataaggaagatgatgaagatcaggatcaggtttatcaacaccgtcaacgttcctaagccaaaacgtcatgtcgaaggaggcagcaccattagggacatcttccatcaccgactcttgtcccggcggaaagaatattccggtgcgtgggtgtgggacccagctctcctcttcgccgctaaatttgagattatggtcggaaatatcttcaaagtagtcgacgatcatcgggtttgattttgcagctttgctgcttatccctgctcgcccttgaaattgcttccaactcctaaatcatcattaattatcacaaaattacatttacttctttttaaatttgttacacattttatagcttgttatagtgtgtatcaaaattttagaaaaaatctttggtaagaaacttgttttttttttaacaactgaattgtaagaaattattttatgaatttattttagctagatttgacaaaatgataactttttttttggtaaagttaaaatttccaaaataaaatatatgaagagaaaattatatctattaagcaattaacttgatgatttatgtgtatgtgggtactgtccacctatgttttgtggctaatagcatttgattaatgaaaataaaagaagaatgatgagaaaagatatggttttgaccttaacagcagctttggtgctttggcgatcccagttcttcccatcaactgtgtataagcctacgaaactcaaatgtttttttaaatactttattatgtaaatatgggattagagtttttttattgatattagtaccagtatatttctatcaatctataacttgatcttgtgttctgacatctctttggtctattctatatataaacttcagaaactgtacgggtagagaatcttgagagtggaggaataagagaagaggatagtaattcaaaagttattcatcagttgttactttgttttttttggttagcttaaaagttgttacttgtagtttgaaagagtttataacgtgatcaatgtattaagagattcaacataattaggagagtggaatattatggaggtatttattgttaatgtaaatttcaacatgtttctgtttgaattttatatgatgtttcgtctatggcatttgtgaatagtttagactcgtttataaaaaaaagaattttggtgttaaaatataaagaaaaaagttaaagagttttgactgcaaaaaagtcttcaagaatatcaaaacaaagtacaaaagtgttattgtgtatttaaataaattaatgtcgattaatgagtgccattggttctaaagaagttccgaatttaatccgattatgataccggatggtgattatattggaagaagtatatatgtttcaacatcacttgtatagttgtagatgttaatgcttctacaaagaaaatcaaagctaggtaagagataaaagaaacaaaccagtacttcaaaacagttaggaaactctgatcataatcaacaaagttttagtagtacatgcatgaggtttatgctattttcttaaagctttttgatctccgacattaagaaacactgagcggagttaataagtaatcaactcaaaaaaatatgcatatcctacaaggtaaaacacaaaatcgcaagtacaaattaacttgaaggagctaaaacaccaatttgccaattatacagtgtaaagattaaggacattatgccacagttgccacttcaagggcgttatatatgctatagacaatatttcgtgtttgtcattgctactttctttaccaaaagtttgtgttaacataaactatttgagtttacattacatattaacatatacattttactatttataaaatgtcgtttcagaaatgtcttaaaatgctgttcataaaatgttttagtgtcgtggtggttccttttgttttgtttttttgcttatttacgttccaaaagtttcaccatggaactttattacaattttgtgaactgtacatacgtatgtatatgtgtataaataactaaaatttagagtacttattacttaatttggttacaacttttttaataggaatcttagaatatattccgtaatgcacattgtgcagcttcataaggaaaaatgcgaaatccaatggaagaaattagttttgaaaaaaggtgaagctgttttacgacagacaaattcaattcaactaatcctttcttttgtatattttagtaaaaagttgcgaacaaacactcaacattgatcttaattagttatatatgctacatacaattggttgttacatcttataaccaatctttatcaaagatacccaccttctgaaaaacatgcattttgtggggcttacaaagttttaagaaactattctatcctaatacgttacaatgacattttagtagttattctaatccaacgtatcatcgacccaaatccctccggactttgaacaattttgagagctatattacttatcacacccaacaaaatatgaaggaatagtggaaggcaaatatacagtatatagttttgcaagaaaaatcaaaactacaaaagttctaatccgaaactatagaaagaaacgttaattagatgcctttgttattattggtgtaagaacctctcatctcaagttctcaacctcaggtgcgaatcttttcaaactttttttttgtttttccttatcatcgcttcctctcgatgcgacataaatttagaattatgctttcaatttataacctctcaagggcaaagtctagctttaactaaaaccaaaaaaaaaataaaaaaaatggttcaagaaagctaaagaaacgaaaaagcataaatcatttaatcatatgatttttatgttacgcttatcat

SEQ ID NO: 30048 - DNA, 3649 bp, Arabidopsis thaliana landsberg
catatatatgttttttatataatccaataatatctgcaattttatcaaagataaaataggctaccttactatttctggaattatacaatattttctcatgtagaaatatggttttgtgttaatttcacactaaggctgataaatataatgttctaccgtacctgatgaaattgcagggtcacaaagtcaagctgtaacagaaataagtaaatgttattgtaagaaactaaaaactatatatgtatgtcagttaatttgtaatacaaatgtcaatatgtcaaaactaacataattaagattgagataattggatgatttgttgggtggtgaatggagagcacgtgcttgagaagttagtagtaagctatagaaaatgaaggataatgcgataacatgtgccttatcccgacaaaacacatctcacatgtaaatatagatatgtccatacatattatcatagaaagagtaccaaaagtgtgaaatctatacaccctaaaataccactagataacactctttattatttatatagtgatatcaaccacctttcatatgtttctctgttttgcaagtaaactttttacatttatatcaaggatattaaattagttttcatattgttagctttgctgaaacccaaattaatgagtccaatttttaattattctctttacatcaaaattcatatctacaattatattcagaaattactagaaaggcatatcttatacatacttgatgtattatagataaattttctctttcttttgaaacatatatatacagatataaatagaggcagatacatgtaacctagccaaaggagcattggtatctcaaacaatatttgccctttctctatctctctctcatcactatttgccatctctttctctctccctctctttcaaatgtcaataaaccaatactcaagcgatttccactaccattctctcatgtggcaacaacagcagcaacaacaacaacaccaaaacgacgtcgtggaagaaaaagaagctcttttcgagaaacccttaaccccaagtgacgtcggaaaactcaaccgcctcgtcatcccaaaacagcacgccgagagatacttcccactagcggccgccgccgcagacgccgtggagaaaggacttctcctctgctttgaggacgaggaaggtaaaccatggagattcagatactcgtactggaacagtagccagagttatgtcttgaccaaaggctggagcagatacgtcaaggagaagcaccttgacgccggagacgtcgttctcttccatcgacaccgttcagacggcggaagattcttcattggctggagaagacgcggtgactcttcttcctcctccgactcttatcgccatgttcaatccaatgcctcgctccaatattatcctcatgcaggtaccctttttatttaattaaacttttttttgtgtcataaccaaaaaaatttgaacctaaattcagattaatcttgaacaaaaaatgtcgaatatctttgacatttaaaggtgtagtgaaacacaatagtttttccaaccatttagctcgattattaactaagccattgactaattaacacactattaagagttatggaatagcattaaaaccaaaacaaaaaaagagttatagaaattggaagagatgttcattttgtcgtttctatttttgtcaacgtatagttttcattttacatgcatagactggataaataacggaaataaaatttaacgagtcatgcgatgttctttctcaaaaaaaaaaaaaaaaacgagtgattcgatatttacttaaagttaaaaaagtgtagaagtccaaaaaaaaagtggaaaatctatttcatgaaatgtatgaggttacgtgacccaattgaaaactctttatcttgtttgagtttgtaaatgtgcgcgtgaggttagacgcgctttaaagtaagtagagaagtaaaaataaagaaatgatggaagcccatagaaacagaatcggattcgtattatctgctctgcgtgacatttgttgcgtatccttacacctactctttctccatttttcattatacttatagcatcagtgtgaatatatatacacccttatctttaatcgggatcttggaccgtaaccaaaacggcatgcagtagttcctcacatgttccgaatatattcatcagctaaaattcgattcaagacattaacccaagtccaacatagttttaagagtatatacttaattattttcatatatattggtttatgtgatgtggacattttgtagtaccaatgtaattcacatataatataacgtggcgtcccattgtggtaaagcttgtcatctgagtaccacaattggaaattctcttccgattaaagtcttgttcattttggaaaattatgacaaaagtctcggtagttatccattatagattcctcgatttcactatctatgttactggatatataatttttatgttgattaattgtatatggcacataggggctcaagcggtggagagccaaagaggcaactcgaagacattaagactgttcggagtgaacatggagtgccagctagattcggactggtccgagccatccacacctgacggttctaacacatatacaaccaatcacgaccagtttcatttctaccctcaacaacaacactatcctcctccgtactacatggtacgttagttaattttcgttttgttaaagtctacatgtattagctagtgatattaagtagatgtcaatatcattttaaccgacattttacgtttctcattcacgcgttttcaaattcaaagaaagttaattgagttggtttgacccttttttgcatatatagttaccatgcacttaccaagacgttatcttgtccacatccgataaacaaagtatatatagtaaacaaaagtccaaataattcttcaaactgttttgttagcaaattatctccaattctatctatatgttttatagttttatttagaaactaaggataggaacaaatggtccttttctttcttgggttggggaggacattagagagtgaagttgtactgttcatttaacacgccaagtgacctatccaaaaatcttatcccaaagaaaaagtgcggtccattattattgaagttattgttattactactatactataagtgttacattatcagtgtttgttgttgttaggcacgtttctcatttatatttatatcatatgctttttggtcttcaagaacaataattttgacaattccgtcaaacttttcttctatacctaatctttacacatgaataattaagcatataattgatgtgtcgatgttacgtgtatacgtatacatatagacacttagtcacttatatgtattgttctcacatctattattggattttctaacagatcacacaataaaatctactctttgacaacgaaaatatttggattttggacatattattcttcacgaagtgttgcaccaataatggaatacaaaattactttgggagataatatacatctaacacataatatatctcttaatcttgactaagagaacaagaaaatggaaagtctactttatacttttgcaagggattcgtaaaaccacatgttattttttatata

SEQ ID NO: 30049 - DNA, 2263 bp, Arabidopsis thaliana landsberg
ttccaagtcgttcaaataactgggccacgctttggctgagttataatatcaggtttgaaattacggtttcatgggtttaatgttcatgtagtctctcgctgttttgaacttgtgcattactctcttttctcgtattcctagtccatgtcatcaataaatgtttctagagcggacgaagagtacttatcttgcaatgtgacatgattgagttttaacaagtccatgagagctgcaaggaagtgtggtttcggtcatatagaagatatggtcaaatccactcgggagaggaggacactacacacttcttgactctgtttcttgcaatcaaagcatattgaaaaagagataactaaacccaatatccaagaaagaaacaagtggaaattaccatcaaaagtgcttatgtgtactggttattaccatcttgttccatctgatacagagaacctaagactcttacgagagtcgcaacctttattaagcctcaaaatactgtaatttttgcttttaaaaaactgagtcgcaaagctttgacaggggaagacacagtcctagtgtttaagaagatttgtatcgaaagtctgtttgtgttgaatcaggaagcagcatttcaagctcctctcctgcatctgtgtacatcccaaaatatgatcagagaacagaaacatatcagatcaggtctttaaatgttaatacacacacaatctttatacctctaactcggaaatcattctcaaaaggtcatggcatttctcgagcatcaacttctcttgtacaaccacttccgctagttgggaagcaagtggaacaataccctccatctgctactggaacattataggttattacaccgcttagatacacgactatcatgtcacatttgtcgcagagccagaaaaacctaccgtgggagcataatcatccacagttgaaatgatagcatcagtgactgcttctgcattcttaattatactgacagctgattccaagttcacctgaaaaaaccttaggagttgttggaaaatagagacaaagaatatttgttttgagttcaaatagttaacagatcagaggagcatgatttaatttaccttcgcgccttctttgaggggaagcctggaaagaacagaatgcagggaatctctgattatggacagagatgaaaggtgttgtatttccatgtcctcccaagcttcaagatgcttaacctgtttaagatatatttcgtatcaaccctgtgtatatttgcttatatcctccatggcttggaataagtaaatgggtttggacctgacacttacttgagaaagaaacacataattcagcttcatctccaggtttttcttctgcgggttgattctctcttgcagaaccaaattatttaacttgataagagtatcccatgcacagagtagttgattctgcaaaaggggatcacttctattttatttcatgcctcataggatgaacaaagcactgaacgcatgattatgtgaaagtcaataaagtgacaagcatgagaagaagtgatgatacaatcattaccttttcttgggaggctacgttcttgtttacatcacaggctctagcattgacaaacctccattgaagcaaccggttattcataagcttcagctgatgagcagattctgtgtcacatgtctttggttttagtggtgaagtaaagggcgatgacttgttcttgctcctgaagaaatcgaaaccaaggttgattagtttacccacgccttttcctcttggaggcttcagttttgaacttggaactgtcaccgcctgagtgtccaatgaccttcctggtgaaagagcccactgagacatcgaacttccatacctggacactgaattattcctctgcaacctattctcaatgcccttagagctattagttctctgtgaatcatcttgtgaccttagtttggtcttgttgttgcctttgctcggtttagctgttaaatcatgcagatacttagaagagaccttgataccgggtttatggttccgggatgaacgatttgtactaagacttgaagcacaggacacatcactcaactctgagtctgtttcatcgttgaaggactcatatagcagagagcatgagtttctccttgatgatgctctgtacaatgcacattcatcaacagaaaatctgccaggaagtatgacgttatcctcatcattgatccacggaaaaggcatacgattttcttttgtgtcaacttatatgctactttgggttggtgcc

SEQ ID NO: 30050 - DNA, 2598 bp, Arabidopsis thaliana landsberg
atggacgcaattagggtcgttaatcccaccaattaaatctccttctcaaatactctcttaatgaaaaacctaaattaaatgcgaatcttgtattattattacaaaaactgaaaaagagttgtattatagattaaacacatgatgatgaccaaatttaacatacacaatctcgccgtcgatttatctaattacggcggcgattagggtgtgacgccgcagtagatctggagaagatcttcgctggatttcttgagagaattgatgtacgattcgtagaagcgtaagaggccgtcgtgctcgaaaggattgtagcggaggggatgttggtcatcgacgagctcctccggcgtacggatcgttcctttgtggaaggagaaaaaccctaaagagtatcgaatctcatctgcactcatcactaccttgtggtaacatgcctttatcctatcgttactccacgccttcatcaccaacaaaaagatttcacatttattgctatgtctaggtgtttcgactaatcgaatttggtttagagctcaccgtgagacccatgccggagagaacgacgaatcttgttggggacgggttaaacccgacccattggccggtcatggttttcaactggagacctccgacgtggttctggtggaggatactcatgaagctcttatcagtgtgtgacacgaaaccagtgtttgcttcaccgttttgctgtctcctgtaactcagcatcctcaacaggtatcgagttgactcggagtgactcacagaatgcttcttctcatccattccatagctttcatacaacatcctcatcaccgtctggtctagctccgccattgccattgcatacatatgtgtggtttgactgcaaatcatctgagatgtgacaacaacgacatagatgaaatgaaagaaagtctttatgtgtgtgtttttaccagaagggatcgtttccctgtggccagagtagtttagagaagtctttgcaagcttgaagctcggttgcataatcgatccccaagctctcatggatccggtaatcgtcaactaccatagacatgtagccatgggacgccttgtggttctcgttcttgattttgatttggtctgggagataatacatctccttcatgccggccagcaagttgtccctgaggtcagatgagacgccactgaactctgccacaaaccaaccctgcccctccatggctcttctgacatcgtccctggtcgtgatccagtgactcgtgcctcgcactagtttatcgctggagaagtcgaggataggtaagcattgctcttcatgtgagtccattggactggatagccaaaaggtcaggtgatgatgatgtatatagagatcactctagcattgcatttatagaaacatgtaaaccagtagttgtcaaagtcaattgtacattcacagtggattcgggattcgattctttatagaaaggacaatacttgggagagatccagttttggctcttttatgcgtcagccttatgattttctttagttaaaaggtttgtcaatattagtccttaatcatacctgattattataatcttaagcacaaagttgagcaatgaaaacattgattaatggtttcacatctcaatacactcaatgaaacagggcaccaacccctatgaccgcagatggaatcgaagacataagatgcactcgcagctgcccgccatttcgtcataagtacttcttcatcaagtcattttggcaagtccatcttagacatcacgaggagcggcttcggaatcgacctgcttttcatcacttgaccgggaaaacagagttactgaagaacagtctaacgttcttagcttcagtaacaagtaaagaacaactccacaaccaaatcctaaggcggcactcgagccagtcatcgacacagcggcgcagaccagcatgatgaaggaatcttctttggagttcatgtctttggaagccattgccagttcgattcccgcgaatagcaacagaacccctaaaattccaatcggaaactgactcagaatccttacaaaggagtttccaaacaccagacccacaatcagtttcccgattccgagaaaaataacggataatccactccttgccccaaaccgatactgaccagctaacccaccagcaccgtgacagacgggcatagcgccaaaccagcaccctattaagttcatcaccccaacgctgatggagactgtagtcgcagagagttccttgtcaaacaagtcattggataatttacaaactgcgatcactgagttcagtacagagagtggaatctgaggaatcgccgccctcagaaacccgattttccaatcatcccaactgattctcagaatgtggaacttcgagggaccgaatttaaggtctttgaaaatggatggatcacgtatgaaacagagcactaacccgagtgcgaacacgatcagcgcagatggaatcgaagacagaagacgcagtctcctccggcgagactggctttcgttgctggaagtctcggcaagatctccatcttcaacttctctgtcgttgccagagccggtggacagaatgatgaagagaagagcagct

SEQ ID NO: 30051 - DNA, 2798 bp, Arabidopsis thaliana landsberg
  unsure (1)..(2798): unsure at all n locations
aggctatcaataatgttaaccaatttatacatatttcagggattacggtagaagactacgcacaacgtgtatgggccgaagcccctgatgagaagtacgagtgcgagtttgagatgcctgaagactttggaccagtgggagccatcaagattcagaaccaataccatcgacagttgttcctcaagggggtagagcttaaattacccggcgggtcgataacgtttacatgtgagtcatgggtggcccccaagtccgttgacccaaccaagcggatattcttctccgacaagtcctacttgccttcccaaacaccagagcctcttaaaaagtatcgaaaagaggagctcgagaccttacaaggcaagaaccgcgaggaagttggtgaatttaccaagtttgagcgcatttacgactatgatgtgtacaacgatgttggtgaccctgacaatgatcctgaacttgctcgtccggtaattggaggcctcacacatccatatccaaggcgttgcaagaccggtcgaaaaccttgtgagactgacccctcttcagagcaacgctacgggggagagttctatgtaccaagagacgaggagttctctacagccaagggcacttcattcacaggcaaggccgtactggcagctcttccctccatcttccctcagatcgagtctgttctattgagtccccaagaaccttttccacacttcaaggccatacaaaatctctttgaagaaggcattcagcttcccaaggatgctggcctcttacctctgctccccagaatcatcaaagctcttggnnnnnnnnnnnnnnnnnnnnnnnnnnnnnntgccccagttctcattaacagtacttacgaacctctatcctttttctcattttagtatttcaattttctgtactgttgagactacaactaaactcactttctaatatcattcacattgattcaggggatagattttcatggttacgagacgacgagtttgctcgccagacacttgccggccttaatccttatagcattcagctagttgaagtaagctacatactaatagtttatgttctgttttttccaataaagaaatatctcttaatgtctaaaagttgttgctagtaaaacatttggagaaaaataaaaactggttttaaagttaaaaaccccaggtaacgttagggcctctccaacggtactctaaatcctactcgaagtaacactacttgttaatcttattttagagtatactttttcttaatatataaagtttaaaattcattggggggagacgtataagaagggggatgatttaaataaatatgtattaaatcattagaaatggtttaaggatgtcaataatatttatttaattccaggagtggccgttaataagcaaactagacccggccgtttatggtgatcccacctcactcattacttgggaaattgtggaaagagaagttaaaggaaacatgacagttgatgaggtaagttaataataacatgtttttgaaaaaaaaacgcatatgacggattatttgcttaatgaattatattatatatttgtatgcaggctctaaagaataagagattgttcgtgttggattatcatgatttgcttctaccatatgtgaacaaagtgagagagttggacaataccacattatatgcttctagaacactattcttcctcagcgatgatagcacattgaggcctgttgccattgagttgacttgtccaccaaatatcaacaagccccaatggaaacaagtcttcacgccaggctatgatgctacgtcatgctggctatggaatcttgctaagactcatgctatctctcatgacgccggttatcatcagcttatttcccattggtattggaaacacactctttatttcaaaatagatgatcctctcatatatggttttttcttgacagaaaaagtagtttaaatttttggtacctaatactttatacatgcatgtgaaatatcactaactaggaaagagatgtataaattttacaggttgaggactcatgcctgtacggagccatacataatagcggcaaatagacaactaagtgccatgcatcccatttataggcttttgcatcctcatttccgctacaccatggaaatcaacgctcgtgcacgccaaagtcttgtcaacggaggtggaatcattgagacttgtttctggcccgggaagtatgcattagagctaagttcagccgtctatggtaaactatggaggtttgaccaggaaggcttacccgcggatctcatcaaaaggtgtgtttgtgttttttttcctatatgtttaaatattacaaccacaattacattaaaaatctaatcaaatctttttccattaaaattttccgccataagggggttggctgaggaagataagaccgcagaacatggagtacgtctgacgataccagactatccatttgcaaatgatggtctaatattgtgggatgcaattaaagaatgggtgacagactatgtgaaacattactatcctgatgaagaactgatcacatcggacgaggaactccaaggatggtggagtgaagtgcggaacataggccacggagacaagaaagacgaaccttggtggcctgtcctcaaaacacaagatgacttgattggtgtggtaactacgattgcatgggtcacctcaggtcaccatgcagctgtaaactttggacagtacggatatggaggatactttcccaaccgaccaacgacaacaaggatcagactgcaacggaagatctgcagatga

SEQ ID NO: 30052 - DNA, 2888 bp, Arabidopsis thaliana landsberg
  unsure (1)..(2888): unsure at all n locations
acactctctcaacaaaaaaacaaaaaaaaaagacgttctttctttgtttgtatttagaagaaaaatggctaccaattacaacgagaagcttcttcttaattatgttcccgtttacgttatgcttccggtaactcactgtcgatcactgtttgagttaacatcttttggctaatgtttcaagagttcaactataatacatgaattttttattacgtgtatgcaaataactttttttttttttaacaacctagcgccttggaccagtggcgaaaggcaaggaccctttaatggccccattagtctgagtgttgattaaaagtataagctgactatactagatcttggcggaaatttgtatgtgcttcggccagaactctttgattataaacgtacaaaggataagtgactatactagatcttgccaaaaatatttcctatcatttagttatgactttcagtccgagacttgaatttacggatacaagggaacatataaatctaattctttgaatgacatagccaccatcatatgtgatttagcaattacatagtttgtaattctatatatcttttcacacgctaaataatgtgcattttcgcatttatgcatatataatggttcaaaatgtttttttggttttttgtnnnnnnnnnnnnnnnnnnnnnnnnnnaactatcaatgaaaatatgttgtgaatgtgacagttgggagttgtgaatgtggaaaatgtatttgcggacccagaaacgcttaaaacgcagcttaaacgtctcaaagaagaagctggcgttgatggcgttatggtcgatgtttggtggggaatcatagaatccaaaggtcccaaacaatatgattggacggcctacaaaacgctgttccagctgatcgcacgtttgggactcaaaatccaagcaatcatgtcttttcaccaatgnnnnnnnnnnnnnnnnnnnnnnnnnnnnnnnnnnnncccacaatgggttcgcgatgtcggtgacaatgatcccgatatctactacactaaccgtaaaggaactagagacatcgagtatctctcaatcggtgttgataatcttcccctatttgccggaagaaccgctgttcaggtagtaaacttcaagaaaagtacacatattgcatgtttttgaccaaaaaaaaaaagagttgaaataaacaaattactacttttgttttttccattagttgtacagtgattacatgagtagcttcaaagaaaacatggcggatttgatagaagctggggtgattgttgacatcgaagtcggacttggcccggccggtgaactacgttatccttcttacccccaaagccaaggttgggtgtttcccggcatcggagaattccaggttagttttgtaaatttagttacacttcttttgtttttatgatttttgtccctcactaaacggtgcgttttggtgattttagtgttatgacaagtacttgaagaaagatttcaaggaagcggcggcgaaagcagggcaccctgagtgggacttgccagaggacgccggagaatacaatgacaagccggaggagactggatttttcaagaaggatgggacttatgtctcggagaaggggaagtttttcatgacatggtactcgaacaaactaatttttcatggagatcagatcttaggagaagccaacaagatctttgctggacttaaagttaacttggctgccaaggtattactataaacatatagggtaggaaaaaaaaactaattattaaaagaaaacgaaacctaacaaacgaaatgcttgaggtaaagagtgaactgattttcttcataacactagaagactaaactgaatacgggatatctagaacaatagttgaagttaacttgtctcgcaaggtaacttgtgtagatgagtctaaattgagtatgtgaatgtggtaggtttctgggattcactggttgtacaaccaccacagccacgctgcggagttgactgctggatattacaaccttttcaagagagatggttaccgtccgatcgcccggatgctctcaaaacactacggcattctcaacttcacttgccttgagatgaaagataccgacaatacagctgaagccctaagtgctcctcaagaacttgttcaagaggtaatttaaacgaactgcaccgaagagaagagatttgtaaggttactcaatagtcattcatttgatataggtactgagcaaggcatggaaagaaggtatagaagttgcgggtgagaacgcattagagacctatggagccaaaggttacaatcagattcttcttaacgcgaggcctaacggggttaacccaaacggtaagccgaagcttagaatgtacggatttacttaccttcggttatccgatactgtctttcaagaaaacaactttgagctgtttaagaagttggtgaggaaaatgcacgctgatcaagtaagacatcaaaccaaatgacattttgttttcttttgctcttttgttatgtaataaaaacttctatgttttattcgaataaggattattgtggagacgcagcgaagtacgggcatgagattgtgccgttgaaaacgtcgaattcgcagctgacgctggaggatatcgccgacgcggctcagccaagtggagcattgaagtgggactctgaaaccgatttgaaggtcgacggttagttttattttatatgatcgatcgtctaatcacaaagaaagtaagggaaagaatcaaggaagtaagaataagaggaggtttatcaaaaataaaaataataaataaagagaataagacgaggcatttgcaactctaagaggttaaaatttcttaaatgagtctgagtttcggtgtgtgtttgggtgaccataagaataaacg

SEQ ID NO: 30053 - DNA, 2770 bp, Arabidopsis thaliana landsberg
accgctgcttccaggcaacacgtcggcttctcttagcagactctgaattctccggataaaatattcctggaatattcatacttccacctgcatagtgtagagtgcatcgagaatgaaacaactaaatggaactatggaagtgatgggaacgataattattaaagacggtagaagaacaaacgcgaaagcaagaacaaaagagaaaatgtaaaccttgtctagcagccttcgagattaaagcgcgaggtaaaaccttccaattgaataaccgtcgtgaaagttgcccgcctctccaccagcacatggtcaatccaccatttttctttgcagtagggttaaccccagaatccaacaatgtcccccttcttttaccaatagcagtctttgaccatgatcgtgtcgaagcaattagaatatgtatagctgagcccatcactacggcagcatcgacatggcttagccactcaagtgaaagtacacgatgatgcaaatttgcctctagctgcccaaaggtaattaacaaaatctttcattaggaaaagaaaattgatgcacccctaggttagtcactaatgcattacacacagaaaagtgctcaagagttgatattgaaagactttagaagatagttaacttttaagcaattggagaacgaacaaaacattcaacattcctggccacactaaaaggtgaacagaaattgattaatgcaagcttttcaagtaggaagaaaacgaaccaaagctaaagttctacacagcagaggatcataacgaaaaaatttgaatatgacattttcgacatgggcaagttagtgtggttgttcagagattgagcttttgccaatacaatgattcaactctcaaaacaattccacatgccattgcaaaatgaatgttttaggaggaagaaacttgtgaaaaacttacatcaaccaataaatgtttcaagcttgagatatttgatgccttcagaatgtgttcacgccaaaagctggagtgctgtggattcaaccatggaccaaccaaaagtccttgtagtcgactttccaaggaaagaatctggcatatgatggccagaagatgactgttcttctcaaaggattgaatgttagctacttcactttccgaaagacctcgtaaagccccgagactcatattaaacaaacaatttatctcactaccggcatcctcagaagaatttttgcaggaatgacaccatccacaattttctttccatgcatctaggtagagactttggatgtttcgccattgaaatttggtggttttcatcaatatagtcctcacctgggtagaagctatttcttcatcagatctcatatcattggtacggattggtgacttacgtatcatctcttcataaactgatctagtcatctgagcaaatatgtattggtttctgtagcctgtttcagtctgcacatttggtttagttcctttccgtgtgtttattttagccaaattttgggaattcatatttggctctttcatgatatccaacatgcttgatgatgctggctcatgaagtctctggacatctgaaccattttgtacagtttcagcagatccttcagaactcatattaaggatatctagcgcagtagctgaatctgatatcttccggcgagtcctaggaccatgattatgtgaccatccattgctggttgctttgttcagcttttttttagcaccagatgttgactgtttctctgaagctggtagaggagccccaaacccatcaattgaaggaatcattcctttgactgacttatccatgcatacagacatttgggaattcagaccgctgattgtccttactggcctaacagggatatccaagtgttttctaattgcacttactacgccagcatagaaactactgcatgactttagctgctccagcacaaggttcacatcagtcacatgatagtagttcaatgagcctgtgccatctgtatctatcctgcaaattcatagtggacgacatcaaccaacctactaaaatgtataacagttcctacaatcaacatatgaaagaagttcgtagaaataaatgataagaatattccacatctgtatacatggagggatagtaagggttaccatgtgcatctaaataacgagcaaaaaaggcttttcacagatttaaacatgcaattcaacttattggaaaatttgacgggaaggacgcatagtttcacagttttatcatgttatctgtacattttagttaattctgtgtaatttagttaatcctcagctagctaaaattagggggtaatgtttttaaacctaaaaccaacatgtatatccaatgctcgtcagactactgatttagacaaattttttgctaatattcatataaacatttgtttgtttactatgaaaaaacaattatagtgatccatatccacaattttgattccattgagatcatgcattaaccattcttagctatgagaatcgaagaaagaaacttacaccaataagtagccacaactgctgtagtattttcgaccatgcggatcaatctctataaactctgcgcctcgaatttgcttatcaggcttcaatcctggtgcacgccgatcaaatgcacattcaggacagtaccagtccccctcaggcaaaaggtgactggcaagaccgacacacttagaatgatatgcagccggacaaccatcacagcacagtaagctcccattcattttacagaaacagcagtcgtcactgttcccgtcaaatgaagt

SEQ ID NO: 30054 - DNA, 2022 bp, Arabidopsis thaliana landsberg
  unsure (1)..(2022): unsure at all n locations
gaaggcttcatgtagatctggtggtatgcacccaaacccgaagaacagagtaaatgatacttcacagtgtgcgcccttcagaaaatattcaggctcttgttggggaatttgtgaagagctatttaactcttgtgaaggatgaatcagagaatttatcagaagataaacttaagttactaagcatatctaaaggaaagcttattgactgcataagaaaggcaaatgtccacaaaacacagttggcggatgataagactttcacgtttgcattactattagcaattaaacagatgacatggtatatgtgtttcttcggtatccatgtggcatatatctatcttaacaaggtatgtcgaagctcaaatcccatgaagataggattgcacaccctatactcagcagttgaaacagaacacaaatcagatgagacagacatcacaagatcacatccatcactagctgttatccaggggattttacagtcagaatttgcccgggggaactccaaagcattacttttggctgagaaagtgttttggtcctcgctgaagaggctactgatgtccatggggttatcttacaatgacctcaacagtccctccccaagtggaaatcgaccaaatgttcatgaagccatagaacttggtttcctgccgatttcagactgtctaattatctcttacgagtgagtattatttcttcctatagccatatcctcattatcaatgatcatagcttttcacagttgaattttttgggaactagaaagggaaccaaagaattgatatattgcggcctgaaaagcattttcagtcttttagcatggtgattgtaagagataccacaaaatgttgttacttctctgctcgtgaaattgctgcattattgttctttgcatgctaaaacatagctttatcgattctttgttcaatatcttttagtgaaattgtcttttgggagtagttaagctaactagtcctttctttttcatctaaggcaaatttctccatcttttcctgtggagaatttcagcgtcattgtagaatatggaggtccaaatgcctcgcccagatattcttttccttcaaagttggattcctttccttcctttcatttcataaaagtggagctggatatgcccagtgcatgcgggcaactctgtgcaggtgttacagtaccttatagtctcaaaatgataaaggtgagaaacattcaaccttttcttacaagttatattggtagattgtatattacgatggaagagtctgtgaaaagggttcaaattcagagcagtagatcaatctgtatcacaaatagtactttcaatagcatatgatcttgattggttttgcaacactgaaaattatgcaagtttaacattagtatgtactttaacctaaaattgtgttgtcacatcagtggtattcacgtttattccataactgcatattttgaacgctttgtttgaatatgttccagaatatgcagttacgagaacctatgtacactattatctcttttgtagggagacgaagttgagacgaaaactgggtggttggaagaagtgttgaactttgttccacttgaaaaagtgtgttatgcaggatcttccgaaaccacaaatgaatctgaatttatctccatgcctcaagaatctgaaagaaaacgtgggataattgaacagggtctctctnnnnnnnnnnnnnnnnnnnnnnnnnnnacaaaaactgtcgataaggagatgatcatatccagaagaagtacataccagaaggtgttagcaatggaaaaagaaggagtgcaagttgtggagcgcgattcagatctacctgtggacctgatgttaagtcctgcagtttgcctactctggtatgatagcgaaactgtcagtaagaagtcggctgcaactattggtacttgctcacgttcactttcatggattggagatatcgccactaatgtttagacgtcattgagtttcagtttcagcacttgcattatggtaaattccaccaaactttg

SEQ ID NO: 30055 - DNA, 2766 bp, Arabidopsis thaliana landsberg
taataatatagccttacaacttttgacatttaatattggttatttattgttggcccttttgggtttagctcggaaccagaggatacaaaactccaagacaagaatcaccacggattttctgcacagatttttggtccaaaattttcccccacaatatcaaccaatggtcttgtaaatacctaattattttcaaatcctacataattttcaattttgtttcatttttgtgcatcaatatataaaccaattttagttaattcaacttagcataccttaagcttgaatctacacacagtaatacattaaaggttttgggtgttgggagattctacagttctgcaaaagtgactctagtaacttgggccttatctactgtcgttgtcattatgtgtcatctccttttacatatctcaccaatttccccctatttaaaacatctgaaaaacgtcaaataattatttattttgtcggcaaaatgaaacatcgaattattctcttatttgttttccattctcatcatacgatcgactatatgtgtgaaattagccctttctcaaaaaataataataataataatatgtatgagataatttggctcaacttataagatacagtatatgattgagaattagagactagttagatcaaaggctcatcttagacgagcaagtttcatattggcaaggtcttccaaataccatctatcaattctcaaaaagaaatgttatatgaaaacaattcaagctttatagtttatacccattgatctcggagttcaacagatatatctattatctttaaaagtgttttaaactaatttggggttgtgatgaggtttattaatgttggaattagatggagatgtgaaagaaagttgagagagttttgagtattatggtgatagatgttgatatgcaaatgtagacaaacaatggtgtcccacttaaattcgagtgtccttaagaataaaatcacaaagtctcaacaaaacaacacaaacccaactgtaagtcacatttacaaaccctaatctagaccctcatgttcccttttgcttttaatattttacttatcaatctaaagagactactactacgttacaaatttacactgatcattatcctttgcactaatcttaaataagaaaaaccttcttctaaattctatccgggcgagttccaataataccgtggatgaccgaaccataatttaaaatttggcatcattacttaaagatcattacgcttagtaatagtatttttctttgtagctgaggttaggatttttacatgttaaatgtaaaattttgcgtttagccattaaaataatttgggtttaataagaaaaatactctacttgtttcatcaaatattattcgtaaattgtaaaaccaataacaaaacacaaaacaaaatgttgcataagattaaaaaaaaaatcaatttgatgctatttttcggttaaaaaatgaatacttgtaacaacgacaaaaagtaagaggtattaagaaaaaacataatagcaaaataaatcgttctttagaccttccttattgatgggttcttagatcaaatcttaacatttttgatctaccaaataataatttaaaattagagggttcttagtaagatgagagaaagtataaaaaaaactcttaattaagagccaattttactttctaagaacccttttttaatatttttattcttattttgttttatataattttttaagagattttataaactttttaagaaaccattgataatgatgcttttactgatcaagttttctgtagtaaccaatagaaaccacaagtatacacaaaggaatttttagagccccctttgaacactagaaccaatcaataaaacaaaacctcttactacattgaaccaatccagctaatgatctgttattggctgtctcgtaagaacttaccctcttttggtatgtaattttttaattttaactatttcttgtcgtttgtggtgtttttcttattgtacttgtttgtccgattcaattagcgtaagagtaaaaacctatccatttctttggtaccgccctttatattctcttttcatcattcttcaccattcaagtttcaaccttttgctcacaaaaaatttaaaagtaatttcatatttacatctttatcattttgttggacaaaagaaaaagtcgaatagtatccgatgtgagatttacatgtcacataaccattgcctctgggtggtgccattctttttatattttttaatacgtattttgtaagcctagaaggcatagagctatgaaataatagagtactagttgctcatatagatttgtacaatacacaatacagagcatagttaatggttatatgggcatatatcatagcaatattttctttagtaaaataacagagtaaaatgtctcctcgactcctcctggtgaccatagatcgaggtgatcccttatttgattatttcaatgaattccaccaacgtcactcttttttttctcccaaaagcctcaaccaaacattttccctcccaaatgtgtagaataataactgtaaaaaatcacactcttatctgcataattacactaaacctactgttctgttctcatttaaccacaaacccacttttcaatttctctaattctctacccaatttttttttttattcaatgggaaaagaaacagagtaagaaaatgaaaatgagtgaatattggacaacaatggcttctttacttgggatgttagccttttgtca

SEQ ID NO: 30056 - DNA, 1892 bp, Arabidopsis thaliana landsberg
ctaaaagtttagtaagtgcttctcgttttaaaagaagtagaacatcagatatgtgggattactttacactagaagatgagaatgatggaaaaatagcatattgtaagaaatgcttgaagccctacccgatattgccaactactggaacatcaaatctgattcgtcatcataggaaatgctcaatgggtttagatgttggaagaaagacaacgaagatagatcataaagttgtcagagaaaagtttagtcgagtgattattcgacatgatcttccttttctttgtgtcgaatatgaagagcttagagatttcattagttatatgaatccagattataagtgctatactaggaatactgctgcagctgatgtggttaagacttgggaaaaggaaaaacagattctaaaatctgagttagaaaggattcctagtaggatttgtttgacttctgattgttggacttcacttggtggagatggttatattgttttaactgcacattacgtggatacaagatggatattgaatagcaaaatcttatcgttttgtgacatgcttcctccgcatactggtgatgctttagctagtaagatccatgaatgtttgaaagagtggggaatagaaaagaaggtgtttacccttactttggataatgctacagcaaataatagtatgcaagaagtattgatagatcgtcttaatttggataataatttgatgtgcaaaggggaattctttcatgtgcgttgttgtgcacatgtcttaaaccgtattgtccaaaacggtttagatgtgattagcgatgcattgtctaagataagagagactgttaaatatgtcaaagggtcgacatctaggcgattagcacttgcagaatgtgtagaagggaaaggggaagtgcttctatcattagatgtgcaaactcgatggaattcaacatatttgatgcttcacaaagctttgaagtatcaacgtgcactaaataggtttaagatagttgataaaaactataagaactgtccctcgagtgaagaatggaagagagcaaagactattcatgagatcttgatgccattttacaagatcactaatctcatgtctgggagaagctattcaacttcaaatttatatcttggtcatgttaggaagattcagtgtttgttggaagttcatcaatacaacgaagataaagtagtccgagagatgatttttaagatgagactgaaatttgataaatactggaaagagtatagtgttattcttgcaatgggggctgttttggatccgagaatgaaattcaaacttctaaagcgatgttatgatgagcttgatccaacgacttcacaagaaaaaatagatttcctcgagactaagattacagagctttttggagaatatagaaaagcatttcctttgactcccgtcgttagttctacaagagcaggttctcgtgtttcagaacgaggaagtgacaacttggacgtgttagatgtaagtacttaactttgacattttctattattgccttattagtttatctaattacgtattcatcgttcctgttggtagctagtataattgagtgggttgatgaaaatgagtatagttagtaaatcgaagatttcattttgaacttcactcatatctgaatcaatagatctgcactttaaatttgtttgtttaacatcttcctttgactatgtagtagctctttattttgttgtatttgtcttgtttgtcccagggtgatcctctttatgttaaagttaacaaattgtcgtccacaaagactcaacttccttatgactactactacctgaattactgtaagccccctaagatcttgaacaatgctgagaatttaggggaggttatcagaggtgacggcattgc

SEQ ID NO: 30057 - DNA, 2705 bp, Arabidopsis thaliana landsberg
aaggcatcgttcttgaaaaacttgaaccaacttcctgtcaaaagagaaagacaaagatctcaagttgatgtttcctgagatttagaaaagagtggtgtgatttccacaatattgcccagtcctcgttctatcatgtgtctgagctgtgtaagttcattgcttcctcgactctttttatatagcctttccattttaacgcgctaatagcctctctttcctttttttttctctactttcttctgcctttaattggaatttttcgcctggtttacagatgaagatacacttagctcatttcatcgttttagacctcaattcatcagttcctctgattctcaaccaacctattacaatccatatgaatttgatcacacatgctatattgagtgccaaccctctgaagataaatatctacactctgaggacgtagataacaatcaaccacctcctgaagtaagaaaatgtgtatcagtgccgtttgttcctcctaacgcattccaagcaaatgctattgcagaaaacatggccagtattatcaaagaggtattcatttgccgaccttgtttcgtgtatttagtaattgcgtttacaggcttatcaatcttctcattgtaccaagtttttcaataataagagtgtggtggatgctagagctgaaaacaatgtttcttccttacagcgtattgatctattactgtttcgatttgccatagataagaactcaatgcacaccatctgaatctgataatggccatggagcaatcgaacctgaggattacgttgagtatggagaggccccagtctgtgtatattttcttaatggatattgtaaccgtggtggccagtgcacgttcactcatactcttcagtcaacaagaccagcctgcaaatttttcgcatcatcgcaggtgcattacgttaccatcctagttgggtcgtcttcagagtctatgctaataagtcgtttttgcagggatgtcgaaatggagaatcgtgtttgttttcccacgccatgcgacgacggacaacatcataccttccacctccccaatgccttccagaagaagatggctcttccacatcgccccttctggatttgtttcctacttcttctgagggatgtatccttgtgttcgatgactctgacatgcatttcacctcaagtatagccaaccgttatccgtcctggagaatactctcaacatcatcgtcttcagagacgcttttctgtgattcatcacttgcagacacaagaatcttctggggtctcaatcatccctaccagacaatcatctcaaaagcaggaagggagaacccaatcccgtggaacgaagtgaaatgcgtgctgtggttccttaacccagacagctatgctgatactcctgagaagcagaaaactattctgcagaatttcttcgagcacatggcaatcagattactcggcgataagctttacaaaatccgagtagttctcacaatgaacaacgtcagattctcactcttacaggtaaaaaaaaaagtcttgctgtatcagcaccttcattgttttgtccactccattcatttatttgtgtatgtgttttttttttgtcaaggttgagaagctagccagagaaagcttcttcttccttggagagtctttcccacacgattcagaaagctttggtgcattccaagacacattaacaatccagaagcctatgctagtctccagaccaatctcctatgtctttaatctccatccgccttctgacatccagtttggtaactacacctctcttcttcgcaaatctcttcacaacaaatgatctcttaccttttgatacttttgtcgtctctgttcctaagtcatcatatgttttgtgtttcatggcgatcatgtgaatggccataaccatgtaattcatgtgacgatctcttacttttctatctgatgctatctttaattattcgaaccagactcataactaaccctgacgatattataccagaagtgacgccacgtaaaaaaatgtggttaggtcgtgaatttgggttaacatcactggcctcactcaatttcaatgcgaaaacacatcctaataaatgtgaatcaaccggtttggataacgatatggtaaccggtccttttttttggtattgaatgaattgattcggaccccccaggtatctctatagctattattgtaaaatgaaatccacgttcagatatgtttccaaaaaattctaaaatttccctcttgcttaaagaaaaacaataatcaaattcataacattaaatgattagagaggatcaaaaattaagcttgaagaattaccaactccaagtgactttttgatactcttttaactttcattattgcttctcacctttctcttgcttcctctgcaaccctcccttgattagcaccttttctttactgttttttattggcaatcccatgattttacgtattctaaaaatgttaatgattttttgtgaccagacaaaaccaataacgaatgcaatttttaagaaatgaacacatatatatctagttttcgctggtagtggtagttttacttgaaatagtaaaagaaagaaaaacagaattcaaaacaacaccataaagctagatccaaaaataatgcttaaaccgtttgtaatgatgactacaatacctacaaaatcaaatgaaccttccaaataccctcataaacttcaa

SEQ ID NO: 30058 - DNA, 3184 bp, Arabidopsis thaliana landsberg
tgttgttgttttcttgtgtctagtttctgtatactgatattgtttggcattttgattccttgtgacaatttaaaatgacagcaggagcaggggtttaatagaacagcacaaggtgatgataactgggagaaagtcaaatcagggacaaatttgagtatgacagagaaaggagaatgagagaaaaaggtgagtctacatcgcctggtatctttttgtattgcaggatattctatattcatactccttctattcctgcatgaacagagggtatgatttgttagtatgaaaaaccaaagatgacgcatcagtttgcacttgagactaggtttaagccaagcatattgatccttttgttgcatgagtctgatactgggatatatcataagtggaaatattgcatagtattttcaaatctcagttaatggagaggtgaataagaaattatattgatatgttttgtagtttgccatctgcgttagggggtgtggtatgttgtgcttgagttgcatagtataagtatcggttgttgatctccctgtcgtttcgtgtctctgatttgtatagactgatatgcatctaatagaggatatataccttttctatgtttcttacatatcgtttgtaaattacgtttatttgcttctggatttctcagttgtcttttgtaacctcttttatgttgcagcctttgcaccaatgaacgccgcagcaccagactctagagacttgaattggaatgcacagagacagccatttgatgctgagagatacactcggggattgaattgatcattcatcgcatagcttcaggttcttggtactatcattttcagtgtgtcacggaaaagtagatctagcagaagttcgagtcataatccgagaacgaaagtttatctgacacaacacggtctggcatctgattgtcgaccacattacaattgaagaaaacgtgctacagaacagagtgatcgcacttcctagactagacggtgtttgatcattcagtaaccatccgctcatgagtcacaatccccttcaccaagagagttttgatcctgaattttttcactataagtatgtagttcattttcatccattatatctttctttagcactaacaatttgagtttgattaggaaacaccgaaaaggttctatcaaccgtaaaataagttcacatgagtatttatgcactacaatgtttgtttggtttaactacagttttactattggcctcttcaagatggattccgagatgggcttttaaatttggaaaaggacatcttgaaactaaacaacacagattcgagtacgaatcttgacatcagttgttttgaaaaatgtgagtaatggatgacatttcaatagatgcatgtatgtattcatttcatggggaaatggccaattcatacacgaattctaacattttgttacgatagcatattgcgaaattttttgtttttacatcacatttaaacatttggccaattcatttacacaaactgacatcatttggaagttggtgtatgaatctacacatctctatagttcatctacttatagtagtgactaaaaccatagttcgtgtattaattggctgtctgccctcatttcataataacctgtattgcttttgaactggaaattatttttttgagaatgatgaattaaaaccaaaagtaggagaacaaatgtaacacacaaaaaaataagaggcaaaagaagaattatacaactgaaaatactaacgaaagaagaaaagctcaaataaccccaacaaaccacgaaactcagaaacaatagaagatgggcagtaagtaaaatcaatcaaccactagataatacaatcacaaagtgaaatgacaaaaaactaagagatatcacttgtgctatgtacttatggtgagaagtgagaacctacgatgatgaggcttggcgagcacgaacgagtgcattgagttccctcacttggtttctcaatcgctctgggttgcagaaaaagtccacaaatacccgcctttgaagttccacgtccttggcgtgatgcttcacaatctgcaacaatagtagtatattcagattgtctatttcactataatctatatatatacattcataggagaggaattgagactcacctcccttttattgcggtgctcaagcgtcacctcttccactgctgtagagagtttggagttgattttccccatttcatcaagttctttcatcagtggctaataatacatgaaggaaacaacatttagttaaactttcatatattggtttagattaacgactaaaattggtaactgagaattattttacccaaggtgtcaatatgggttgtgccgtagttgaagacgcaaagagcagttgctgcagattctgaatatgggtacacctgagaaacagagaagagacaaaagtgatatatgagcatcgtaaatacttgtttctgtgaaaagagattgagaattctggactcacagctcattaatgcatctatttcggtcatccggaagggaattctcgaggtcagactgaagagacgacagatcggattgaagagcaactatctgctgaatgatggctggagctgagacataagttgataatccggcttgggtatctataacagcaagagatgaagattatcagccaaaactaggtttggaaaatgtcagataaaggggaaataatttgtgtaaaatgatagtgttgactacttgagtgaatgctcaagagatctctaactccatgtaaaaagctgtcacggtcatctactgctccttgttcttgcacatcagatgcagcttgtatcagtgccgaacatcgcccctgtatatatagtgaaacgatgaattagtttcaatatccaaaagttgcaggaaagcatggacggtaactatgaatatgaccgtaccacacggcttcttgtggcggagaggtagccctgaagttcggattcaattacttttagcagagagaatgctccaagcatgtttttcttttctagctgacatgctaatttcaagaactggtgtcttgctagctgattaaccagatgattgatgaactgcaacaaaaaatttggaatatcaaagacagattaacaagtagatcttcgtatctcatacatggaaacacacacagtattgtggccaacatatcttgaaaagatctaa

SEQ ID NO: 30059 - DNA, 1612 bp, Arabidopsis thaliana landsberg
  unsure (1)..(1612): unsure at all n locations
actaaaacccaaatagcagtgtctttgacttcagctggaaccaatgttttgttgttgaccccttttgagaaccataattttgttgcagctaaaatcatgtcaacgttatcctcgattgtagaatgactatgtacagggtgccatgcaaacaagctcgtcggaatgaactcaaagatcaaattgctgggagatacaaatcttgatactaggcttcgcttcgagatatccctaaatcgataataaacaaagttagcaggccgaaacaatggagacaggaagaaaaagatcaagcaaagttggctgctcctcatcattccctagcacggatagtgttctgtaatttaacaaagagatgggcagagaaaaaaactctaaagatagagggagagagagaaagagggagcaaaataccatattgtaaattctcctataccattatgcccaataacgagatgaggacattttggtatcttcttcagttccatgatgcatgatgatatgcaaggatttgcgagtataacatattcttcggtaggaccactgcaaattaaggatacaagaacattagcaaaaattccaatgatgatccaatagctccaaatagaagaaggatctgacaactattttaagagaagagtaatgaactctgatgagagtacctccaatgcgagttcatggcccagacaataaggtttccactcttaacagctgcaatgagattgttaggatcgcacaccaccacacactgcacactgtcatctgcttgaagttttgtcacaagagaaacatgaccagttttcacctggacaatcctcactgcattctcctcaaaacaggctgatgtacaaatcaaacacgagcaatcagtttccctcttcctgcaaaaaagggaaaataataatctcttagctaatatctttattctgtatctctgtaccatatgaaacaataaagagtccaaacctgcaataaggtgttttgatgttgccagttaaaataagatgcagcccgtctggagtgaagtgcacattagatatctcgagtgttccctgacgaaatgtaacaactaacaactattagataactagagaggaaaaacatttttttgagaagaaactacgaaaaagtttaatgtatttacatttccactagatttgtcatccacaatggggagtatggcaggagtgtgaccaatgatagacgggaatcctttgcttggtgcctcagctgacatcttgtacataaacagggtcctaactctatcttctgtagcaaagctcaacacgcaaatatagatttcatttccaacagtcctgagtaatactgatgaaacaggcatgggatgaaagtagcagccaagcagctcaacagttttttccatctcattgttgatctttacatctctgttgagctttaaatttgaactagctggaaattcctgcacagacgtgcatttctcgctagtannnnnnnnnnnnnnnnnnnctgtagaaggtggttcagagacttggatgcccaattcctcaccaatattggcttgacaatcctcatattttgaagctggaaatgaggatgatgatatacttgcactttccaaagcatgagctgacct

SEQ ID NO: 30060 - DNA, 2636 bp, Arabidopsis thaliana landsberg
taggcagtaagggcagaaaatagaaccctaggacccatgtcatgcagagactttgctgcagaccgcatttctgcaacagtctcaatccgaaagccatcaagtaaagcagaagcctctttcacatttggggtaattatgtcagcaattggtagtaatctctctctgcaataagaaaccatagttaatcaacaacataacacaccaaatcactgaagtcaaacacataatgacaacaaatgcataaaagctttacctaaagatagagagaatagaagaaccagccaaaacgtgaccactagtagataccatcacaggatcaacaaccaaagctaccttaaacacaacaaaactatactaagcattgaaagtttcaaaattctgaaaaacagaacaaagcgaggtaatctctaccacgaactggaaaatctgatagattttgaagaagaacctcaacgatctcagtagaaggaagcatcccagtcttcacctgagaattcattactcactaattgatcaatcataagagagtaatcaatcactaatcactaatcataagagcttacgacgtcgaattcgaagtcagagaggacggatttgagctgttcagagataaattccggaggaagaagatgaacagattgaactcctcgagtgttctgagcagtgactgcggttatgacggaagcgcaatacacaccacgagctgcgcagactttaaggtcggcttgaattccagctccggcgccggaatctgatcccgccactgttaaaacttgcggtacctttctaacgctctccgtcgtcgtcattgacgccgtcgtacttctccaattcgccggccaactcctaattcctcctaagctattcatttctcgtcctttctctttattttattttattttattttattctcatcaaataatttcccattttattgactttaatgtgaaataaaattagtaaatttcatcgattttcatgaattatcaattaccgcgaaaaaaattcaatgtaaatcaattttcaataattttaacaccaaacttaagcacgaattatttgtatgagataagttaatacttgtggtccacgaaaaagggacaatataatcaaaagatagataaattgataaatttgaaagcaagcttttatataattgaagaatattcatatatacaacgtttcagactaattacaaattacaaattacaaatcacacgctattttgaacaccttattcattcggacacactaaaaagggaccaaagccgtttatgttttacaaatcagcataatgcatcttcaaatcaaaatgcatcttacattacacgtgtaattattattgatatatatcataatatatacaagaggctataccagtttaccgagtggtttggtttggttcaatgttgtggcatgagttgagtcaaccatggaccatgaactctgactgagacacaagctacaacaccaagggctcgagctgtctctaaaaccctttctttcaatcctccacctcctcctactttcttcatctctgtttcaaccattctcttcccattttctccattcccagccaataaagctcctcgagccgctttgtatatacaacttgtaactctctcatacactgtgttaccttctcccaaactcttccccaataatcctctcatcatcttcttcttctctccatcttcttcactcattgttgtttcgattatctccgttagtcctgctccttccttcccatctaacaactccaacaatttctttgccatactttctgtttcgctttcgctctttgcaagcatttgacgccaaatgagcaagctgcataacacaaatccttttaagatgagaaagtactctaatttctatatgagtcttcttaccaaatgtaacaatcgttcataccttgtggttaccacaattatattctgaatttcagcttgaatatccctcacgcgaaagaggttgagctgaaaagtttccggtagaacttctggtgttaaaccagctacctgattcaccagcttcaacaacccaagcctcactgccaaatcaactctttctcccttgcattctgatagttgaccttatgaaccaaaaagcaaatgaaaacattttagtgctataatctataaaagaaggtatttctagacttcttcaatgagggtaacaagcaaaacctgcagtgtccataacagttgacttggacgtggtattgactggggatagaaagcttccacccgttttgagagaaatacccatggaggatctctcaaccacattcaaggctgaaagcgtattgttgtgttcttcccactcttctttgctagacaaaagagttgatatccaccttcgtgtcactggtagtgattcgtaggcttgagtgggaggtccataacgcttttcaaatgcttttgtaaggtaatcaaagcctgctggtccttgcaaaaagggtttcatgattgttatgcgacctatgcctatctctcgcttaagttcctgttggatatagaataaaaaatgaagaaactgataagtggacaagcaaagcaaaagtatattttttctttctatccaaagctattgctgatgaagaggaagaatgaagaaaaaagagcttgtacata

SEQ ID NO: 30061 - DNA, 3256 bp, Arabidopsis thaliana landsberg
  unsure (1)..(3256): unsure at all n locations
taattaacatatttttatctaaacaattttcatttcaaaccctcagataacgtgggaattcatcgagtaaaataaaaagataaagcataacacgtatcaaaccaactacacgttttgaaacctaaagaacaactctgtcaaccactacttcgagcaaaacaccaccgcttccagcaccaccgcatcagagccctgattctcggccatcttataatcattagtatttacaacaatacaaacgtaacttatttgaattcaattatgagggaaacaaaaaaacacaggaaatgaaaaagaaaagaggaagattcattgtattcgaaatatatatatatatatatatatatatatatatctttacacaaaacttgacaaaaattaatcgtttcttgaaaatatgaataaattcattttcaaaaccatttatcaagtgttttttggcgtagtggctttttttgaaagaaaacaagaacactgatatttgttttttatattttgaagttaaaaaaaaaaacaagaacactgacaagaaaatcatgggttttgagtgcacttggaaaataatatttgtgttatagtgctaaatatgcttcttgctctgcggagtttaggaaaccaagatcctaatttcacagaaaataaaaatatgtaaaaaagaatatgaatgatgtctcaccttatgttccattattcaactttctccgattaataatctctccattcaacgttcttccactaataatcggaaaacacgctgatgtaataattcgatatgttcgacgcaagcgtgatgaaaataactagtcctctgttaaatccgttgtaatttccattagcttgatgaaaataacgactacatgtacaaagcaaaatttaattttaaatttattttctctctaaatttttattatataaactaaaatcctgatagaggcgtaagacatattacataaaaataaaataaaaacatgaaagcattattctctgttttgtgtcttgttcttttggtttcggttttaagagcagcagtgacaaaaccagattccggaatcttcaccggatgccttcgcaatcggactagtccggagaatccaatcaccgatgccatcttcacctcccgtaacaccaccaccttcttgtcttcttacgtgtcctacacgaaaaacaagaggtactcgagccttaactaccagaaattagtagccatcgtggcggctaaacatgtatcgcatgttcaggccacggtggtctgcgcaaaggctaacggtatacaactccgtatccgtagtggaggtcatgactacgaaggcctttcttacacatcgtctgtgccatttgttatcctcgatatgtacaatttgaggtctattactgttgacgtgtcaagcaagaaagcatgggttcaagctggtgcgacattgggagagctctacacaaagatcaatgaggcgaaccaaacgttagcgttcccggctggcgtttgccctacggtaggagtgggtgggcacataaccggtggaggatttggaaatctgatgagaaaattcggaatcacagtggatcatgtcattgatgctcagttaattggtgtcaacggaaagctcttggatcgagctaccatgggagaagatctcttttgggccattcgtggcggtggtggtgcgagtttcggagttatcctctcttggaaaatcaacctcgtcgaggttccaaagatcctgacagtgtttaaggttagcaaaacattggaacaaggaggtactgatgttctctacaagtggcagcttgttgctaccaaagttcctgaagatcttttcataagagcctggcctcagattgtaaaaggaacaaaactcggcgagagaaccattggggttgtattttttgctcagtttttgggtccaaccgataagctgatggagataatgagacagagcttgcctgaattagggctaagacgtgaagattgtcacgaaatgagctggttttacacaaccttgttttgggccaattatcctgtaggtacaccaacacgcgttcttctagatagaccgtcgactccaggagaatttttcaagagcaagtcagataacataaaacaaccaatcccaaaagaaggattggagaagatatggaagacaatgttgaaatttaactttgtatggattgaattcaacccttacggtggagtgatggatcggattccagctactgccacagcgtttcctcaccggaaaggaaacttgttcaatcttcaatactctactatatggttggacgcaaaggaaacagagaataagctgactatgatgaaggagctttacgaagttgcgggaccttacgnnnnnnnnnnnnnnnnnnnnnnnnnnnntaattacagagacatcgatattggcagtaatccgagtgatgagacaaatgtggatgaggcaaagatctatggatacaagtatttcttggggaatttgaagagactcatgcaagtcaaagctaaatatgatcctgagaatttcttcaagaacgagcagagtattcctcctgttcgtgtaatagagtaacgttactctttgataagatttatttagtagtagtaataagtgatgtgggcttgttaaagcttaagttttcactattgtcccatttgcattatgatagttatgttatatttgatctttactcaataagtaatttcatgaaatcggttttaattccttattacacattaggatagatcagttatactttacctctataactcagtgtacgaacctgaaactgtttcagagaaaacacagggagctaggagagttcaaatcttatccttggaaccctcccagatccgtttcaatctgagtttttttgttttttgttttttctcagttcagaatcttctgttttagaacaagtctttgatgtgacctcttcttcaaacgacttcttcttaatgttctgactataataaatacatcttgtgtatgtataaacgtaaaaaatggatacatatgagtatgacgtataaacgtaatgatcacttgaccatgaggccaatgacttaaagtttagtggtttatgttactatttggattcaatatgacttaaatgtttttggttttagtgttaaacctgccataatgtcaattttactatttagattcaaaatgagctcactgaatttttttaaattagatttatgtattacagatttaccacagaataaataatcaacattttaaaaaaaaaatagcgacgttcggct

SEQ ID NO: 30062 - DNA, 1575 bp, Arabidopsis thaliana landsberg
tttgtaagaggttgtgaaaagggaagagacaaccaaaagccaaactcaatgtcaatcgttggtgctttttttagaggtcatttaaaagatgcaagtagagaataaacaaatgcttatgcttagtacaagtattctccattttggatcatagagacattacgattttctctctacgtggcgatgattaccgaaattacttcaatcatttaaaaccattaccgctgaatactgaatctaaacatgtgtaacccatcgattttaaggttgctattcatgaaatcaaaggtttgaggaactatggcattatgagtcctgctccatggagcggtgcttaccaaagcttccttaactccttacctccaaacccgcccaacaacactttaacctctctccttgtcgatgagcaaacccagctcgctctcgtgccggcgagaacctcgactatggaatcgttttcaacgtcacttagtcttttgtccgtggccattgtttcgtctaacgttccgtacgtggatgactattcgacaaaccgtgttaccacttgcaccaattcgctttatagctttggcttccaaactctcatggatcctttgtcgatttcttctagctatccttttgtagcttttgcttgtcccttgttcttatgttgtttctgctttgttcctagccttataacccttgtatttgtggtagttctggtttttgttatattctgatgaatgaaacaagtattttgacccccaaaaaaaaagatattgtaaatcgtatttattaatatgaattatatttggttatcctaaattatttttgattatattaaaattaacgcgacttaattatatatttgtatattatatttaaatatggttatattaagtatgttaaatatgaaacttgagagtatatattaatatcacccataaatttgcaatttataccacaatgtggtgcatatatcaaatacttttgattatctttaaagtacacaaactttttcgatttccagactaatacaccaattaataggctattatatgcctcaaaccgaccattttcatggtgcatccaacgttcacatttggatacatcggaaagaaatagaaaaccatacttctgaacaaaacaacaacaaaaaaaaaaatgaaaaccagaccataatatttagtccaaccaaaaaattagaaaagcagacaaaaaaaatatgttacctctgtgtctaatgctatattctctcctttgttatttatctacttggattgtaaatttggctcctagttctatatatatatatgaaggaacatatccaaggtatgtgttatttgttaacttaatcattcactagttgtttcgtatccaaaacaagagttgttgaaatcttcagacacactaactattcggctccgggttctatcaagatccaaagtatgtggtataaactcagtcattccacactaattatttaatgctataaatagctttgatcttctccatatttctttatttaaagatttggcttttttacctttgctttcacttctattcattgtcttcctctgttccattggtaacttcctt

SEQ ID NO: 30063 - DNA, 3912 bp, Arabidopsis thaliana landsberg
catcacaacatcacaagtcacaaagaagccatggatcttagcttagatagtttattctacaacaccactcatgagctcaacacgactacaaactttcaagagttctttagcttccctcaaaccagaaaccatgaggaagaaactagaaattacgggaatgaccctagtttgacacatggagggtcttttaatgtaggggtatatggggaatttcaacagtcactgagcttatccatgagccctgggtcacaatctagctgcatcactggctctcaccaccaccaacaaaaccaaaaccaaaaccaccaaagccaaaaccaccagcagatctctgaagctcttgtggagacaagcgttgggtttgagacgacgacaatggcggctgcgaagaagaagaggggacaagaggatgttgtagttgttggtcagaaacagattgttcatagaaaatctatcgatacttttggacaacgaacttctcaataccgaggcgttacaaggttgtttttttattttataatattaaactttgtttgactttcgttagtaatgttacatatacttacttaaaaggttatgtgaaacagacatagatggactggtagatatgaagctcatctatgggacaatagtttcaagaaggaaggtcacagtagaaaaggaagacaaggtctagtgcttttttatttaattatcattaagctaaacatagaaactttttaagtagtttattatttaacgtattactgacatttgagttttattttcttgttttctctatgtgtgataatgatttgatgatcttcttctcagtttatctgggtaagtacacacttcaatcttcatggattcatgatttccccctcaaatttctcgggaaaataatgatggattttgacttctttatttttgtttgattaaatctttattaggaggttatgatatggaggagaaagctgctcgagcatatgatcttgctgcactcaagtactgggtccctctactcacaccaatttctctgtaaatcatcttttctaaactttatgtctctttgaccttgttgtatgatttatttatataatatgataatggatatttgaaggcggagaattatcagaaagagattgaagacatgaagaacatgactagacaagaatatgttgcacatttgagaaggaagagcagtggtttctctaggggtgcttccatctatagaggagtcacaaggtccttttaaattacatttatataactttatataatacatagtttaataatgtgaatattgactttgtgtgagttttttgtactagacatcaccagcatggaaggtggcaagcacggattggtagagtcgctggaaacaaagatctctaccttggaacttttggtaattcatcatgccgatgattttgattgttaaaacttaacattttcaattgcttgtgtcttacgaaatcttttgacactatcataggaacccaagaagaagctgcagaagcttacgatgtagcagcaattaagttccgtggcacaaatgctgtgactaactttgatatcacgaggtacgatgttgatcgtatcatgtctagtaacacactcttgtctggagagttagcgcgaaggaacaacaacagcattgtcgtcaggaatactgaagaccaaaccgctataaatgctgttgtggaaggtggttccaacaaagaagtcagtactcccgagagactcttgagttttccggcgattttcgcgttgcctcaagttaatcaaaagatgttcggatcaaatatgggcggaaatatgagtccttggacatcaaaccctaatgctgagcttaagaccgtcgctcttactttgcctcagatgccggttttcgctgcttgggctgattcttgatcaacttcaatgactaactctggttttcttggtttagttgctaagtgttttggtttatctccggttttatccggtttgaactacaattcggtttagtttcgtcggtataaatagtatttgcttaggagcggtatatgtttcttttgagtagtattcatgtgaaacagaatgaatctctctataacatattattttaatgaatctcctttgctaagtccttctctcttcgttacgtattttcgatatattatacttattcatgtgctaaaaaaggtgaaaacaagggaaatatgttggaacaacacaaaaggttgcatgaatatatctaaactatgcgaactattatggctattgatagaaacatgaacatttagtagttgattttatggctttgatagttttggcaattgattagaatgttaatctctttatagagaaatagtaagaaaatatgtaaagagaatgtgcatggagctgaaatgacccatatctaataattaggtttcttgtcactttatttatctttttgaaacacattgttcttttaagtacagagaaataataagatgaataatggtaaatatgtaatgtctctccaataatgcgatatgctttattgaccatatcgttccacaacaatccaacataccttcaccacctcatttctaaattccctccttttgtctctttttcacacccccaccgtatcagcttttccctaaagtttcaccaaaattttaaaatattccctcctccatcatatttagtgattttttttctttttgatatttattaaagttagtttatactgtatctaaaaaatggagaatttattggttggaacttttaagagccatttactatgtcccaaataaatatgggggcagcaaatttactgtaacccatacgtggggtaaatgaagtgagtagttcaaagttgaaacttgaaaacctttgatctttaaacataatgtccttcgcacgtgttttccacacgcgtggagtagtttgcagaaactcggaagcgaaagatggttattgggccttggaccattataatcacaaatctggcccacttttatcttttattcgaagcacgtttgcaggacattaatttgatcgtgcttttcactcgtgaggaagagttggtttagaatccggagagaaacgtagttattgggctccggcccaagtttaatttcaaaactcacttctcataaacccaaattttgggcatatgatttgagttggacaggatgtgattctatttttttttgtttctctaacaatataatgtcttgtgttattttgtggtgaatatgttgtagggttcaaaacattatagtccacatgaaatcatatttttgggccttgatattttcatatcaatcaatcgaattaataacacattaattgcatcgaaaatgtggtttttgtttgttataccaaaatacgaaggcaaaactcttccacgcatgcctctaacttcatccagttctgttcgttatgataaaaaaaaaaaatataacaaaatctataagatttctaatttgatcagaactttataaaagtctaataacttttgtcacattataagcttttaggaaaaaataaaacgaccgaccttatttaattgcattgtcctaacttcccaaacgttttaatgagattttgcgtaatagagaaacaagccacgagttcgattcacagccacaataatctttctctaccaaataaagacttgatctttctcttctccttctatatccacgcgtcaattcgtaaaaccaacggcttgaaccaccggcaatagccgctggattgcggcggaggattaatcaaaaaacgcaccacctgaaatctctctgtgtacgctaatggctccgacgatattcgttgatcactgtatcctcacaacaacgtttgtcgcatccttgttcgcgtttctgcttctatacgtcctgcgtcgccggagcaagacgattcatggggtctgcaaatgtccgtacggaaccc

SEQ ID NO: 30064 - DNA, 2891 bp, Arabidopsis thaliana landsberg
tcagtgattatgtgatgctttaatgcagaatcttaagtcccatcattgttgtgcccgttgtttctgttgtgagccttgtcctattccttagaggcttcccactggtaacaatttcaactaaagtattcagctttaacaaattttaactccttcactaagtcattatgtgatctcttcggattttaacagcttgcaaactgtgtggaaatcggtctaccaatgctgattctgttgatcatcacacagcaagtcgggctttttattattttccgcgctatatatggtggtgattgtttagatatgtaatattaaatcttgctactgttcatcttgcagtatcttaaacatgcattctcaaggatttctatgattcttgaaagatatgctttacttgtttgcctggctatcatatgggcttttgctgctatccttactgtttctggtgcttataataatgtttctaccgcaacaaaacaaagttgtcgaacggatcgtgcctttcttatgtcatcagctccctggtaggttgattactatttgacttgattcttcttttcttctaaggtctaaatatctttatactcagtcactcaaactcatctttcaggattagaatcccatatccattccagtgggggactccgatattcaaagcgagtcatgtttttggaatgtttggtgctgcaattgtcgcatctgcagaggttgttattcatcatattagtttctagcttatgttaaatattcttcatgttacatgctacaacttgttcttatgttatgtatatccttattttctttagtctaccggagtatttttcgctgcatctagattagcaggagcaacagcgcctccagcacatgtcgtctctcgtagtatcggtctacaggttttattcccagacactaagaaagttttttttaatcttttcgttttctgttctctctgctaatgttctgaataagtctataagctgttatattttcctttaagggtattggtgtgctccttgaaggaatatttggttccattactggcaataccgcgtccgtgtaagttctaaatatctcttgctatatgtgctactatcctttcagaatttatacaaagaaactaggtatataattcatcttgatgatatatacagggaaaatgtcggtctccttggcctcacacgaatagggagtagacgagtggtgcaggtttcaacgtttttcatgatatttttctccatatttggtttgtctttcaaccctctaatcagtcatcttgactaagtatagaaagtagccgttcatgcgttttaaatccgcgtgttttcaatgatcttcaggaaaatttggcgcgttctttgcgtctattccgcttccaatctttgcaggcatatactgtatactacttggaatcgttggtgagtagcattttgtatatgaacctacactacctgatttcttgtaaaagccggggctgcttatgatacttttgttatgtgattggcccagttgctgttggaatatcgtttatacagtttaccgacactaattcgatgagaaacatgtacgtcattggtgtctctctcttcttaagtctttccatcgctcagtactttcttgccaacacttcaagagcaggatatggaccagttaggacagcaggaggatgggtaagcctttcaaagaaccattgtttgaaacaccattttacggtagtatagggagtgatataatatttctactatatagtgtttctttttcttaaatgtgatgtcgcggtgaattgtggtgcagttcaacgatatacttaatacgatatttgcttcggctccgttggtggcgaccattcttgcgaccatactagataacacgttggaagcaagacatgcaagtgacgacgcaagaggaatcccgtggtggaagcccttccagcacaggaacggagacggcaggaacgatgagttctatagtatgccccttagaatcaacgagttaatgccgacacggttcctttgaagactgcccctgaacgtttcttctgtatttggaaatgtaagatatgattaggtgcataccttgtagcttcattggggaaaaattgagtccagtggatacaaatgaacataggcctttcatggaaaaagctatttttttgcaaactatataacttttgttactagattactttgcctttcatatcattagcataccttttgaacaagtgctttatacctcatatacaaacaatttttgttctttcattgtttcttagagcagctccaatgcaaggttctctcactatatttgtggagttctctgattttttgataaaaaaaataaatgaaaactaaactaaaagaagagaatcgattctctgtagagagtttatggaggctgagagagcctcacacgtggcaagctatgattggtagaaatttataacagaacatagaaaaataaaaatggacgctggagagtttttttctttctctccgtcaaatctatttctcttcttcgcgatacagttgctctgaggcgaaatgcaaattccggtggagtcgagtctccgacatatctgtttgggtcgctatagcaccgtcgaatgaacgaaggagaatcgatggaggagtaaaatctttccgatttggagtgaagtcgatcaaggaagctccaaaatctttccaaggtatgaatcaagccatttctgaatttagtcttagattgtttggaggctctctgaagcattgattttatgagctatctgtttgtgttattctgtatctaagtatacaagcacatgcatgacaatcacaatccattagacattaagaacttttattctgttagtgagttactcgacaaaagattgtgcagaatactccgcaaagctgtggcaa

SEQ ID NO: 30065 - DNA, 1012 bp, Arabidopsis thaliana landsberg
aaaaatgaagaaactgataagtttacaagcaaagcataagtgtattttttctttctatccaaagctattgctgatgaagaggaagaatgaagaaaaaagagcttgtacatacagacctgaatgtgctcaagaatggagcgggatccccttgactattgcaacagcacggaagttaccagactcatcttcagcttcacacaacctgtgaagttccttgagtaaatcccggtgggtgctttcattctcacggtcattagctggggcagagagtttccgcagagtagccaacgcaaactcaagcatctttccaaggtaatcgatatccaaggtgccggagttgagcaactaccaataaaagatgaaatgagaaccaccctctaaaatatataaaaaaggacagacacgtaatatgagaccagagagatgaggcaaacctgtgagagaatgtccagatcaatagtttcagttatttctactttccagctatctggtaccatctggcaaagttcgtcactcacttctttcataaggttagagatgcagctatagtctggcttctccaatttcatggattccatgacattatcccagaaagctctctccatagtctcctttatccttctctgcaacacacatttacaaaatcaatggcaagaacatactataaccagaatttgtaatgagtccaacaacaatgtgcagaactgcaaagaaagcaaaccttaagattgtcctcttcatccttgacagtggatccaccaggaaagttgaggttcccatcatgcaggaactcattcaccatcaactcattctgatttgaaacctcgtccacagtgccattactgactctagagggtccagatgagggtggagtatcatccttaaataaagaacgattaacacgatttgatccttcaacacctatgctatctttacttctgctgctggaactagacacagactgaactggagatgaagctgggcttggagaaaagaaatgtgcgagctgatt

SEQ ID NO: 30066 - DNA, 2490 bp, Arabidopsis thaliana landsberg
ttgaagtttaagtttttctatattcttactaattaaatcttgcattagtttaatcgatatgaaactgattaatttatatcgagtatggcaacattttgtgtaataacggaaatctgaggaccaaaatccacactaattttcggatttgtgaaaagctaaatattcgtcaataattggggacgtgatggaaccaatttataagaggaaataaagtaactccaagtttctatttccacaaaaggatataatctccaagtttgtagtaatattgaacacgtgtttagataaccgagaaaaagatggattggttccataattagtgttaaaaactctttaaccccaaattcatgaaaaaccaaagtttagttatagagacatacgtacacgtgttcaaagaaaattattggcgatggaaaattgggtgtatctgcattttcgtcattaccgtcctttacatggaattttggtagatcctgctttaaatgccttcacttctgcttctcccaaccataataaattgatatggatgcgatccattggtatttggtagatagatggtattaattgccccctcttaatggatttctttttaattttaaatatctaaactttgcctgaactatacataaattccgtaactatgtctataattatcatctcattgtttcaaagtgatacttttcttctgcaaacaataaaattgttgaagtcagttgttgactcaaggtttattagaacaaaagtcaggtttttagctcattaaagtcaaccggataaagacgaccggtctaattcggtttgggatttagaaagactctatatcgctcagagggtctaacgcagacgcttttcaactttcgagatatttttcttaggtatatatttccaaatgttacggcgtcgttttcaaaaacatatttttgttgttgcgtagtagtccttcggaaattctttgcttcctagttgaagcactcacaacacacagcttttgtaggaatccctaagcttaaagtctctattattctctaatctcttcttcgccgacgacttctctcaccaaggcgacgttttgatcaggcgatgatgagtatcccaatggagttaatgtctatcagaaaccctaattccaccttgctctatagagctcactctcgtccgcctgtgaagctctgtgctccacctcgttctctcctccctagccgacgccatttcagtgctcctcgagctgttgtttcgtatccaggaatacgtttcggctttacctcgccggaagtcttgcttaatcgatccgtcgttgctttcgctgcatcccacgaggattcggtgagtagtgtggttgtgctcaaaacttctaatttctctgttgggtatctcgaaattcagatgctttatcttgtaaattgcttgaggctagaaaaaaattggactttggtgaaatttatttgattaagcaatataatctgccaatttcaagtgaggtgcaatttggggtttgaaattatcaaatgatctgtgattagctaaagaacatgttttgattattaccctttatcgccattgttcaaatagggagaatcaggtgttgaggtggggaaggagaagagtgatatagatgttgaagatgatacatctaaggaagcatggaaacaaactcttgagtcttttaaagagcaggtatcaaagatgcagagtgtgtcatcggaggcatactccgttaactcccaaaaggcgatgacggtcttgaaagaaacttctgagcaccttaggattcaagcggaaaaggcgaaagaagagttgggtactaaagcgaaagtggttagtgaagagggtagagaatatattttgaaagcagcagaagaatctccatcagatgtgaaagagattgttgaagcatttgcctccactgaggatctgaaaaatgtgtcccgagcgaatgattttcatgttggaataccttatggtaaacatgttgtatatcttgttcatcttttgtaagctttcattgttcgtgagtaacgggataacaatgtttgtatactttacaggtctactcttgcttgtgggtggttttattaacttcatggtatcaggaagcattccggccatcaggtttggagtcattcttggtggagccctttttgcactgagcctggcaagtctaaagtctcataggaaaggagagtcatctacaaagttcttaaaaggacagatgggttagtaaagtttttcaatctgtattaaccctttctcatatcattcacaaaagctagccccagttactgaaatctagttttaacaaccagaattgtgctttgattaggaacggctttgataacccctctgatatgcatattagctaaccatgaatgaattagtttaagttgcattattgatttgtctagaaatgagtcttgttccaatagatacttgttgaatcctagattttgagtttagtcaacaaattaatttttcactaatctgatttttgag

SEQ ID NO: 30067 - DNA, 3197 bp, Arabidopsis thaliana landsberg
taatacacgatattaaaaattgaatactcttaccaaatagttcctttttgtttgtttatggatataattgcagactcatggtttagaaagtaaaagtgtttttgccatgtgtttaaataatcatttataggtggatgttggagccaaactgtgtgaacatttaccaaaagcagaagataaatgattttattttataaggtaagttaattattggagtaatacctacgactatatcgacggtgacgcaaccaccataaatatgaaaatgcaaaagtattgttaactagagaggtcttcaaaaggacgaccacgggaacttatcgctttctggtccaatatttagtattttgcaagttatttccaccaaaagctccaaaatacatgtacaaattaaagtagctgattattaatacaatgcaatgacaaaagtatggcctaaaccagataaatatagagcctagtaagaacgaaaatcgcaaaaggagactagtaatcacattaaactaaatcaatatatgtgtatgtgtgtacaagtgaatccaaaacttttggtctctaaggaagacatgtaacaggagcatatgtcgtgctggtgtaaggatagcgtcattgaaaagaaacaagaacaaacgataaatatatatttccacaacagttgatgcgcgtaaaagcaaaacgtgattaacagtggaaattatccataaagtgaaaaagacttgaagatcacaaatccgagttttggcagtaagaaatatggttattggatttgaagttgggttaatattgaaaaagtaaaagttttttcgaatatatcatatgaactcaacaaacaaatgcaacgggcccgacaactcaatatatgggccacatccgaaacgagccgacccacgtaatggaagtcccttgccaggtcacgtgttttctccctctttgttcctatcggtcccttcttttattgttttctttaatttgctgtttcttttggtcttatgaattttgaaccattcttatgaatctgaaggtgaatcgattcttcggtacagttttctctctagaacatgtaaatcgttatgtagttccttaataaattgagagaaacgaaaaaatgtatttgaatgttttgatcaatgatcgtcattcgtttatggcttccaatagaaaggtttgaagtttgaattgggaaaagtgttgttggttcattacatactaccccaaacgattgatagtttcttctctttactcggctttaacggtaactatatctttggaaaacagaaaagtttttgagtggaatttaaaaaatgagtatagattacaaaaataaagaaatcatgtcaagcaaccatcaaccatgattaactaaatcattacttccacatatgctaaacagctaatttacataaaattatattatattagccacaacaagttcaatatcccctcaaaaaagaaacaaaatattgcttctctttcaagaaacataaaatttggttgataaataaattaattaattaaactgggaaaataataaaattaattcaaagttgattatataaacagaatgattaaataagaaaacgcaattaacgcgacagactccaaaaacgatgtaaaccaaaccagtcaaccattttgacagccttttccccgccgccagaaacgcaaacgcgtttctcacacgcgcccactaactttcaatgatctcattacgcggcgtcaacgcagacaacgacgtcggcgaaatcgccggagctttacctgagtagaccgggacagaagcgaatcgggtcgagaagcttcgtaatccacctagtccgacgtattcatcctcctcgtcgtcgtcatcgaagttcaaagagtaactcaaaggatcgtattgaaacttctcgcttgcgtcccaatcgcggccgcgtcgtggatcgcgattgaatcgacgaatgaaagtcttccaccgtggaccagcaacgatttctgaccactctcggatcttcaaggatgctcggatccaccaacgtggctcgtcgccgtggtcgccgctgtgattactgtcatcgacggttcgaattcgtccccaggaggagtaaccaacggcggtggagcttcttgatcggcggaagctggggaaacaacagcaacgttgatcgtaccgggtatcaggatctcgggttgggtccgactgcgaaagttccatgggccgaaactcagagaagttttttcttgggtcaaaagactcgtgatgataatataacttgattcaagttttagctgtaaaggattatgattggtcctatttattatatgcacacttgacacttgtaatataaattaagaaattgttattttttctatgttattatatgcacacttgacacttttacgaatcatggctgtaaatattaaaaccttagaaactcaattatcgatcaacacgattgagaatcataaaaagtgttaaacaatttcttaggctggtgcaaacgagtcttagaaaaaataaaatatcttgagctagaatccgttataagatagttcctttcctaacaatatttttaggaatacacttgatttgatatttattataaaaactactaagggaacgagttgaacaaatgtgatccggcgggtacaacaaactcacatttcggatcatagtacgaggggtacaaagattgagcagatgtcactgtctttggcattatcacaatctcaccattaggattgacaccagcgatgcaatacccatctcctaatttctcaaatatcatcatcttagaccattcttgttgctcaatatgatcttccataatccacatctctgcactagctttggtgtaacgtatgcatcctaattttccttggtagtttaccaaagtcaattcatcgaaactcacttcactgagctgctgattcatatgcagagttatgggcatctgaatacgatcaaagctttcgtgtctaacgtcgaacctcactagctcatagaattcgggatcatcccagctttctacatgtgctatgtaatagataaactctttgatacataaaccactactcctagcttctggagagtgattccaaatgccttggatgtcaaggctcctccattgctgcttcattggacctcccactaatgtgaaaacttgtttctcaactggatcatatccgaacaatccatcacacgagttgctccatctatc

SEQ ID NO: 30068 - DNA, 3849 bp, Arabidopsis thaliana landsberg
aaacttttacacttcccacagattgttaatgtgcttaacgactgactttgaaccattttcttttatcaagaccgataatattcctacaaaactcaacaagaacttgtctgagacagcaaactggtctaagattcaaaattgaaatcgaaacacgagtcaaaaccttcgagtagacagcaaaacgtttgttgaattgaaagttcaagaaacttactaattggtttagagaaattcaatagatgccggaaagactttgccgatcactggagaaattcgccgggacgacggagagttttcgtcctcacagatttttctttctttttcgttgaaacttaatgcctctggatagattatttattgtttttaactctccttgggctctaaggcccaatttaggccccataaaggcccaatgtttggaaaagaaatacggctgaaggagacaagccgattacgaaaaaaataaatacatatccaaacacacatcaacaatatatgctaagttaagttttggttcatgcctacaatatggtgctcaactgaatgtcacatgtcttcttatatagagaaatccataatctttcaagctaagatcaattttcgtagatagagagtcgagatcactctgcatcatacgtgatctcattctctatctgcaaaatttgttgagtccgtgaattttttcaaatttaatatgatataagctaataaatagttttgaaagtatagaaggaatgtagttatttaaaaatcaaacatatatatgaatatacattctaaaaataaatttcatgaaaaatttggtaattgtctaaaattataaagaaaaatagataaaacctttttaaaaacatgagtattagataaacatatgatatatgcaataatctaaaagagaattaagatataacaaaaaactccaaacataattagcaaaacaattgtggtgaaaaaatgcaactatttgtgaaaaagtatgaaaacaaaagacttttaatgaatagacacaatttttaaatattaaaattttgaagaattattaatttagagaaaacataattagataattagttgactagagatatgcactgtgtagaataataagcttcaaaaaattgtttaatatctaattgacatcaaagattcttcaaactaaccacaacgaaaattcagcgcggcaaaattagccaatcaaagactccatttttaggttttgttgtctctttcttcttcctttcttcaaagaagaagatttcatagaaacaacatttttggatttcacagcgaaacccctgaaaaagcttttgaacaaaccctagaagaaaaagatagagaaagacatagattttgttcttgctctgtttttttttgtgtattttgttttgaggtcaacacaaaggagaaacataggtgcgtgtgtctccataatcggtggtgctaaacgacacggaggctccgatttagctccgtcgtcaaagcaccgccgtacacggagccatctacgcgtcggatccaccgatgatgaatccatcatcaacatcacatttagcgggaagcttagcagtttaagcgggaaccctcggaaaccatggaggaagcacgagaatgaaaggtctcttcaagaacaaatcacgtcttcctggtgaaatcgtacgtcagactcgagatctcatcgctttagcggaatccgaagaagaagaaaccgatgcgagaaactcgaaaaggttagggatttgtgcggagttgtgtcgaaacattagagatttgaaatcgattctttatggtaatagtgaagctgagcatgttcctgaagctgtcttttggttaactcaagagttttccgagaagacacgcttggtcctttgatcaaatctataccaaaacttgatttagaagcaagaaaagacgcgacacagattgtcgcgaatcttcagaagcaacaagtcgaatttcgactcgttgcttctgaatatcttgaatcgaacttagatgttatcgattcgttagtcgaaggtatcgatcacgaccatgagctggcgttgcattacacgggaatgcttaaagaatgtgtgcggcatcaggttgttgcaaagtacatactcgaatcgaagaatttggagaagtttttcgattatgttcagcttccgtatttcgatgtagcaaccgatgcaagcaagatctttagggagcttttgacgaggcataaatcgactgtagcggagtatcttgcgaagaactacgaatggtttttcgcagagtataacaccaagttgttggagaaaggaagctattttacgaagagacaagcgtcgaaattgcttggagatgtgttgatggatcgttcgaattcaggtgtgatggtaaagtatgtgagcagtttggataatttgagaatcatgatgaatctttaagagaaccaaccaagaacattcagttagaagcatttcatatctttaaactctttgtggcgaacgagaacaaacctgaggatatcgtggcgattctcgtggcgaatcggaccaagattcttcgtttgtttgctgatttgaaacctgagaaagaagatgtaggttttgagactgacaaagcattggttatgaatgagattgctacactttctcttatcgatatcaaaaccgcagatcgataagaaaaagaaaaaacctgtttgtacacgatgcctacatgtatttttgttttgtaaccatttggatttggattgtgacttaaacaattagcatagatgattctctctaaagccattcttgcaaacaaaaaaatacaatgatgtgtgttttattcaacaccagtcttctttttcaacattgtgatgaatttctccttttcttcatctgtcattcctgtggttgagcaatctcctactccccattctgctcctctcagacaatatttgtcttgaatctctctttcattcctaaccaaaacagaacaccaaaaccaatgttacatgttacaatgttacatcttataagaccaaaagggtatatgtaaagtttcaagatttgcacattgttggctctgttacatcataaaagaccaaaagggtgtgtgtaaagtaactaacttttctttgttgagtttggaattctcaagtaatttcttgagaagtggagaatctttgaatctggcatcgttctctgcgtagaacttctggatttatgctgcaattagcaagctttttcttagagcagagaaacacacttttattgttcttgaattccagaaattgacagattggtaccattgaaacggtccaggaactcgatttttggtaattccggacctggaactgattctataccgggagatcccgacattaagcctgcttcagctgaggaccatccatacatatacatatgatgctgatgatgatgacacgcataatacattgaatcacaggaaaagtattgagtattagtgtagttaccggtacaaggagagaggagaagggtgagtgaggcagcgagggggaaggtggacttgcagagaagatggtgaaacggtgatggtgctgatgatgatagagccatggagatacgaggatgatgaattactcttggttcatagagactaaagcttggtcgagagaaagaagagatttttgtttgcatcattttgcctttagatttttgtgaggagggtaagtgactcttaggagataagaaggatatatataatttttttaaccaaacaaaaaaaaaaccttttttctcacttgtttccaaaattgcttttgagaaaatttctaaagacacaacatgaattgataaggcagaaacattttgaaaacataatacagtaaagaaaaatccttttaagtaactaaac

SEQ ID NO: 30069 - DNA, 921 bp, Arabidopsis thaliana landsberg
  unsure (1)..(921): unsure at all n locations
cagttaatagaattagaccttggcctaagggagtaacttcagagtaacaagaggctactcagattacaccaagctgaggtctatcttcgtgtaacaaatttggtcataatgtgtcttatattttttcctttataacttacacaaccccagatggaagccttagaacaagctggccaccgaaaactctgcacaagaaagatagatcaaagaggtgaagcgaaaagaccgaagagcttgtgtgggggaagaaagtaaaagtaccttttaacgtagtagtaacagaaatctgccaatatgaatgtttggactatttctgagattataaccatcgatggccatagtccataacccagcactacaagcagtcgtccgtgcgtgtccatcatctgtttcaacacagaagaccaaaccaaatttatgcgttcagtttggaaaaatcacacaaacaaacttgcgaaaatatcatatctaatggggatattgtggagttgaccatttgctccagtgccataagcataggatgttagacatatttgtaaagccattggtttatgcaagagatggaaagaacaacttaaccatgtaatcacaactctctgttgaagataagaacctacctgtaaaacccagtgtgcacagctaaaaaatcttgctactccaagtgcaaaaacataatgagccgtgaagggttcgacaatctgaacacaccaaaaatatcagggattacacttgtttttcagtactcnnnnnnnnnnnnnnnnnnnccttagaaaacacatacctttgtgttctgcatcactctcaactgtggcagtactgaaacagcttctaggtaaacacagaatccccaggatattctattcaatatattgtgtgacgttgatggatgaatccatacagcaagcacaacacatggcgcca

SEQ ID NO: 30070 - DNA, 2761 bp, Arabidopsis thaliana landsberg
ttcgcgcgaacacggattatgtcgagctcagccgacgatcaagactctaattcttgctgttaaggtctttgaacacggggctgtccagtgcaacgcccattgcattcaaaccattgtccacatatatggttgcaccggttatggcagaggccaatggagatgccaagaaggctgctgcattcccaacttcatctacatcatcgccatttataaaaccgtaagattccaagaaaaaaaacaagcacaagagaggtgatggtttgaaggaaatgaacctgcggtcagtgttttctgaataggtccattattgtaggaatactcaatcatggtgtctatgaacccaatggcttttgctgctcggcttcccaaaggacctgaaacccaaacagtagtactcttttataatttcaaaagacgaggcgtgttatttgtaccacgaggcgtgtaagagggaaagatggattacccgcagatatggtgttgaccctaatgtttgatttccttccagcttcatatgcaagcacctatgttgaaaacacagtttggactaagagacttctaaccaatacatctttgagtttacgaaacagaattgtaaactcacccgtgtgtcactctctagtgcagctttggcagaactcatacctccaccatacctgcacagaatgaaagagatacttgtgagaatgtgttgacatcgttatgtgtgtgcattagtttgttcctttgaataacttgtgaagaagccatccttacccaggaatgattctttcagatgcaatgtaagtaagagatattgaagcacctcctaaatcatcatagagaaccaaataagaaaacatatttacaaggaataaagagacatacgaaatttgttacatgcctgggttcataattggcagaaaatgcctcagcaaggaaacaaaggagtaactcgaagcagagatagcagcgagatagcctttccttgatgtctccagaagaggtttgctaacctaaacccacatgtgaacaccataaggaaatagtttgtatacaacacaatgcacttactgtaaccaatcatcgatacgagttctctacctctggaccatttgcaagggaatggacaagaatgtcaatgcttccaaaatcttttttcacacattcagcagcttcctgatttaagcaacaaaaagcattaaggagtaacacatgcttaacttgcaggcgtgtttgtgtatctctaatctatacctgtacggtccagtttgacgatcctgcatatcgcttattcgttttcacatcttcaggcacatcttcaggattgtcaaacacagcatccaaagcatagaccttcttaatctccatcaatgacccatccggcaacctgaatatagatatggatgggaaaattaatgtcccattacataaaaccagacaagatcatgttgtaagtccttacactcgtgactggtcgaattttccacgtctcaagcttgtctcaaatatattaagtgcctagtagaccatccattcataggttagtataattagcaaaatgaaggaaactaaaagcagctgaaccaaaaatgacttacaggaacccaagtcccaaccaatatttcagctccagcagcagcaagagattttgctatggcccaaccgtagccattatcatcagctataccagcaatgaaagctcttttccctgtaccatttacacttgcttagttcagatagcaccaagtcttctccacaacagcatcttaatgaatataaagaaagatatgccaaaccaacctctcaaatcaattggaagccctgaaggagccttattttcactggattcagacattgcccttgtggaaaaagaaaacggtcttttacaagttggaacagcagtgttgtttctcaaacatccaaggtttgataattggcgagtgcatgaaagtttatcccatgaagcgtttccaggattggcaccaacaatgtaggttcctgctttaagaactttgctgggcgaagacatgctcggccttcgtgtagcaatttgcaagcttgaagctgctgtagccgccattctcacaacctttctaattttttcttctactaaaacaacaaatccagaaacattgtaagaaagaccacatatgaaacaaaatttaagaatcagatcaaacctaaagcacaagttgacataagttcactacttgaaacattataacaagaaccctagtttccaaaatttcaagcactgcattagagaaatctcaatctgcatttttctaatgatttggattagagttaacaaacaaagttcacatttttcacatacgagactatagttaacaaataaaagaagcagatcaatgcagagaacacgaaacctaaacgagagataatacaagtttcgatttttttcgcagcccaacaacatcagagaaaaactcaatcaacagagatataaaaacttccacagaaaaccaaaacacatctgcatttaacattcagaaactcatcaaacaaacagagacgcaaatggagaacaagagagagacagagagagaaaaaaacctgtgagagcgtgagagatagagagcgagagagagagacagaagtagttttggttgatgtgaagtgatgatatgtaagagagaggagcttcgatgagatcgaggtgttgtttctgtgaagtttttaagtgatatcagaagttttcgtctcaattacaaaaccgatcgggtctgttataaaaaccggaatcctggttaactttaaa

SEQ ID NO: 30071 - DNA, 797 bp, Arabidopsis thaliana landsberg
  unsure (1)..(797): unsure at all n locations
agttgtttaaaacggacctgaatgtgctaaaaatgagatttgtcttgaggggttatcatctccactacttgtaacatcgttagaagattgagcagaggacagagttgaagatgaatcctggtcctggaaactgatattctttgtgtttataagacgttctggtcttgcatctaccaccttcaaactcagtgattcagtcacaccattggatttggttggaagtccccatgagatggaagtactaaggtatggtggagttgaatgtgccacagagctagtaaatgaaactttcttatccatgtgactcagaggcaacaattagctctctctctctctgcttcaacagagaagattgatgatacatgtgtctgtcaaagaagctccaaattcagaacatctttataaatgataaaactttcaaaagatatttattcctggaaacagcaaaacctttgacgatgtagtagacaaagaaggggataatccaaaaagggaaaaaaccccagaaacagagcaacattcagaactatttcgggcaaactattagaagagcgcggcagaaaaaaaagtaaagttccgaccaactaaaatcagcaccattactttcgtcctaaaaggcgttgacttgggaagaaatttccagaagatttccgaatcagcacatcactctaaaaaaaagcgaagaaatgacggattcaaagagaaggagatagagagacccttacggattcaaggaagagatgaagaacaggaactcaagggatgcctatcaaaacaaagtaaattnctttntnctt

SEQ ID NO: 30072 - DNA, 2543 bp, Arabidopsis thaliana landsberg
ggtgcacccatttctcatgtactttagatttctcttcctcgtgggccaaggtaattttcttctcgctcttagaaaatcactatttatgactcttcccgaatagagcttatttttgcatgcggttgattcgagtatagacccagttaagtttagttggaatttgccccctaattatatagcccgttctgattcgttagaactcgtccatatactacaatgtgttttcttttggcatagtgttattcatagaataattttgctatcgatatattgattttttcccctcgaattaataaatctggacacacgtgaattttttgcagaacaaaaagttacattcgtgattttgcatgtgtgtgttttttaaatgtttttgccaatgattggttgattatgggatgaagcaatgatgacttacaaatcggcgtacgcgtcgcaccaagttcaaaaaatggttcacggtgggcttcacttaataggcttagttctaggtattgtcggaatctgcgccgcctttagattccacgacaaagtaaacctaaaagacatggtctctcttcactcctggatcggtctcaccactttcatcctcctcggcgtccaggttattaaactactatacttcataaatactactttaacgttacctaaactttcataaaaatggaaaaaaaaacttgcataaaaataactgaaccttatggtgcttgcatataaattacacagtggctattcggtgcgttcacattcttagcgccgcaatcatcgtctggaacaatgactaagatgatgccgtggcacgtcttaagtggtcgggctctactttatatgggtattgtcgcaacactgaccggactcatgcaaagagctacgatgcttggtcactagcacaaacgctgagtcacgtctaattaacttcctggggttagccattctactctttggcgtttccgtcgacttctccgtcgcccttggccgttacaactgaccggagtactatattagtctcacctttaaatcttgctttattattttataattctacgaattcttgtttgtttgtttgcgtgtgtagatgtaattcgtgtgatatctaattgatcacgagagtgattatttgatatttaaatttaattttggatattatttatcttcttttgtgtttgatctttgatgcttacttaaagtcttaaagtgataatttgcatatgttaattgtagtggtaaatttacaggtcagaaagcaacttaaacggtccagaaaattacatttaaatcccattcacttagctttatactctttctcagtataatatttttaatgtttttgtggtattatttaacaggaaagatgttttgagtggtatatattttggtgaaatagaactgtataagtgaatatttttttgcaaaaaagaatgataaactttgtttatatgtgtggctatatttatctgaaacttataagtttggacttaaaataaagtctacaaatagtcacttaatgagtaatgagaaatatttaagttatctaaaaactaaattttctatccaaatttaaattcttatctactagttgtactttcattttcatattcttttttatgattaacctttaaaaccaaaatatgtacggcagtacaaatgatttactttatacaaaatacatgtattatataatcatataaaatatatatagttataaatataatcaaaaacggaagttatagattaaaaaaaagatttagaagacaatttccagagaaacatataaaacacttatcactaattttgtatttcccacaaaacgaaacaaggagcagagtgcagagaaatggataattgaaaggctctgtttttcggattccttcataccaattgttgtcttgtaacttccattctcttcaacaatccagcaatctcagcctccattctcagcttcatgttcctgtaatcgcagtgcgaattctcaagcttcttgagctcctccagcttattcctccttctctcctccgtctcctgcagacacagacgcgctagtttctctgtgtactcctcctccatcttctccgtcttcatttctatcattctcttgaaactctctgcctctattctggcctcgtctgctttcttctggaacattcttgtttcagcctccttgattctcaccatgctctctaaactatcaaaactgttcatcattgcatctgttaacgcaaagctcttcttcttttgatcctttgatgttgaaggcgtcacagatgcctcgtcttttctgtagctcgtttccgctgcaacggttagctctctcggtgggtcgggaatttctggtattgactcagcatctgcaagaaattgtgataagagaaggatataatcaaacttcaatctatagaatcttatacaagtagaaattaggaacttacagttgaagaactgaatgatgaagttagaagcatcaagaggggaaatctgtttactctctagcttcttaaccatttcattggctttaagatgcaatgcttttgcctttttgcatcatc

SEQ ID NO: 30073 - DNA, 1055 bp, Arabidopsis thaliana landsberg
aagctaggtcagtttctacaagatccattgatacttgtttaaactctcgtaatatcccctgcattaaaaacccaagttctctatatagactatacacacacacacatgtcagaagaaataaacggaaaagttaaaaagatgatagctcgacgattcgcaatagtacgttcctttcgttcaaggatgaatccaaagatgactatacaaaaactttgcacatcgtctaaaacagcagatctttctctccgaaagattgatccgaaaccgaagaaaacgcaaaaattcagcaaaccacaagtcattgcaagtccctctcagcgagaagcaatgaagaagcgaaacgacgaggatttggtccttacgggtaaagtaatcgcttcagaagcaagctaacttcatcttctctccggcatcaatcaactccgccaacacaatgatggggtctcatcaaagaccttcttcctcctgaatggctgaatccgtaaacagtgaaacaattgaggtttatggaaacgcattgtatttcaaaggagcttgggctgaaccattcgataagtggtatacagaaaagaaagagtttcacctactcgatggtgcgtcagtgtttgtgacatttgtgagaagcaaatgggaccaataagttgggggttacaatggttccaaggtcctcaggcttccataccgacaaagcgatgatgatatcaatcgtgaatactcaaaatgtatttctatctgcccgacaagaaatatggattggatatgagatagaatttggatataagtaaagaattaacaacaacaaaatctataaatattaaaatattcttaaaattaagagatgctatatcagaaactaatattatattttagttaaaatctatttaaattttaaagtaaactatatattggatacaatataaggtggtgctaaagttcaatattaattaattttaagtttttaccaacaacataacacataatcattgtaatatctattatgaatattgaataatcatctctagaacatcacttaaattttattataattaaataca

SEQ ID NO: 30074 - DNA, 1768 bp, Arabidopsis thaliana landsberg
aatacatatttaacctacaactatatttagtctaaaaattgtatcttctgttcagaaatattttttttttaaaatgatttccctctattgatcttagtcatcgtctttatctttgaactttatcaattgcagaggcaacaacaggctcttagcagtcagacaaatttgagaacaacaatagcatgcatgatgatcaatcaccacttcaatatacctgctcacggaccacatcatatggcgagttgagaagtctcactagtattgcaacagctccatgatcaatcaccacttcagtattctcagatgttccagatgcaatatttgttaaagcccaagccgcttcaaactataaaatttgttccacgaaccgaaacacattgaccttatgaagctaggggtaaaaccagattgcagattgaatgtacaggtgtatcgaagctaacctgaagctggggggagtcatcccatgttaggaactccacaaagcgtggaaccaaaccggcctgtataacttcttcaacacgtacgttaaacatttctaccaaaagaacataaaatagcattagagagagtgaatacatcgttatagctttagtttcatgtcaaactacattacagtctaacatcagaaactttgaaagtttgctgtggctcatctagcaatgtcaatagcttgattatgccttagcaaccaaggtatcaaatctgttagtaaataagttaatgggatgtctctcaccaccacaaagtaacgttctgatctgagtagtagcctcaatcaacagatccctctcgtcagaccaaatacagcttatcaactgtaaccaatcgaacataccaactactcaaaatagaaaaaatgatccaaaatagaaaatgtaatctcccattccgagaaattcaatcaccattatcatattccagaacatgcaaaagaaaaatcttcagttcaaaaataatatggaaagtcttaaccaagctatgtagctccttctgataattctagcactgtataaccaagtttcagaacatgcaaattcttcataaaccaaaatcaatcatgaaaggttagtagctcactctgagaatttaaaatgtcaggaggcaagtaaaaactctagcgatcatatatcgaaaattcaagcatcaagtcaaatttcacaacgaacatgtcaagaaatacgaatctcaagacaaattacgaacaccaaatttcaaacacggaaaaccacaagaaacgccaaaatggatcgaaattggataggtcatttcaaaattcctaagactgaaagcatgcatctacgaatcagaaatcacatgtctccagaattgaactgtcagattcatcaatctccaggtttcgcgacgaaaatacaaaatgtgtacatatgccaaacggaccttctggtcaagagaatcggcggaaggagaatgaggaagagcctcgcgacgcttcttaagcaagctctcttctctcttagctttgcggatctcaaccatgtcgtcctctcttcgccgccgtccaccaactccgtcaaccaccgccttgtacccgctcctccgtactgacattgtctctcctcccttcatcttttgatctcctcacctccctaccaaatgatttcgacggttttatgcgaccaaaatcaaattccacgaaacaggcccacactgaaaaaaaaaaaacaaattttaattgttagcggtaaatcgatatttaaaaacattagggagtcaaattcaaatttgtaagacaagttagggagac

SEQ ID NO: 30075 - DNA, 3125 bp, Arabidopsis thaliana landsberg
  unsure (1)..(3125): unsure at all n locations
caaattgatattcccatatgtgatcttgacaagtgtttaatcacactggtaagcacaataaatcagtatcatcatataacataaacagaagtgaatggatcttgcaaagcataaatactgtgaagctttttgtttaaaaaggaaactaccgtacctcattgtaagttgtccttcctttgctttccaccttttcacaaactgaaaggaaggccagacgaacataatatcagttaaatgtataaccaatcttaagaggcattatccacacaattcatagctagaaacttgaaaggcatttagatgaaagcataataggggcagagaaagagataagacctttcatactaaattgacgtagtcctcttccagtcttatctggaccagccgcacgctgtcccctcttcttcttcttaacactgtaaatagattatatgatcaactaaactacacagaacacatgtaacaacttccacacaaaaattaacgcacaaagacaatggcctaaacagtatcttttgtcccaataaggataggaaagatgagtattcaaatatgcagattcttagtagattttagactaatacatatcaggagagccaaattcaagcttgtaaaagtatgatccacacatcatacttacatctactggttcagtttcatatattcattaagctcataaaagcagccattgcaatagaatgaaaaccctaaaaatcgctaaaccaaacatcacaataaacacatcaaagccttttaatataaaaatcacagaattgaggtggtttacatacccagaagctccttgagaaccagcatcatcaccttgaatgtccaaattattcaggcgttgaaaagtagtgtcgctagcagatgtaacaacggtgatggtttgctcactccggctcgacggagagcccatactgccgctagtagacacagattgacctgaaaccgccgtgccccaagacctagtactagggttattgttgttattattgctttcatggtggttgtgattagaattagacccagtagttgtcattcttcttccacctaaaactaactaccgcgctactggagaattcaattgaaaacgagaaagagatttgttaaaatttgtcaaggaaagtttctgattttgacgaaaacccagattttgagtactgaccttgaaaatcgacttgggtttttggatattaacgagaattagaagcttcaataatggcggatcaacattagagttcttagtgtgatacttctctggaaaggtggttttcgcggcggagagttaatggatttcgccggagaaggaggaggataagtcgatcggagttgggaggcttgttatttgtgcgatggtgaaaagatgtccacaatgagagagagagagagagggaccaaactgactcataggtgaaaaaaaaacaaaaagttaaagaagataattttctttacttttttttttattttaccaaaagattaattctctttagtgaaatttaggtcttttgttaatcagaatataatactggaattatctttttctttttttttggttaaacactaaaattatcttcgtcttcttctttttttggctaaatactggaattatctaccaaaatatgtttatatggctttaataagcatgaaaacaaatataaaaaacatacattgatacatcataatgtagatggatgatcaagtcaaaaagttaaaaacatgtgtggttgataccactagtcaatcacattcgatatgaattttcattatatgaaatttactcattctagtgttgataagatttgagcttttaggaaatataaacatatcatgttcatctctttcattactaaaactggagcaaaagagttcttctaattccgaagattatgtgataatgtagcttaaggttcacgaaaggcacattttcttttctttttagcatttctcggtttataataaaaaatcacatgccacatgtggctgatttgaagtcaaaaagtatattttgtaaatcactattagacgaataaacgagtattgaagatccatcaataaaattcttaatgaaacctttgaggacaaaataaaaatccaatctcaaatcaattgcttttgaaaaaaaggacaattgaacaatttgttcaagccttagatactactactccaagtcattaagtttgacttgaaattgctcacctgaagacaaaaccttgacactgaccgaaccaacttcccaaccagaaccggccttcttgcgtttacccgagccgctctcttgaacacccatttcagcggtttactctccaatactaaatcaacggtttgccctttgtctttaagagcggttgcaatggtggttgcagctccttggagatctttgtccaaagcacacacgatgttctctacttcttgtcccaattctggcaacaaatccttctccttgagcaactaaatcaaagagggaaataagaaccagatattcagatactcaaacttaattcttcacaagtcatcagcgagtttaacttacttcaacaattactgcatcgccgaaaccaaagccacaagcaggaatgtcatcacctccatacgtggagagtaatctgtcgtatctcccaccaccacatatagctcgcagcttcccttctcgatcaaatccctatcacaaaacatctctctatcagttgttatcacaaaactatagacaagtatccatgtatggagaagattatgtcacaatatctaacctcgaagacgataccagtgtaataagcaagaccacgcacaacagatgcatcaaactgtatccactctgaataaccaaacttttcannnnnnnnnnnnnnnnnnntcaaatctgcaatggcttccccgactccaccaagtatatctgcttatacaaattagagattcttattagcagcatttttcggagaaatggactcactagaaatagtgaaaggacacanaccttccaaatcatccaaggacttcacagaaaacacttgcaataactgttcaatagcatcgtctgatatgcccgtgaacccaagttccttttttatttcatcaattggaatcttttctatctatttaccatgcaacaaataaaagtaggtaac

SEQ ID NO: 30076 - DNA, 3391 bp, Arabidopsis thaliana landsberg
tggagatctcataatatagaataaaagttattttttaatcaatagtgcagcaaaagaagtcaattaagattggtacacatcttaggtacatagagaacatgggtccatgtttgttctctcaccaagcatacagtttatcttacaagattagattctcgatttcacagatctaattagctccatcgtacggtttagattaatggatgtatatatatcccgttcttgattgtacaatctagtgaccgtcctctcacgtacgggtttccatgaagcttcatatacacttaatctaattatgcattaatcattgtgcaaaccaagattgagaaattaatgttaagcttatggtgaaacatatccactctataatatatcctatagtaatagtatatcaattgctatataattctttttggatttatggatttggcaatcgcgtctgactaatcttattgtagaaaacattaatcgatttttactaaatacttttaaatcgatatcatatacatataaagaggtatttcatataggtggtgattgctactaatgcgataatgagatgcagttacaaaaaaaagattgtgaaggatgcgttgaatccaaaggcacaaagagccacagtgtcccatgctgatagatatgattcagaaaaaatgtttgaatagttttgggtttattgagacatgttcttgcaattgatgaagatatatcagtgcacgatgctttttccacttgaactagtttcatgcatctgtcattattatttctttatagtactctctcaagataagggtattgaaaggttaaattggaccgaactggtccaaagggcaaaggtccgaagagattttgatctggttcaagttttaatttagtgtgggatattgtggtccaagtgcaactcgaaacagttcctattggttgatttgataattgtagatcatgaacaaagagataagaaagaaaaatatcaaaagtttgacaaaaacataacaaaaaatagcaaaacaaatatttagagaacttctaaattctactacattcgatcgatttcatatatttaactggtccgacgttcaaaatacattagaaatgtttagatcgtatacaaatttaaatagcacaaaactttattaaatacgtacgtgtaggtataattggagttcgatgcatgtactacacagtagacattataagacattttgaaaccgtagacgtagacatgaatcctcaatagtctttatcgtcgcgacatacttcagaaaagtcgtaaaagattgttttttccgaccaagatcaaatcaccggaagtatacatgtattcaaactaaatctcgaataattgtaagtgggaggaggtaaagaattcaaaggttgggataaaagaatgggtctattcaatgattttatatggttgatgaaaaataaaatccaacctaaaaattaaaaaattaagcgaacgtgggattgggataatgttgaggaggagacaacgataaagaacagtgagtggctacagattctgcgtcgaccattccaggagacatcatcttttattagtgttttttttttaatatcatgggtggtgatttgtctttttattttatatgttttgttgaatatattagcaaaaatgaaataacctaaaataccaaacattaaatgcttatggtgaccaaggtaagttgggccacaaaacaaattataaacccaaaattagaattgcaagtcaccatcgacgcttccgatccacaccaccaacgtttccaaactagagtcatgtggtttcactacgcttccaaaacacctcatttttggaatcacgtttgcttaccggctttgagacatgctatgcgcctctccttccgcttctgtttccgcttcgacctccgcttctggttcgcgggcgagtaacgcatcacctccgttgatataatgcttcctagacaaaaacaaacatacttttattttagctttgccaaacgcaccacaacttttaacataccacaacaaattaggacaagattctctaaatcatctttcaattcgtttcaaacgatgaaggaaccttcttaaacataacagagaattctaatacaagatcatgattctattaaaacaacactgtgtcttatgatttatttgaacctcactgataaagttagagagagctaaacgaaaaacaaaagctacccatcttattctattcaacttaagatcaaacagaagcaaaatcagaatcaaacaagaacacacaggagacataacattcccatcctgatataaccattgatggagtctagatcttacggcgacgtagtggggtttcacgcttaacatagaccttctccatttcgttgagtggtcggcttgatccatctggaagactcataaacttccagccacctccggcttcacgtttgcccttagcacccaatttctcaaccgtgattttccatccctctgatgaacgtctctgctgtacttgtggcacatcacttctcctctccactggtttagagagtaaaaggtaaagtaacgtttgttatcaccaaggagaaatgaccaaagaacgtctaataactcagcaagaactcaagcaggaacgctgatgttatatatcaatcaaaaggcgtggatctattcaaaccaataaccttttaaacaatccacaagcaagttgcaataccattattactttcaatctttcaaggttattttacaagttaccaaatttagaatagagggttccaaacttgcatctagtctcaagttttccttctaagttgcaagcaggtcacttgataattaacatatggatgggaaaatgtctcaatagaccaaatgtagtaatggtttactaagtcaatgcatactcaagtgggcaaaagaagggccttactttcattttgttgaactcaaaccttcggacaaattcttcgtaaagcatgtcatcctctttctttgagatctcataatggacttcatccatatctttgattgtaccatcccatccttctggcatgaccttgaagtcgggtttgtaattaagtgaggccacatgaaattcccggtcatgcgaaatgaagaacctgtataccaatatcaaaatgagggttaaaggaagacgaagccacataatccgcaacctattcaagtttgcatcatgatcgttcactaacaatgctagatccaactaccttaactattttggctataaagaagactaaataaaagagagtacacacagttactccatttcaattcatgtaaaactgaagtaacattataccaaggtatagaaatactagtccatgtaaagtaacttactcagggtactcatcaagcaaacggtcaacagaatcatccaaaggacgaccaagcttcctcg

SEQ ID NO: 30077 - DNA, 2137 bp, Arabidopsis thaliana landsberg
ctgtataaaggaattccttataatgcaaacaatgtattattatgtttctgggatgaaaccagcaagcgggtagggcaagcaagagaatgttggtgagaggatttagaaatcaaaatatctctagaaatcgatcttgattatatttttaaaaatcgatttctcgttagtttttgcaggatgatgatgatgatgatgatctcagagttgtctctcttcgaccatctttggtctctccagggccaaagggtggtgccttctctctcctccctcttccctttgtcttccctcttctctctctttgcacaatttgttttctttttttaattatttcgaaaattttccaatttcacaacccctaattttcttgtagtttacttttggtttctatttttattttttaataattatacgtgcttaactatactacactaagccacgtcaccataagtattttaaaacacaaaatgaacgatttatgtatttttaattttagtatccaaatctattctcactctctaattttgttattttaaaatcgaattcaacaacaagactcatggggcatgggggacgtgcctgcctcttatactttactagtgcgtaataaaatagtgaatctttgtgaccgttggatatcggtaatccaacggttttcatatcgtttgtgtataatgagcactaccacacatgacatggggttttgaattaatgtgcatgaacatcatcagtcatcacccgtaatttgacaaaagcaaacaaaaaagagcatcatcgctagtaacatgtctcccattactttcttaaaatattttattccgtcatgatcaaatgtcaattgcagctgatattataagaaaaagaagtcaatcaaaatcttatattatatgtgtgtcttagacaaagatagctctaatttcaattatgatgatatgatcatatatgattatttaagaaacttcatcggtttatcgaatcgacactatgaatcagcctggttatgttgtataattgtgccggtctaaactggttcgccacggaatccatattttatcaaacatcaataacatgaggtcttccaattacggtcggaaaaacaaacgccacaattataacacacacaaaaatattgaaacataaagaatcaatctcgggtacatttgtgttgcctacaagaaaaataagaggcaaaccttaaaactatttattaacttaattgtaatgtaaaaacaagaagtaatttgtctggttttatgtattttgctggcgagatggataaacaatcagctcctgcatagaagaatgtcacaaagagaagatatataaattaaaatgttcaataatacaacgtatttttaaaagaattcgatttgttagaaccaaaaatgttcaaagagtaattaatacctgagaataacgagcgtgatcgttgtgaacatacgatgttttaacgatcgtttcccatttcgtagattcaagaacttcttgattcagtttcttgataccaacttgacctaaaacgacgccgtacggtctcgggttcaccggcggtaggagggttcgtccgagccaggaacgagacggagtttccggtaacggaggaggagaaagcgcaggtgtatattccgacgatgtttgttgaagattccctgacttgttgttcttcttctgtttacttcctcaacaagaaacctagaatcgtgaattgtggtccgttggatcctcgaaggagtagagatcgagtttctaaacattttgatctctccagaatttgagtaattaggaagaacctctcttcttgttcttgttggatacagttcttgagacttgcttattcctctgtttagccttttgaagctctctggtttctcgggagttccgagaaaaccggaatccgaacaagaggttcggtacggagagataaaaccggaaagacgcctagttgaccagtttggtaaactggtttgatcacccgaatgtttcatagaccggtttgatactgaatccaaaggaaccgggtttagaaacttgaatgagttcttcgcacaaagccttggcaagaatccgcaagctttcttggtaacttcagctgggtagatcttgtgatcaacatgaccataatcatcaccatcatcatcat

SEQ ID NO: 30078 - DNA, 2701 bp, Arabidopsis thaliana landsberg
tcggtcttttatggcgaaatctgcgggaatcagaacgatcgttatggttcctactgatgctggtgttcttgagcttggttctgtttggtctttgcctgaaaacattggcttggttaagtctgttcaagctttgttcatgaggagagttacgcaaccagtaatggtgacttcaaacactaacatgactggagggattcacaagcttttcgggcaggatttgagtggagctcacgcgtatcctaagaagctcgaagtgagaagaaacttggatgagagattcactcctcaaagttgggaaggctataataacaataaaggtccaacatttggttacacacctcagagggatgatgtgaaagtgctagagaatgtgaatatggttgtagataataacaattacaagacgcagattgagtttgcgggatcatcagttgctgcttcttcgaatccatctacaaacactcagcaagaaaaatcagaatcttgtacagagaaaagaccagtgagcttgttagcaggagcaggaatagtttctgttgttgataagaagagcccaagaaagagagggagacagcctgcaaacgtaagagaagagccattgaaccatgtggaagctgagaggcagagacgcgagaagcttaaccaaagattctacgctttacgatcagttgttccaaacatttctaaaatggacaaggcttctctacttggagacgcaatttcttacatcaaagagcttcaagagaaagtcaagataatggaagatgaaagagtaggaacagataagagcttatcagaatcaaacacaataacagtagaagaaagtccagaagttgacattcaagctatgaatgaagaggttgttgtaagagtaatctcgcctttggattcacatccagcttcaagaatcatacaagcaatgagaaactcaaatgttagtctaatggaggctaagttatcattagctgaagacacaatgtttcacacttttgtgataaagtctaacaacgggtcggatccattgacgaaagagaagcttatagcagcgttttaccccgagaccagctcgacgcaaccgccattgccttcttctagttcacaggtctctggtgatatataagtttcacatgatggtgaagcttttgtctattcttgtttcagtatagataactttcaggttcaactagaaatagataaaatccttttttcttttctctttcttatagtgaaaggaatccggtttaagtatattcattaactttatttagaccattgattaacatatttgtatcttgggaaaatatttcctatactttagaaaatcaaataaagtatgaaagatatttgacttctctttctttgttatggatgctttattcagttccaatttgggatccattcttttttttttttcaaataaagcaatagttataacaagttaatattatccaatcaatgttattcaggtaaatatttgattaattatcttgtagaatgttcatgtacatttgaattttgaagtgaccaaatcttatatattggtcatgaatatgatatattgacatttcaagagactgagctaaaaattacttaaaaatgagaatcaattatttttttccattggtccattattttatgcaatgcagcacataataatctattttggttttggtttgggcttctggtagttctgaaaagcccagtataaagcccaactccattaatgcatcttcacctctacgacgagaattgtgcttccgattcatttcacatagggtttgtttctccgatcagatccaatttcaatccttctccgtcagattatctcctcggccacgatgtctctccgccgcactatcctcgatctccaccgtcaaacccagagagccactctctcaaagtctctacctttctcgatgagtcacatctcctccgcatccgccaccgccgccgtgagaaacccactgggaagagacctctcttcaatccccttcgcacaagcccagaaactgaaaccagattcaaccaatctcgtcaccgatcgctcgatttcgtcttcaattgggcaatctgaactcaacaaggcagccaaattctcgcgtcaatcgtcttctcgaggttacactaatggctctttcttacgcaaaatccctgtagtctttcacattcatgaaggaatggaagagattttggcggattatgttcaccaagaaatgacaaggaatttgattgtgatgtctttgggattgttccagattatcgttcttaaagatattatcttgtttcttctctgaaaccaagtaaacatcttttgggatctaaggaacactctcgatcatcatcacctgttaatgaatgaatagtgtgggctaaaaaaacggtctttccttttatcttctttgttttatgaataagaacttgatgcaatgttgcatttttaccttcaagcttttgttgtgtgttgtttcagtttctggtttcgtgtatttgattctgtaaggcttaaaatggaattctaagcctgttaatcttttgattgaataatgacaacttttctcagctttgaggatcatttaatcactacgtttgcatttcgaatttagctttactgtaatcagaagcacgagagacttacgtgagttttgcattagaaaagttgtggttctttaccaagtacatggctagattatatacaacattt

SEQ ID NO: 30079 - DNA, 2130 bp, Arabidopsis thaliana landsberg
ccggcacagagtcctcttgtaatttcgtctaaggtcttttttggcttttgatttataacttgaacaaagagtcaaaacaagcaacgttcacgtgagtacaatgtaacgggagtgcataaaaggagtggcatagtatcgactaagaattttaccaagaagccaacagcctgcctgatatgcctcaactcatcccaagctgagccagcatactgtacgaaaatgaaacaacaattccatttcaaaagataaaaaaaatattcaaatgatttagaggtaaagcgtgacaaaatctcggcttacttcatcggtagcctctatacaccactgctctaattcagccaaaccagctttaacgtactccccattgctgaatgagcaacactcacgacgtagaagaagactgcacaagtgaatgtcaggaatctttctgtcagccaagaaaaaagtgcttggacataagaagaaaaaaaagattgagtccaactgaaacatgcctgttgaaaagctgaacgttgatgaaggagaatatttgtgtgaatactttgcggactaagaagggtggagcctgtatcatgtagacatagattgtaatcatcattgccaaaacaagtttaatttttacttttgttcattcttaatggaacttcagactcacattgtttgctttcattaaattcaagtaactgtttatgctttttctgatactttgccaatgtgcaataagagcttgttgagcaacagcatttgcttgttctcttcctttcaacaaacttgcccttaatgttcttggtgcctgcagcaggtaaacaatcccttacacaaaatcgaaaaaattaacgaaactaaagctaaaaggtttcagcatatcaacttccataaaagagaaacaacaaagaactacatgaattccctacatggatgttttggaggcgttgactaagaaatgtttatccacaacattcggttattaactttcaagaagtctaattattacctctcttcccagaaacttctatgaacacaaagcaacaaaaaaattacctgtatacataagccaaggagaggagaaatctctttctttaggttatctctgatcattccatatatcatctcgaggaatgcagtaagctgctgcttgaaaagtagtgcggggtactttgcttcaacttgcctcaagtcgtcaagcttggtgagcctttcaggagatccccttaatccctatttagatttttgaagaggtacacacgatgaatttgatgctgacatgccgaggcagataaaaaagtcagaaaaacgatctgatttttacagcttcttacttgtgacatccttccaaaaagggatgctgatgttgttcttcgcctctgcggtgttaaactagctgctccagttgctttgagtgtgcgttgcagaagcaataataaggtggccgaattagataaccaatacgccaaaacctcattgttatctggcacctggatgaaagacaaaatttccaattaatattcagaaacatatccccttctgggctttagaacattgaaatagtacataaatgcttctgaacaatgaagcaagaaagaatcaacttacttcaatggctgtagctattgtttgaatgatacggtcaaagacgctagttctttccacttcaaatgatctccagtgaagaagacatttgtatatgacacatgcagcaacaggcttgtctccattgtatccaagattttgtgaaatacacttgactagtaaatcctggttttcctgcatgacacgaagtttataacatgtgttaagagaaaagcagagtgcaataatgcaagaaatggggtcccatcattacaattagtaccataaattcttatatatgatacctgttgcttttcattcagatgtttctgtggtttctcctcagactctggttcccgtacagcaagagtcatgtcctgtgaaatttttagacgataagcaattgaagaaacaacaaagtatccaagtctccttttgaacgtgcaatttaatcagaaaatgcacttccccttaccggggtagtctttgttcctccattaagataatttccattctctggagttttctggacattgaaaaaaaaaaaaaaaacttcattaa

SEQ ID NO: 30080 - DNA, 1175 bp, Arabidopsis thaliana landsberg
tgttctcacacgataatccgcagagagtaagaagaagcagagcggttcgaaactcgatttaaaatacaaaaagaaagagcttttggtgtatgaaaatgattctgtgtaacgttttcatcgtaataactctgtgcacttctgtttctagccgtacgatttgatgacctctatctttattttgcttttgaccaatttatatttttatctccaaatgaaaataaaattttgagtgaattattttaatttaagagagttggatttccgcttgagtgttggtttttatggttaatgattttcatcacaccacatgaaacttgctaattgagaactttgaacattgtgtaatattaaaaataaaataagaggaaacattccatgaccacgaggttatgttataatggacagccacgtcgtgtttgtggaactttcttaaagtaaaatctatgattgattacttgtagtttaactaaaaagtgtgtgtaatcaaccgagacataaaattttcttgccaaaacagatactaatagttttctcgttaagctaattcatcatctagataagtatttttctttattccctatctctatttgactacttttatatcgttcgtaaaaggaatttgactatttacaacacatttgaactggaacttttaagaacattctcaaattgtttttgtttttgccatctagttcggtggacttataccattgcgtttgaccaactggccaaattgaatcaattccctccaagctgtaatcaatccacttacaactacggtttccttgattatggcttactgctataataagtagggcaagctatggttatggaacggacaaagacgtgaagacaaaaagagtttggttcataattatgactttttttggggggagatgaatgtttagggacccaattataaccttcttcaccacgcgaattgtggaccgtgttaagtagatttgctttctttttcgggtaacatactttaaactacactatatcgtttgtttcgttctatgaaaaaagctttttccattttttatttgaaataagtagagtctgttacttgaaccacatataaataaacagctaaatatcgtgttaataagatataagggtttggtgatagttggcgagaaataaggaatctcctccatatgcgcaaacacaac

SEQ ID NO: 30081 - DNA, 1426 bp, Arabidopsis thaliana landsberg
tacactttatttttttagtataaactcaaacaggtatttaatctcgttatgttgtaaaatataaattcaatctatttcttataaagtcgaactgaaaattttattttatttaattgtacaatttaaaccaatttataaactcaaactgatatataacttgttttaacggcagattagattttataactaaaataaatttagattttattagatggtagattttaattggcttaaaaaaaaggggttgaatctttattactttgaaaaatttcccctttcttctcctccatcactctcactctctcttctttgggtttctcggttcaccaaaaactcctaaatctctctctcagatggtcactacccttttcaattccatcctcaatcttcaaaattcccaaacgaaatcaacaaaagatgtcgcaaggctacgcaatcgagctctacttcgatccagcactcgagaaccaagtcttgaaagcttggaacgtcttcgctcgtcgtcaaatcagtacatatctaatcaacaacgagtctcgtccacacataaccttattctcaactacttcatccatcgattcaacaaagcttgaaccaatcatcaaatcattctcatctaaacaagaaccaatctcactctctttctcttcaataggaagcttttctagtgacgacaatgctctgtttctttcgccgacgccgtctctttcgcttattcagcttcaggttcagttatgtgaagtgattaagaaagaagggtttgagattggtgaagagtatcgtgttgattcttgggttccgttttgttctgtggctgttgatgttcctaagtcacgtatctctgaagggtttttggttttgagagatttgaagcttcctgtttatggttatgctatggatattggtcttgttgagttttctcctgttcgtgaagttttctcttttggtcttggtaacaatttggaatcttgatatgaatgtttagctttgagctagtaacaatctgattatgtaattcctttggtttagttgacaaaagtttcgagcttgatggaacattatagaagcaattatgtttaagttgttgtttaggttacatctacgtttagtttatggagttttggtgcgaacttacttgtgcttgattcttctgcagattagagttaagcttgaccaaagttgtattattgatttgagattcttcaattgtgttttatgtttttgtgcatggacatgacttggtcgaagccgttttgcagttaatgtctttacaatttcacttgatgatgttgatggaacagtatagaagcaattatgttctgttttgaattgtgctagatcaagttttctgtaaaagatttgatcttttttgatcttcagagcctcttgatatgttatatttgttttgaagaatttgctatcatct

SEQ ID NO: 30082 - DNA, 3074 bp, Arabidopsis thaliana landsberg
caaattaataaaatttaaaccggtggagttctccaggttaatcaaaatttccgcacaatggttttggcgaaccacctaaaatggattctggattctggaagagccatcccaataatttttgattaatcaaatatttggtaaaaattttaatggacctaaaattttttttttattaattaactttttatttaaacgacaatttatttagaaattatatgttttgtatcactagtaaaaatagatttattattttgcaaaattagcatattcccacaaatgtacaagacccgtcatcaaaagagagccaaccgtttgagatagcgataagccgctgcattggatcatccgaacaaggaagacgttacccacgagaccgtaatcacacgtggcggattctcagatattctctctttttcttctttacccggaaaaataaagtttctgttcttcttttttcttctctgggtttgagaattggtgtaagagaaacgattgaggttttctcttattatctaaacccaccaagtctttcaggattttagccagagaagcttgagtctttgattagggacatgtcaacctccgccgcttccttgtgttgttcatcaacccaggtcaatgggtttggtcttaggcctgaaaggtcgcttctttaccaacccacttccttttctttctccaggtaactcaataaccatgattttgttctagttgctacgattgctcagggataggtttgtttggcatccttaaattgaaattatgtggttattgaagattacttgaatcgttatataaatgaagtatctttcatgtctttgtggatattgcttattgttaagtctctgcagtaatatagatgttgctcagggagagcttatgcttatgatttgtcacttgataaagattcaatctgcattaacggttatctttaagttacactttggtatgtgaactttttgcagaaggagaactcatggaattgtcaaggcctcatctcgggttgataggttttcgaaaagtgatatcattgtttctccctctattctctcggctaatttcgccaaattaggcgagcaggtaggtttttgttgctctcctctttggtttcttgtgtgtttgtttctccatttcactatttccggcttctttcaggtaaaagcagtggagttggcaggttgtgattggattcatgttgatgtcatggacggtcgttttgttcccaacattactatcggacctctcgtgggtgatgctttgcgccctgtgacagatcttcctttggatgttcatctggccaagactagcttgttttcttatctctttctatatatggtttcttgatgcttgaagtcacatttctagttaataaagattctctaaaatcagatgatagtggaacccgagcagagagtaccggatttcatcaaagcaggtgcagatattgtcagtgtacattgtgaacagcaatccaccatccatttgcatcgtaccgtcaatcaagtactgatattttcatgcttccactttttaaaatttccttctggtggagtatataatcttaccttgtgctgctacaatggtgtttagataaaaagcttaggggctaaagctggagttgttctaaaccctggaaccccattgagtgcaatagaatatgtcttggatagtgagttttttttccttaacattgctctgtcattggcaagagatgattaagattgttctcattggaatatcgattgtttctgatatcagtggtggatctggtcttgatcatgtcggtcaaccctggttttggtggacagagctttattgaaagccaagtaaagaaaatctcggacttgaggaaaatgtgtgcagagaaggtatcaatcgagtaacttttctctccgagtgaaagcctcttctcttctcaaaacattgtattgttttttctttagggagtaaacccatggattgaagttgatggtggtgtcactccagcgaatgcgtacaaggtaaagctcagatactcttcctagtttctatcttcaactcacattttactgctgtagatatttctgtgccttagagatctcgcgatattaaatcttttgtgagtgtaataggttattgaggctggagcaaatgctctagtggctggatcagctgtatttggagctaaggactacgcagaaggtatagagataaatccgatgtttcgtttactttctgagcttagccagtaggaaaatataacgttgctctgtttgtttgttgaaaaatctgcagctataaaaggaattaaggccagcaaacgaccagcagctgtagctgtgtaatgtgaagcaacagcaagcgaaaagactctgttaaacttaggttaatgacttcgccatttctaaatactcatggttgtatctatatactctgcttgcagtacacaaacttggatcttgaaaacgaaaattcacatatttgacctgtatctttctttttttgatgagcaaatcctgtttctgggatttatctgtggtttgatctgacttgtagtaacttttatttcaggaacagttaaaaagtgaatgacgatcaccagaagtcccagatgttgtcgttgtgtctccattcgccataacattcacaagaatcaaactcaatatcttcaaagtaggctcctctatactattctgtaccattgtcttgtaaattgaggatatgcagattccatacattttgcaatgaaacactgtgataagaaatatgttgttacatatgtgtttttgacttataataaagcatttcatttgtcttgcgactcttgcccaaaaacccagagataatcactttgctctatctcctgtaaaagttttatccttatatacaacgaagagccgattaacaaagattgactaacaggaattgctgacagttttcaaacgacttgaattggtcaaaaaacaagctgattttacatatccattcgcttggtaaaacctggctagcaattgattcaaaaaaagagattggcaatatcccagttttgatcatgtcacactgcaacatcattgtatcagtaaaacgcttttctt

SEQ ID NO: 30083 - DNA, 2647 bp, Arabidopsis thaliana landsberg
atataaaaaaagcatgcaaagtaaaagctctaactatgttggacccagaagaacaaattctaatttaagcttccatcacacataatgaatcatgatgatacatgccaactaattccactctcacatcatgtaattaaagaggtcctataaactcatatgatcatatagtttttcactttttctagacatagcttaagatatttgattaaagcgtcactgcaactttataataaagaatgatataaagctggcaaattaattcttagattacttcgatagattcagttctgttataggattcacaaaaaaggttacaaaatgatttgttttcttactgtttctggcaccaaaacagaaaatgccttagatgagtgaaccatggccatacatattcatatccggatcgtcttcatcttcataatctggttctgtagatggtctgcttctctttgcctctcttgctattattgattgtcctctccctttcttcggctttcccctgtaattttatcacattggtcaacaaaccaaaaccatgtatcagagacatacagggcaggtacgaacgaggtaaagtcagctaggtcgggaaactaactgtgtcgacaaaccacccttagatcgccctggccctaattcagctcgtccatctatattatacagagataaaagtgtgtaaaaactgatccaagatttgcaaacgagaattcagcgtagttgtttgctgcagggtttaccttctcttccaacaccaagttcttcagcctgaatacatatcagggaagatcaacataccagtctaaaaaccattttctctaaagaaggcagagtaataaactaacaaatgacagtcacaaacataagacacatatgcatttcgtagaactctagctctttcacaatcatagattcagctttcacacttgtttgaatctgctagagatattagccatgtagtattcaaccatatctaaagccactgattctcaaaccaaactacctactataaagggaaccataggttctttgggcagttgattctattacaaaccaacacaagaaaacaaaaaacgtctttgcatataatagaaggtgataaaaattgtctaaaacatacagctggtgatgtaactgaggacaatgagaagactctgtcttcaggctgaaacttgcttgaccttttagcactgcagaaatgggttcataacttcatatcaacctcaatttctcgttccacacaacaaacatgctaaaaactgagaagttaccacattctctaaagtgtatgaagctgcaaatagaatccaaaagtcaatgttttctacagagtcaagagaatgagagacctagcagtactcttggaagaagacaaaaatccttcaaagcctttcaaagcatttccaatatgactcgattcttgaagatagcttgtctccaattcataaacctaagattacaaagaaccaaagatttttagtgtatgccccaaacaataatttctctatgaaatcgaatttcacaattgaatcgactctggaccatttgtgccctaacctgtttctcgatgcttcgtaactcttggcgaagcttctctcgcttgttcagaagagaagtgagcatcgcaccaggatccgtcgaactcttttgccctaacgacattttctggggggaaaaatacacaaattgcgcagcttttgcccttcccagaaatgggttttcgctgaaattcgacgcggaggtaaccgttgcctgatttgagtcgattacgatggagacgatgatgtctggaattcgatttgggggttgttttcaccaatggtccggtttgatgtcaacaaaaataaaaatggtcaccaacggtccggttttcaccaatggtccggttctcttttcttttgataactttttttatgggtcagagattttattactcaactagcaattgaccaaatagtctacggccaaaagtggctacctgcattgctaaagaaagaatcagccaaagagttggcattgcatggaataaacacaagtaaagtgagaagcatggaaaaagaaactgaagttcttctacctcttgtaagaatattgaaaaatatggtggtatttgcgatcccattgaatctaatgtttaatataaaatgtagtgatgtgcaacaaaataggtaaaataagaaatgctttgttaaaagtcattgatataaaaaagtttgatgtccatggaaaaaaaaataagtttccagtataacgcttgattggttcgatacttcaatttgaagctgttgaattattttagcagtagaacgtgcataaggtccaaccaattactcagtcaactataataaacgagtgatgaacttagatttctggtagcctaaaatcactagcttctttataaagtttccactatgtcacatattctcggtgttttatgttaggaataggagcatctccgctgaaaccccgccgcaactttctcccaacaaaatagacatttagactttagtaagagacgacgacttcaaagtctttaattataacttaatgacttaataactcgggtcatttttaaatctttgtcttgaatttttctcctaattatttccgactaaagaaacactttcccttaaattatatataggtgacc

SEQ ID NO: 30084 - DNA, 1844 bp, Arabidopsis thaliana landsberg
aaccaacacctaatttctttgatcacgctaaacaaatccccatctcttctgatcaagatgtatcaccgtcttccatcgctaatggagccgtttctacggagtgtctctgaccgttggccggtcatcgctcaggctgccacgtggacggtgcttctaatgttcacggtggccgtcgcttcgtttgctccggagatggcttttgtgtctacggtgtcgtcttcgtgcggaggaggagatggtttcgtgaagattccgatggattttgcaggggagagtatatgcgtgccgtctaatatggtgaagagatcgcgttttgatttgtttgtgccttcgattttcgcggcggttatggtcactgcttcggcttgtttgatccgatcatgtattggcacggagaatgtggatgatttttaataaacacttgtaaattaattaataatcttgtattcagttactacataacatccaccattttgttattccaaatcacgacattatattaagctgcgtcgtagaatagttgacatttgtcagttttaacccaacaatttgatctgttatgttatccacgacccaaaatcacaactaaacaatttgacattccgttttgccatcgtccggttttaaatcaccatcaaattagtaattagtcaagtgatcatgacaaatgccgagagatacaggagacatttgtgtgattctgaggtttgtcaggtttgcaaagggggactggagactatcttgcatgttcttagagactgcccttcgatgtcgggaatatggagcaggattgttcctaggaggaaacaacaagcgttctttgcgaagtctttatttgagtggctctttgagaatctctgtgagcaggttaacgtggaggaggggccttggtccacgatgtttgcactagcagtttggtgggggtggaagtggaggtgcgggaacgtttttggtgagaatagaaggtgtcgggacagggtacgcattgtgagggatttggcgaaggaggtttcagcagctaatcaacagttggtcactcagggaggtcgacgctcgcgcgtagagattctggtagggtgggagaaaccgttgattggctggttgacagttaatacggatggggcttcgcgtgggaatccgggtttagctgctgcaggaggagttttacgagatcatgagggaaggtggtgcggaggtttttctttgaatatagggagatgttcggcaccaatggcggaattatggggagtttattacgggctccattttgcatgggagaggaaagccccgcaagtagtgttggaggtggattctgcgatagttgtggagttcttgaggacagggataagtgatcatcacccgctgtccttcctggtacgattgtgccatggctttttatcgaaggactggatcgtccgaattgttcacgtgtatagggaggctaatcgtcttgcggatggattagcaaactatgctttttctttagcttttggtttgcacttttttcactctgttccgaatgtggttgagttaatttggcgagaggatgaccttgggatagtttgtccaaggcagatcccagaacggtaattttcagttttaagtttgaataaaaacggggggctctttgccgcccggtcacttaccaaaaaaaaaaagtatataataattaattaataatgcaaaagtactactatctaacttttttttatccttttaacagaaatgtttattatttaaaaataatttcatgatgtaaagaactgaagtatcattttctatttttaataatgcaaaagtactatgcatcactttttcatttaggtaatttgttatagtttggt

SEQ ID NO: 30085 - DNA, 2802 bp, Arabidopsis thaliana landsberg
ctgttttgaaagatgacagcttcttttgatgttttcaaaattcattgcattggtgtatttaccaatcttaatattgtaaataaatttctgatatatcacatccagcttttaaaatatgatcataatattccaagcaagtatatcaaccataaaatttcacagtatttttggtgtgttttcgttttgttcaataaattataatgatagcctaaagacacatgattagtaattcgattaagcgttttttgtatatgatatttctaaccaatataaaaagacattgaatttgatcattttgacctgcctgataaatgtatatgaagaagtggataataaatttagcgattaactttattagaaatttaataatgaaaggtttgaaatgatcaagctcaaaacaaataactgaaatctaaactcttttaaaaaacaaaagcattaaacttagaagatcatcatctttctagaaaaaccaagtagattattttggtgcaagctcatcttccacgatattcccattttctttgtcaatatcatcacgaatgctcggaatgcaaaactttttggaggatgatgactgattctcgtgaagatcattgccttcgtccttacacttggatgacagagttgtcgaatgagttcccaaagattcggctttctcactactattacttaatagcatgatgtcctaagaaaacatattaatattaataaccataaaactataacgaaatgtccactatataataacatttatataacatataacctgatcaactgaaataatagtctgaagatcatcatgaacatcagaatcaccaattgtgtcagcttgtaaaggctcaagaccaacccaagcatatgcaactttctatgtgtcattaccatcgttgatgttgtccttttcaattgacacgacaaactggaatgtttctccaatcaaattcaccaagggttgtggtagaatagttggatcctttatttgcattccataggttccatacatgattgtaaaacagcatataatactataagaaattataaaacgttgaatacaagttacctcatcaaattctccgttaagaaggtcgtaagcagagaaagagacaatctgctttgcatctgattcaaatagcattaatttagtggagccacttgaatccatgatatcgacaatgagcttgtacctaatttacaattacataaggttatcaaaatttcaaaacacttcataacgatcacaaattctgacagtttatacataccttgggattgctctgtttgtagtttccttacatgtaccacaccagaaaagtggtttacttgccttattgagaacctcgttttcaacctttggaactaaatacgctgtattcttacactttgagcagatgaagtaataccacgaaaagtctttgtcaatgttaaaaatagtgcacattactttgtacttcccaacctagaaaccaaaattgtgaaatcaatttcagtacaaaggtagatacgaaaccaagtacaaaaccataagatagaaaacctcatttgtttggaccagatctccaatggtacagattggcagtgtgttatacatttcagccttgttttcagcatgtttaacatgcttaagaacatgtacttggagtgtcaaagacaattcatcttttggtaaactacacactattcggaacaaaataaaagagttagtaaattagattttcattaatataatcattagaggattaaagtatacaactcactcgagaacaaactcttaaagttgaggatgatccagatcgatttccaacaacgacatatcaaatgcactagaaacagatctatgacctgtaaaaaaaatttagaccataatttatattccatactgaaaacgggttcataaagaattatatgttacctttaaattcatcgatctttgcgaaacgaagcaaacatataacccttttggtcccaatgttttcgcaagcagcaattagtgtttcagcaaatctcccccacaaagtacacgccaacctcacatctctacaatacattaatgaatatataacacatacaaaaatttgttgataaacagtaaacaaaaaagaatcttaacctcgtatctctcagttcaaattccagtttcttggtagtcttgttattaacatcatgagttattagctcgccaatgttcacaacttgaccaagaatatttgtgaaaagaacataccatgtgttggtttttgtaaatagttaaaatatctataagaagaacatatgaatatttcgtaattaaaagcaagtagattttgatttcttaccaacctaaatattctcattcaaaccgtcttcattgaccacatcattaaaatcgaccaaatccaagtagatgtcatcggaaacagaagcacaaggattgacaacagagttgtacataagagacatacgataaggatgttttgtagctctgaattttcccattgccttagtcatggtaaaattctcaataacaatccatcgtacagcaacaatgtctctttgaaactttatagcttgtgccttctaaagtgttgcatgaattagagtaccctgaaaggaaaaaaaacaagtctaaataaaaaacaatcatataaagagtacatacgccaagttaatatgacaacttaaactaacataagtatctcccaaactcatctcaactgtctcgcctgaatattgtgtgtactgtttccaagtatgaacaatcttcacttgaatcctccaggttgtcttgaatggtttgatagcattgaggctagtgaaaggaga

SEQ ID NO: 30086 - DNA, 839 bp, Arabidopsis thaliana landsberg
atatatcagcgggactaagaaggttatatgtatgctttgatatgcaaagatcaataaattcaaagatatcacactgttataatcccgttttcaaattatgtaatatcccctatggactaaaatgtgtttacagatcaattcgtttaaaggtaacatatattggtagaccgttttcccttatggaatatagattaacaactaatatgtgtttacaggtcatagatctgtttccggtgcatttgatatgtcattgttggaaatcgatccggatcatcctcaagttcaagagtgtcgagtaagttatgagacttttaaccatatatattatataaatgaacctctaatctatcaacgtttttatcttcgcttgaatatttgtagtttaccacaagatggattgtctttgacactgcaagtacatgttcctaagcatataaaacatgctgaaaacaaggctgaaatgtatatcagtctgccaatctgtactattggagaccttatccagtcaaatgaggttttaaatcaaattgttttgtatttggtttcaatatacctttgtatgtaaattgatttcattaatttgtcttttaggttgggaagttcaaaataatgtgcactatttttaacattgacaaagactttttgtggtattacttcatctgctcaaagtgcaagaacactgcctatttagttccaaaggttgaaaacgaggttcttaataaggcaagaaaatcacttttctagtgtggtacatgtaaggagactacaaacagagcaatcccaagatgtgtttacttattgataatttgttaacgctatgtagagtttaaaattttaac

SEQ ID NO: 30087 - DNA, 1297 bp, Arabidopsis thaliana landsberg
aaaaccactatagaatgcgattggaagtagggtcggagtttactttcagcctttataactgccaatgctagcgtctgcggtttttcattaccatgatcgtctcttactaacactccagtcaccgccgaacctgacaccgagacatatatatatatagagtctaaccatcctcgggtttggccaagatcgtcccgctcataaggtaggatttgagctcctggaaggcggtttcgcatttctcatcccaatggaaatccttattgccacgtagaagtttgtagacaggaaggcacttgtctgttgatcgggcgataaagcgattcaaagctgcgatgcgacctgtcagcctcggtacttctcttttgttctgggggggacggtagtttgattattacactgatctgctttggattggctttgattcctcgttcggtgactatgtatcttaagaattcgccagatgtcactccgaacgtgcacttagtaggattcagcttcatctcgtacttgtcgaggatatcaaaatacgcggtaagatgtttgatgtgatcttccgcctgcaaagatttcaccagcatatcatcgaggtaaacttcaattgtgactcccagcagttcggcaaacatttcatgaccaatcgttggtaagtcaccccagcattcttcaagccaaaaggcatgactatataacaatagatcccgcgatctgtgataaaagcggtcttctcacagtcatctttatgcatcaagatctgatattaccccaagaaagcgtccatgaaggacaaaagctgattcccgacagtcgcctctacgaggcggtctatgtgtgggagaggataactgtcttttgggcacgccctattcagatcggtataatcgacacaaactctccacttcccgtttttcttcttgtctacgaccgggttggctcgccattcgggatatttgacttccttgatcagacccgccttcagtagtctttcgaccttgttttggacagccttggcatgatcagatcccaaccgcctgcgcttttggcgaactggtttaaaagtcggatccgtattgaatttgtgacaggttacctttggagcgatcccaatcatatcctttgtggaccaagcgaaggtggacgaccttgatttcaggaaggcaatcagcttttcctttcatctcccctctagttctcttccgataccgactgttcgggactggatctggcatgttaatattgacttggatgatcttgcatcttggcgtccctattgattcacgagtcccgcgcttagagggac

SEQ ID NO: 30088 - DNA, 2338 bp, Arabidopsis thaliana landsberg
atgaattggtaagtgtttctgcagattctcataagttagagttttctgttttcaatccaatatagtttgttttcttgtgagtatgttgagttcttatgtctagtgactactgttgatattgatttgtgtttgcaggaagagaagttgggaagaccggtccatcttggtgaggtgttcatcgaaacacacactaagtcggatggctcatttgttgatcagaagtcggagaagattgctcaagcttatcagcagaatgtgagagataggctgtcagcactagaggcgtctgcttctgctgtctctgatggctcttcacgacctccggagctcacactagatgattatacagccatctttctcgaggtaagatgttttagtataattatgagtcttagagtccaattaatattctgtcactaatgagcttcttctctatttcttgcagtccacagaaaaggattcaagaggcaatccttatggactaggatgtctaaaagacactctaggcagcgccaaccgccatcactccggttcctcatcatcctttcaagccctagaagaacggctgcaggaagctcaaaggaaaatagaagagcaggctgcatataatgagaagagagatgctgagattgctgcccgagaagctgagtcatcccgagtcacagctgagcaaaaggacaagctcgagcaattgtctttagtcgagaagtatctccgccaaaccgatccgcagttcttggacttcatggcaagtcactctaccacaaccacagaacgtctaccaagtcctccacctaatgatccttagattatctttgcccaaactctacttgaacatatgtttatttgaataagttgtttgtgtaataaacaagataattgtatgtgtatttgtacttgattttctatatatacaagtcttttcatctttttagcatttcaaataaaaaaggagaaaacaagaaacaagaaaacaacaatcgataaccaacaaacaagaaacccaacaatcgatgaccaaattcttattcggacaaaacaagtagtcgctcagtagtcgtatttaggtagcaaattagacgtaaaatagtcgtctaatagtcacactaattaccgattattatccgactaagatacctagtcgcaatataatcgtccacgagacgtataatagtcgtaaaacattatacgactgttatatgactacgagaattatttccttacattgatagaatttgtcgtccaatagtcgtcaaatagtcgtcaatatgatacgactattatacgaccacgtgtttcacacgcttcgtacaggacaattaatcgtgctatggtcgttaaatagtcgccaaaattatacgactatacaacgacaattgtttactgattgtgttattgtcgtaatatagtcgtcaatcaacgactaattcacgactatctcattcagcgactatgtaataatgactaacgtcgttagtcgctgattagtcggattatcattttttacgactactatgcgactgatgtgtaagtcgtttatcacctgttttcttgtagtgtcacatcatcattagacaaatccagcagtttacatttattcggagagtttgcgcgtagaacctgtcaaaaacatatagagaacaacacatcaaatagcaactcataaacagtctgagtacaacgaagcaacaataaaaaaaattaccaaaggcgcaatgtcttctatttggagttccttgtccaaaagaacacactttgacgctggccatgcaataatctgtccaacagcttcctccatagtaaacatcttagttgctggtctctagaggaatgcatctgctttagtagcagattcaaccaacactttaagatctgtagggcctagacgacagtcattaactaagtcatcaggattagaagatagaatacgcccctcaccaacgtcttcatcactcccagaacacacttagggtgtgatcttttgtttacactctacaaaacagttgattagaaatctaagtgaggaattacatagtaagaaggactactcatggatctaatatacattacttactctggcagctgagttttcacctatttcttgttcttgtctctataacattaaaagatataatgtcagttctcacttatatatataatattagctgcttgatagaattaaattttgttattgtctaagtagctaacctggttcttcattttgctaagttcatcttgcaactcatttactttcctcattaactgaacctgcttctcttgcatgtccgtcatacacttggtctttactgggaaacaagctactttgcttactcatgcc

SEQ ID NO: 30089 - DNA, 1511 bp, Arabidopsis thaliana landsberg
gaagcaaaatattctatcgccgaagcagatgtagcacccttctaaggatatatgctgcttttgtcttgatatgccaaaccaaaaaataatagcaatgagctcatctgagtgtgcaatgcaaattaagatgacataatggcgccactagtgattctacttctccaaatcatattttactaaactagctacatttgtttgatagacaattagtgtgattccacagcatatctttgtagtacttgagcaaagaagaatcaagcaggagcatgtgacaaagaagaagaagatgtgtttccaggagaatccaaatacttgagatttgggccttattgggtctgaagaagcccaaacttagttatactgcgtaggttatttagcataatttctgcgccatcgtcgtctagtctcttatgctttggtaaaattatcatcaactctgcttcttttattttggtaacaaccaccgaaagaatttaatcaaaattgaatgaagctttcttcctctaaactctttggtcaattccttcttctttctattcgattgtgataagatctttctagagatctaatcagaaccttgtgccgcggatttggagaaacatcatcatcatcgtcatagaaatcctgctctttcttcgattctgtaagagttcttcgagcagactctagattcgatttgtttttttccttttcgggtttgtttcaaatcaatctcaatttcagggtaaccaaagtttgagcttattcattttgattctgcccggatctctatacatgtcaattacagtctttttacattttcttgatttggaaaccttttcgggatttaattgattagcttaagattacaagtgatgaaaaaaaagacagagactttagcaaatgttttctctcatctcttaattgctgtcttaattacaatcttcttgtttcagttactgttttgtaagacattgacattataatctacttgtttggagattggaattatgagaagagaatctttctgatgccaaatgtcattgaataatcatttgctaatgtttcttttaccatatgattcatgatctctttttcgttttatgttgcaccgactaagctttgaaatctgcttgttccttgaaaatggaactacaagatgctatgaatgatgagaatgagaaagcccctgaggcttcggtggttcagaatgatgaagtttccgggaacaatggggatgtagtggttgaagctgaggaaaaggatgggaatgaggttgtagaacccgttgattcaggaaaaagtaaggcagatgacgagtttgttgaaagtctgttggataccaatcaggatttggctaccttcaaaataccggtagaggaaaatgatacggaaaatgtgactgttgaagaaccttctcttcctgcctctgttgaagcaacttcttttgggatgaaaaagccttcaggtttaccagccaatactaatattgttaagaaaggtaagacgctggtaaaaggaaaattataaag

SEQ ID NO: 30090 - DNA, 516 bp, Arabidopsis thaliana landsberg
cggggaagaagttgactctagaaattcacttactcgggtttttattaagaatttatgagccgctttcaaatgttacttttggaaagacaggctagaatttatccagatgacaccccagccacaaccggtacagcaaggacagatctctgcgaacttctcagcatgcgtggaatggaccctcctagatatcagatcatgatagatatctaatgggcatacatttcagccacattattattggtcataagtcataactctaagtgtagataatgggagaagagaactacataccgtaaactgagaataagctattcatcacacctgcaataatgtgaatccgagttttatataaggctaaatgaaactgaattatgataacaagaacagagaagagtttgatgggtattcttaccaataaacagaatgacataacggagaattttgactgtagttaactcttgtagaacccatatgacagcgaggaaaactatgaaacctgagatttttacaactatg

SEQ ID NO: 30091 - DNA, 5248 bp, Arabidopsis thaliana landsberg
caagaagcgaaccgctgaaacctgagcaatactcgatcacactggatctactcgacttttgcgggaaagaaatactcaaccgcaacagaaggagagataatcgaattccaagtttcactcgaccgcagggttggccgcagtggaagaagagaaatcgagtatcctcagagcggtgctggccgccacagacctgatgaggtcgagtacccatcaagcaaagtaatgataaatgatataaaacagtgatgatgtgatgctaaagtgatgacaaatggatgcttaaaacatgcaaaatacacacttatcaactcccccaaacttagagtttgcttgccctcaagcaaacaattaagaacaagcttgaggtgaggtttgaaagcgggactcagagccaaagcaccggataaaccagataaaatcaatgtccaagttgatagtgctaagctgtgatatgatcaaattctactcaaaaacgttagtcatgccttgttatcaatcaatccgactcatatgctcgacctacacatgttttcaaatctacgaatccctttaacattcattagctctagaacgtgaatcaagcaatgcatcatcaatgaactcatttggctaaggtaaaaggtcatgagacagagatggtcccttacagaataggcttcagtaacaggggatctctcaaaaaatgattaagctttagtagaatgctaaaggtaagtcccaagctatgcatacagagataatatcccatctacccagagtatatcaaatgaagctctaatggtaatcccatctccaatcccaatataagaaactctaccctttgcattcatggatcttttaagccatttttctaatcattcttttcttttctcttaactctaggagaagctttctcaacactctgatacatctagcaaatttggatttctttaacaactaaggtttttgttttaaatttttaaaacgagggcttttgactttcttcattagctaacaagaacccttttattttttttacaaattccaaaacatttactagattttttttcttcttctttaccctactttacctagagtcttttaccttttcttatcaatgaatccacccttttttttcttttagacacatcccaacccaaagtataagcgtccagctagtcctatctagtccggataatgcgatctagaactacatgagacactatctctgtcgttacgaacctaacactttctaccaagtttaatcggaataagacctcacaaacactttctaccaagtttaactgctctaataaggagagtcagttacttggattaacaagagctgttaaaatgagtaagaaaatccaaatattttagggtatccatgagttgaaatttgatgcaaacatgataattgaaaatcagattcaggttcaaactgatagggaatgatatcagatcatgacagtgtggtcgagtagagcaatctaggcatggtgcagttttacttcaatttcattgactacagatcagacaactaacaacaagggcactgagctttatcttgtgaaccaaaatgcttacaaggctatctcatcattatcccctatgcatatgcaacaatcctaaacgaaacactctagactcgatcctaaatgaaatgcaactacatgaacactctatttttgtgaaatcattttctgaaatttttcaattttttttttttttggtttttctatgccttagatgaatgcacactcaagattatatgcaatgcaacacacacttcctgagccctcccccaaacttacatcacacagtccactgtgtgaccaaatttggaagagagtactcaggacaaatccaatcacatctcaaaaaatgaagataaaaacaacatacggtatattacaatggtgaagtgaggcgcttacctcagtcgaagaatgaacgtagttgctcgtcaatggctgcatgtgattgctcccaggccatagacgaacctccttgttctgtatcagctccagcaggtgggtactcgacctcatcagctctgtggcggccagcaccgctctgaggaaactcgacctctctccttctgctgcggccagcaccgcggtcgcgtaaactacgagactgcagaagtcgtccgctcctactgctagatcgagtgagtgtggtcctcctcttcctcccagtttcacgaggctcgaatgatgaatgcctcgcagggacatgcggaatctcctactctctaggctcaggcctgcgccgacttggctcgggcgcgtcatatctcctcgaaggcatgtcctgagggagatgtccctgcggaatagctgtagtggaagaggagcagctgagcttgtccttcagaaacttgatagcccttaagcacttggcgagtaacttgtcctgtttcttgcaccacttctgtagcttgctgttgttcctgtgagcttcgctcaaacttttgctttccctcgtaggaggtatatgctcactgaaatgatacatgctcgtgtcaaactccgcctcatctatatcatccatctcatcaacatcttctgttgtagctccttcggtgtgactaaactcctcggttggcggactgccctcgaaataaagatcttcaagcgcaggcttgaagtcaatgttcctgccctcaagaatcctagtagcgtcaatgcaggggagaagaatgttggcgattctaatcgatgaatgctcgaacctgtagcggtgaaagtcgccagccatgtcaaactccaagaactcacatctgcgcaaatgatccaagtccatcatcctcggtgctaaacctggttccttgagcggtactccacaagcttccataattggcgacacaacgccacccacgcatagtgctcctctcaccttctttttcccgttcgtcaacgcccacttcctgtatccacacagatgcatcaacagaggcattactggtggtgcgttgttgagatcgcctctcaagacattcttccccttcgtccgacgcagaatccctgtaagcgcataatctatcatctccatgtccgtgttagacacggtgcctgtagactccctggagtaaaagacgttggcgaccgatcgctgaaagtagcggatcacaggacttcgaatttggttgctcttggaccgcgccgagtttagcggtagattgttccctatagtggcccacaaatccttaagctcttctctgtcaaatctgggtttggttccctttccactagggaaaccaaacagttcttccaacttcttgatcgaaagctgataccactgttcattcactgagaacgtcaagaagcctaaccccatggtatcccgctcaaagtccgtgagtgcctcatacatctccacttgcagcgtggaaagaaactcgattgtctcctccttataggcagggtaagggtaagacatgagtttctccagatgacacttctcgaacagatgctgcacgtcctccagtaaccccagctgggctaaagtctcatagcacggataccgcgttccccagaaattattcatctcaaagaacctgatatactcttccactgtaacctcgtcaggtttgttcagcagcttcgtctccttgcgccatgactcgggctcatactcactttcgatatcctcatcaatcagctcatacctacttgacatcgccctctttcctctggcgatttcagcccttctctgattacgtcgggctgcagagcgttcgaattcatccctgaagctctggtaaacatgttgttctctcggtctagcagaccaggactcagcttcatccccattgtagtcagggtccatagaggattctccactgtagttactcatgatgaaacctgaaaacagacgaaactcaaaaattaacgttaatacgttagttccaacaaaaccaaaaacacaaaccaacagagcaaaccggtcgagtgtaccaaaaattatttttatttttttttcggtttggtgaactcgtagtcgagtgttttcggaaggccgagtggaggtagaggagcggtgattcgagtgattgaatcggtggtggagaaacggaggtgctcttggcgtgaagtcgagtggagttatgagctagagaaagttgtgttgaggtcgagtgtattccttggagaggagaaacggctgtttgttgagcaaatgagagacggagatagatggttaggtcgagtgagtgaaatggagagctcgagttgtttccttggagagagtgagcaggcagcgatgatggagaggcggtgagaagcggcgatcgagtgaaggttgtggggaggagatgggtttggaggtcgagtgttttatgggagagaagtgggagaaatgaagtcgagtttatgaggtggtgaggaggaggtgacgaggtcgagtaaaggagataaaggagcgttgattcaagaggtatggggtcgagtggtttggagtttggtttgttggtggtgatgaatgagagtgatgggtcgagtttatggggttgtggaggagaaaacgaggtgatgaggtcgagttaagagggatggtggtcgagtgatggtgttgacgtcgagtggaggagaagagatgaggagagatttcctgtccttaagtctgttgcatggaggacatgggcgtcagcggcgggtcccagaatgtcttcttgtctctactttgttcactagaaaactccaggaaatcccacaatcttctgtaaacttgataaactccccggaagactctgtagcttctgttggtcgagtaaaacgatgttttaattttttttgggttttaaacatcactcatactcgaccaatgtactcgatctctagaccatcagtagagtaaaagttttgaatttttactctactttcacgttacttctcccctttttttttctgagaaccaaaaacacaactaaaacaaatcagaaataacaaaaaattatttacatggataatcatggaactttctcccaagtgagcttgtttaaagtctctagcttgactcctcacactcatcaagaagaaaatgaactgtagagagggtctgcatgatcctctctgataccatcatcatactcagcgtcctccctggagaggtctgcagcagaatactcaattcccctctcttcaaaatatgcttctttctcttctggagggtaatctatctcttcagaccatcttgaagtgaacttctttctcgggatagtgtcgatcccgcctttaggttgagtttccttctgcaactgattcag

SEQ ID NO: 30092 - DNA, 3455 bp, Arabidopsis thaliana landsberg
tttaaattatcttaaatctatatatcacacgggagacttacggatttaaccattcttactttatatggttacaaattcattcaccttaaaagtaaactaattatgatgtgaaaaatattgtaaaacaatttcaaaagatccttagctactgttcgatatgttttgtcgttaccaaacatatctcaagtcagaattagcaccacaataatattgccggtcgacgacacttgtatttcaagtttaaaatccgttaaaattattgttagcaaaccttccatcatcttttacctttacacatttgtagtatttagtgtcgtatcattttgttgctagtctccatcacatctactactactactactacactgaacaagatcaagcatagaacaatcaagaatgaaataaaattttaaaattatgcataacttgaaactgtgaccctaaaaacttggataatattaaggacttggcggcttatgctctttttttaggcaaatgcttttttttctccatgtgtgtgtttgacatttaaccataagaagtcaaagaatgaataaattttaaaatctattactacatactaaaaaaattaaaatccaatgaatctaaaactcataaggcaaaaaaagtaaggttacactttttgtggctgaccaattaaaagtattaatatgtggtttacttttaataatcgcgcatgtaagttttcccaccgcaacatatcaaaatccagtttgcacgtgagaataattggctaaaaagtaaaccttagccaaaaacatgacttatctcagttcatcccaagtaaataaatcaaaaatcaaatcttttaacgagcttgttttgctcttcttatatagtttctggaagagtgatgtacaaaggttcttcgcaaaggagtcaaacgttcaagatctcattataaagcagagccaaattctaccacgaagaaaacaaatcaaactgtctcaaaacaccatcactattgtcttatccgaaataagtgtcagaaagagaagtcttaagagtaaagagaaagattctatgcaatgaaccaaaatcaaatagcaacaaaataaaaccaagattacattgaatgaaagcttgtaaattttgcaatccccacaacaagaacacaatcacaagacaccgttttattaatcaattttgcaagacgacaaaaatgtcatacttatatggttcctctataagcagtaactaatcaagtattggcttttcttaatctctatcatttcttcattctcctttcatgacattccttcaaagcttgaacatctttgtaacacataacaaacaacaaactcttatcaacattttgtccgaatccatcagttcttttatcaatcagccaacaattcctcacacatattaacaataatcccagtttcgttcgattaggtacaaaccctaaacccctgagctctaaactaaaaccctcagatttcagaatttacaaattgagatagagatagagagagtgacgtacgtttttggcaagatttccagtccctattactatcaacaagacaatcctacaaaatcggagacaaacaaaatcgaaatcaatgatttaaggaatttgatttggggaaatcaaagagatgagaaacacaaacctgtaaagataaatagagagaagaacactccttgagctgtttcacattctcgtcatcgtcgtctgcatccatttgatgattcggcggaggagcaggagaaggttgcgtctcggaattgggattctccgtcactttctccatttcactgcgaaatttagtttcttcagcagagaagaagaagattcagaaatcggaaagttattttattcttttgggcttttaaagttttttaacctaaagcccaggcccgtttagttggtataagaagaagctttcagtctcatgcataagtggtcaacatgtagataagtccaagagtagaagttgaacaaaagacaaagattgttgtctcaaatgacttcagctccactaacctttgtcgggtcactgtgacacgtggcgttacccaccaacgtgggagctatcacaatcaatagagaataaactaccaaacaaaatttttgttttcttgaatatcaaagaaaatgtcattgtttttgttgcaaaatggtgatttaaatttttgttccaatttgacaactaaaaagacattagtctgttagtattctaaatttaggattttaaaacatttgatcaaattatggagaatattctctggcgattttctgtctgaaatgcaaaaatggatatttctttcgtctaagattaagaaagagagaagaggcggattttcagttaataacaagaagagaagatgaggtggtgtaagagaaaaccaatgatcatggttactttctctctctctttccttagtctttgatctcttctctctttctctctctttcccttttttgtctcatttcttgtctgcaatccatggaaggccttcgagactcatcgtcacaaactatctcttccacgacgtcgtcttcttcgtctccgtcctggtaaattttctttcatcttttctacaagatatactgtttgtttcagaaacatctacaagatttgtatatgattatgtaccgtgtctcacaagtcatctcatatggaaatatacaaactcagcgatgtagacgttgacaatcgtggaaaacaattaactccttctacaagacgatctcgagccggcttctctgattctttctcttctcatggtaatttattaaaaactgcatcatcattaattaggttttataaagatctcattgacttgagattgtccttgtccttgtccttggcatgaatttcgttttctgtgcaacagatttatcatcattctgtcgagatgaagaagtaaaaacattctgccccatcaaatcggaatcagacgatgaattattaaggagcatagaagccgaaacttcatcttccgtggtgagcacgtcagactcatcagaaactcatcaccatcaccatcatcatcattcgtctggaggtcccaacaacggtcactggagaagaggtttcttccgtttgcttaagaaaggatcatccgcaatgccattcaacacgttcacacctctcaaaggagttccgaaactgaccagacggaagagcaaacgcataagggacaacatggttcccgttatacctgctcttgacactgatgacttgttctatttcaaaccctcctggaggaacttctctctccgagatattcagaccgcgacaaatgactacagccgtggtccggaaacctctaaagaacccttgttatacattttcaatagataaatactattttatgcagtgatgtaacatgaaaacatgtggatattatggcagaaaatctgatcggagaaggaggatatgcggaggtgtataagggacaaatggcagatgggcagatagtag

SEQ ID NO: 30093 - DNA, 1350 bp, Arabidopsis thaliana landsberg
  unsure (1)..(1350): unsure at all n locations
tttactgattttgacgtaagacgaaatgatattttctttgtttactttgatttggtttgatctttcctttatcttagtgtttttgtattgtcagagcgacatgagtaatgggtttgctgcaaatgcgatcaactattatatgaagcaatttgtagttaccaaggaagaggctattctcgagtgtcaaagaatgatcgtggacatcaataagaccataaatgaggagctactgaagacaaccagcgtaccaggtcgagtactcaagcaagcacttaattttggacgcttattggaactcctctacaccaagtccgatgatatatacaattgtagtgaaggaaaactgaaggagtatatagtaactctgctcatagatcccatacgtctttgaagacttcgaattacatggtttattgagtggtttattcatgtctacaacataaaagcaaacacttgtacacatctgaggaattaagaaagaactttaattacagaaagtagtggttcatctttctcattctatctttcagttttaacattaagagtattttatctatacaaaaactccagaactcanaacatgtcaacgtatgttatctggtctcttcatctctcatccagctcaggattgcacttcactgcacatttgaaacccacatttgattagctttcacaataacctcatgagtcatgagtgggacgtttaatcactattaaaaacatttggcctctgctcaaatgcataggtaagaaaactatgcaatggtctaaagtgtcggctccacagttttgacaataatgctattgtcaaacaataccaccactccagtcctgagttatggctagggtcgaatcatctaccactataattgcttctctaaaccttgctgtatatggcctatttttttcgtacaaattgcattcaactaagagaagttctacttcttactcaaattaagttttctacaacttgatcatgtttaccaatcttaagtatattcttatagacactataatcacattggttcaaaagaaacacgttaccttacgatgacaatcttggtgtgaaattttctggttgttaacattaacatacacctcacacgacactttaccctgcagaaaacaatttcacttatgtataaaaacatcaattttttgaatgatattgacatagtttcagtattaaaacaacagatgttcggaaactactattactatgacatagaacaacctattgatcatgtcacacaaatatcaaaacaatgctcatgatcaaaatttcatttagagagcaccaagaaccaccctacacaacaacacacatatgccctacaaatctaagtcttt

SEQ ID NO: 30094 - DNA, 1366 bp, Arabidopsis thaliana landsberg
  unsure (1)..(1366): unsure at all n locations
ttaaataaagattactcttttgtaatgctacaataattatcaatggtgttagaaaaggaaaaataaattttagattactcttttgtaatctcacaatagttatcagtaatgttagaaaaggaaaaaaaaaaaaaactagcattagtactgagtgttggaatacgattaggtttcgtaggttatatataaagcataaaaagaaggacacaaacaaaacaaaagaagcaaacgatggatacattgttcgtcaacaaagttttaattccgttaggacttttcgccgtatcttgtcttttnnnnnnnnnnnnnnnnnnnnnnnnnnntcgtcgttatgaggatccatacgatctaggaacgaagactcgttgcatcaatctccttcaaagtcttaatttatatttgtttttatgcacttgtatgattcttttcttctttttctgtttatggntatgttatacgtttgtatttaagatttgtatttcatatatgtaagatttttgtaaagtttggaatcgtttgaattaacgtgaaaaaatcatcgaccaagctgtatcgatagtctattttgaattagggttataaattttcttcttatgattctttgaatatatgttttggttgccaaacgaaactatacttctcgcatggtttatttatattcaaaatccatatgtcttaagcctatcgtcaagtctgtggctttgccagctccgatcagtttcatgatcatcaaaacttcaatccaaaacacattatcctttctttcttttcacgaccaagatttttaactttttgaatcattcaatacccaaattttgctttgttaacccatgcatgtgtcccttacacggactttaagataggacttgagaaaactagctagggtaagtgggtaacaaggtctctgatctttatacatatatcacaagtgtttgatctagtaatgttatnnnnnnnnnnnnnnnnnnnnnnnnnnnnctactatatatgagtccttctcgtgtgagctagctctaacagcaattgcatgcttcaaaataattagatgtcatatgcacttgcacattagagcatccacaatgagaagttattagcaaaggctcttaccaatactttatgaattgattttgaaaatttggtagttaagagtttgggtaagatttttaagtttagtcatcctcaatgatagtatattaagttaggattcttaaaaaaagaagatatgattttggtttatgtgtggttcttgtggagagaaggaatatatgcgatgaagtaattggtggtgtttggtgtattgacacaaagatataaaagagattcataattggcatttaagagttcataatcacaacaaatttttagc

SEQ ID NO: 30095 - DNA, 7246 bp, Arabidopsis thaliana landsberg
aactgcattgtcagcactggagtggttgtgaactcctgaatattaatgtgggcgacaatattaagtaaaacaaaatgccgatccaacatgtgcgagtaaaatcaaaatcaaagaccatgtatgatatggaaattctcaagtcataccgaaaacactgtaggaattgtaatcattttgttatgtttgaagtttttggcagttctctctgaattttttgcctcctgtagaaaatctgtggacaagaaaattaaagaagaaatgaaatcatcagattcactatacataactctagagaaagaatgtaatgaatatactacaacatgtattgtgtacatatagggttcactggtcttgacgttttcagccttttaaagaataaaacataaacacatgcatacaatgcagtgcttggttctgaagttttaggttactgaccaagttcctgggaaattgactttacgaattcataaactagccaatcaaatctgtattctggaaatatctgcgaagtggaagagaaaaaagaactctaagaaacaatagaactctatgaatcagagatgcacaaacagttcatgtaattgcatcattgatctcaactaacactccacagcaacacaggcttaggtcacaatcaccggcaaaactaatgaaattagaaagaagtaaaacaatgaagtcctcataatctaacaatgcatttcgcaaggcagcataaactactgcagcacactggaaatattatccgcaccagcagttccctgccagtacttttaataaaagacgaaactccaaatttaaagcctcaaatatttaatcaaaaaatcatatttccatcaaattcctagatcagttagatatatgatgtcacacgtctgtttcttcgtttcatattttatgaacagcttgtaagaaaacatattttgtttcaatctaacttcatgttctggtacagatataaagcaacaagaaaatgcaggcacctttgcgactgattttgaaaggaatgacattatcattgtatctaacatcatgttctgcttcaatccagggtattgcacctattttaacaccaaaaatgaaaacttggtgattcttgaagttgttgcagaaagaacataggaaattaaaacagttattgttatgaggagttaacctttactgctacttcctggtgattcttcaatacagcatgatgtacttgagcaatagatgctgccgcaattggttcctcatcaaaagataaatatctgacattttaactaatagcaatgtcaaaacctcttccaaaaacagacgtcaaaaaacaaatctgacatttaactctaaaagacttacatctctgtgagattttgacccaagttacttgtcagaacttgctttatttcttgaaagttacaaggaactgcctacaagataaacaaattaggaatagaacaaacaatccgaaaatgtttacagactcaactataacagtattcttaccttgtcctgcaacgaggaaagagccaacgagtactctttcggaacgagcttcaacgtagccacaaactgaccagctttcacatagaaacctttattactttcacacagtttaagaattcgtttagcagaccgtgaatgaacctacacaatcaaaacgaccaaatgttaccatatcacatagtactagtgaagtatactgcaaactttaaacaagcaatcgtatcactactctaataacttgccttcaccaatgacgaataagccgattagaatgtaattcaaactacaagaaaatcggcctaatgccattgataactacaattccatgaaaccaaaacttaaacacgaatgtaagatatgtaattgtacacctctgttaatctctgaagatactcatcggaatctgctggtaatctacgcaaagtatacttgtaatcagcgacagtgagagtgatctacaagtagagaataagagattcaatgaatgaattggaatgaggaaatggtgaaatcaatagagagataaggaagatacgaacggagtagatagcgcgagaagaacggacgacgccttctacagccgtcgctattttattggaaggtgagtctcggaagatggacacggcggcggcgctgccagtgacggcggttagagctaggccggcggtgactgtgaaagcaaagatcggagacttggatctcccgggaattttgaatttgcggagaatctccatttttgtggattctttgggtttcgtattatttttttcgtagtaacgaagaagaggacggagaagctacacattttctaacttacttgcaagtcgggtcggatcggattgatggacaatctaatgggccaggatccggttagactaatcgatgtgattttaatgggctaagtaagctgggcttggcaaatagccaaatataaaaggttaatttagtcaaaaaaatctctcaatttaaaattaactgacgtaaatcccccttcagtatcaatactgtaaaaattggatagacacagtaaaacgcagtgttttacagaatctcttttaatcgatttgacatcacacaaacttcagagaatctcattttgataaattaaagtttttttccactttgtgaattttaaagcctaggtaaattagtgcatatatataatttaagtgtacatactgtatctctctgcaacgaatacaaccttcttttttacccactacgacctgttttcgctaggcttgctggactcaaataatgtatttttatacagcaaaattattcattaaatttcaactttacgttatatacaacattttttacaaaaaattacgaacatatctcgaacctcaaacctcttaatgttgaagtattaataaatttttatttaaccattggactaaggagcttacacaacctactttaatcttatagagtgtatatctcatgggtatccatttttttttcaataggtaagaaatcaaatcgttctaaatatctttacgatcttgtgatattttacatgcgaatatcgtcgacataatataaaactcacaaaaaataaaataataatgatactccatataaaggaaaaagacagcaaatatgtagggtcaatataaacgcagcctcgtcgtctcttcatatattcgtctctttgtgttcttcttcctcctcagattctctttcactaaacagaaacaaggatggttttgacaaaaaccgcaacgaatgatgaatctgtctgcaccatgttcggatctcgctatgttcgcactacacttcccaagtaagtaaattaaccaaatgactattgaaaacattttgaatactttgcttcttaatgttgatgtattttatttaattgattgcaaaaaaggtatgagattggtgagaattcgataccgaaagacgctgcatatcagatcataaaagatgagctgatgcttgatggtaacccgaggcttaacctagcttcgtttgtgactacatggatggaaccagagtgtgacaaactcatcatggactctatcaacaagaactacgttgatatggatgagtaccctgtcacaactgagctccaggtctctccatctctcgatctttatatttcctaattactatatccataatataatttactaatggtgctagatctaatttgatttgaaatggttacaattgctaaatggtttcattagaatatatgattcattctaatgaaagtttgagagggatttggaagttgaataatgatgtttgataaactgatataatcatattcattgtttagtattagtcccacatttatttctccaaaagaatataaaaggacaaattataattatatttagtactatagttttttttgagaaaatatgacccatacgtttctagctattattggccgacatatccatgctttcagtaacaagtggacttgctcgttttgtaagttgttctcttgatcataaataattggtattgactaatgttaaaattttcatcaatactagtggcccacttgatttgaactttgaataccaaattcggttatcgttaaaccagtcggtatattcatccggttttatatttatcaaaaatgaatcaatcaagtagtatgattaaagtagaaaacatctaaatctttgagaatcaaagtatgtgaggaaaagatggtaaagcagaataattgattagccgaaggacaaaaactacacttctgtcggcaacctctcttttattccccacatcaccagttcaccacaaacaaattttggttttgattggtccactcaactttttctcactatgtggtaccatttgattgagtttatctatatatttaagttgaaaagtgaactatgtacaccgtgaatgcgtggtaaacgttgtatgaaattaatgtttgacaaaagaaaaccatgcattaaaaaaaattagaattatacatatatagagtatataaacagttgtgacttgtgatgaaacctaggagagcccacccaccattaaaatctcgtggtcgatcggtctattgtcacatacatgatacattctatcatgtgaaacttcaacaatttcaccattaagaagttggtacttgtttgttcataaatggttatgtgatggcatcactgtgtgcctttgatacttgatagtgtgaatacgataataactagtaaaaaatatcatagtactttattgcgattattatcttgtcatattggttttttgcataaaaatatatatagcacattatcaatactataaataaaaattaccctttcgtttgataaaaagtctaaagttactttgatcaattagatcactgaaattcgtagattcactaatttcgtatcaatagtcttttcttttggtaaaagctacagataagttatgtgatagtaaatgagcatggaatttgatttgtcataaaacttatatcaatcttttaaaaagaagattcataatttgaatattttggaacagaacaaatgtgtagacattataattttgaattgtttttggaaaaacagaaccgatgtgtaaacattatagctcgactgttcaatgcgccactcgaggaatctgagacggcggtgggagtaggaacagttggttcttcagaagccatcatgttagccggattggccttcaaaagaaaatggcagaacaaacgcaaggctgagggtaaaccctatgacaaacccaacattgtcaccggagccaatgttcaagtaagtatatatatatacagcttaatctgactagttagaccgttataataaatagaaattttggctcccaatttcaggtttgctgggagaaattcgctcggtacttcgaggtggagctaaaggaagtaaacctaagtgaaggttactacgtgatggatccagacaaagcagcagaaatggtagacgagaacacaatctgtgtcgcagccatattaggatccacactcaacggtgagttcgaagacgtgaagcgtctcaatgacttgctagtcaagaaaaacgaggagactggttggaacacaccaatacacgtagatgcagcaagtggagggttcatagctccgttcatctatcctgaattggaatgggactttagacttcctttggttaagagcatcaacgtgagtggtcacaagtatggactagtctatgctggtattggttgggtcgtgtggagggcagcagaggatttacctgaagagcttatctttcatattaattatcttggtgctgatcaacccactttcactctcaatttctccaagggtatgtttataactttcatattttatctaggtcaagtaattatgatgttattttacgtagcattggttatgaacgtttttggttgttgtaggatcgagccaaattattgctcaatactaccagctcattcgtcttggattcgaggtgagtctatttaagccgaaaatatgttttgttacattttcaatttataatgtcaattttctttcgtttgttacgtttatgactctggtatttgttacatcgaatgtttgatttgattaggggtacaaaaatgtgatggagaattgcatagagaacatggtggttctcaaagaagggatagagaaaacagagcgtttcaacatagtctcaaaggaccaaggagtgccagtcgtagccttttctctcaaggaccatagtttccacaacgagttcgagatctctgagatgctacgtcgttttggctggatcgttccagcttacactatgcctgccgatgcacagcacatcacggttctgcgtgttgtcatcagggaagatttctcaagaacactcgcggagagacttgttgctgatatttcgaaggtgcttcatgagctagataccttgccttccaagatatctaagaagatgggaatagaagggatcgcggaaaatgtaaaggagaagaagatggagaaggagattctgatggaagttattgttggatggaggaagtttgtgaaggagaggaagaagatgaatggtgtgtgctaagcaagtgtgttgcctttgtgtggaaatgaagaggtacttgtgaggactttgcgtttatcagtttatgtgtttgtatatctatttgatccagttattatggattatatacgcttgaaactcattttaagccattgttattgaacgtttatcaaatactttattatgccaagcaagtcaaacacatgcttgttgatcgaaatcaagctatagaaatctcttcttcacatacagcagtttagattcacaatacaacaagcggaacgataaagtttcttaaagagccttgagaatatcctctgcgctggaaaccgtgaactcgccaccagattcaacattggctacagtcaccttaaggttatcaagcaacaaagcgaatctccttgacctaataccaagacccttgtccttaaggtcaagctcaagtccaagaagatgcgtgtattctccagacccatctgctacaaacttcacatgcttgttctctggatatgtttttccccatgccttcatcacaaatggatcattcactgcaacaaaagatgcaaacattcatggcctaagtatacaaaaactcatagaggccaaaacggaggagagatcaaaaacatatcaattcatacttaccactaaagcaaatgatctcatcaataccctttgacttcagctcctctgctttcccaatgaatccaggaacatggctcatactaacctcacaaaaaccaaagacacaattctca

SEQ ID NO: 30096 - DNA, 4125 bp, Arabidopsis thaliana landsberg
aatgcatatggtacgtaactgtgtgaatgatctaggattcaaaaccatagtatagaaaatattatttgatattttggtagacttaggaccatatgaaaatattataaagatcttttaataaaataattttttgagtataaactaacttaagctgcaatcacatgttaggcgtacatatgcatgttagattgtttatttttgacgtcacatcttatatactttatatgttatgttattgatttaacttttgatatacgattctttcaaaaccttacatgttctaatctcttttttacaaccatgcatacctcataactaaaagataattctctaactcgttattcaattaggagatcaaatattttcaaatttaacatcatcgaatattcatgaaatatatattccaaccaaacaaagaatgcgaaaaagatatgaaaataattttggagcacaccaaaggatttgtaatccttttcagctccattttggagctctctagtaggccagatcccaaataataaattttccatttttaaaattttgtgtatgcaattaactgccctaccgtcttgttcactattactatacattgagtgagacttgtgaggattgacctttcataatcaaaattgttgacgttatacttgtgcagaagtatgttactaaaaagtaaaaatataatcaacgatggcatgggaaaaaatgaatatgaaggttgattgcaaaatacgcttgaaccttgatagtttttgccttacacctcatttggattttcattgcaatgtcgggataaattaggcaatcttatcaggaatatatatcaacacataagaatatatttacaacatttaatctatccttactaagaacaaatttcttaaatttgcaacaataaggcaattcatccttttattgtttaaggccattatcaacaaggatatgtatcaagtgtttcaatcggttataaatgactttagtgcaacagaaaaccccatttgtaagattcatgaaatatgtgatatacactatagtgaatgtcttcgtttggagcaacaaacaccaaacaacaatatcttttagcattacatacttagaaatctcatgtttcttcctcttttcctcggaaagctatcctctctcgaagaatcttctgccccatatatctacacattacaattttccaacaatcatattttaaaaagaagaaaaaaacatatttagatcatttgtatcaattggtttctgcgtgtttttaccttccgagcatcatgattgtggcctgtggattagtccccggagacttgagaaacgtggatccatcgatgatcctcaaagcatcaacccctaatactttgtaattgttgtcgaccacttttccaacttgacaaccaccatggtaatgataaatagtcatcacggtaccgatacaatactgctcctaatcaaacgttgaagttatgtgtcttggccttaaattagtgggaagagcaagaatgagatttagtagtccacgtgcactcgctaaagggtacttgtacttggagtatcccttcgaatctatcactttaataatggaactaagtccttcaacgcacttgttcaaatcctctggatccttaaagtagttgaatgtcactgaagggttatcatctggattcgtattccgcaactccaagtgacctctcgagagcggtccattcactttttggatgatcacacccgcttttgtagtcacgttcaaggtaagatccaaagatttgaaaaactttgagatggattgggtaggaagttttgtctgcatataaaacatcaatatcaaaaaatatcatatgaagtcttgtgttaacaaaatttgtaacattttagagtgttaattgattatacctttttaagaagattcaaaacaccatcgaagaagctacgggtcaaactaatagagagacttaaggcacttccaccttcaatgtaactaccaaacctggtgattcctacggcttgtacaagagacacttctacgggttcaggagaagggataaaaaccggattcatcgggttatcacccatcccttggcccaccatgggttgatctacgatgaccggattcactctataggctgcaagatgagccgcagggcccacaccacttagcatcaatagttgagggctcgcgattgcaccagccgataagatcacctcactcattgtcgagtcttgcgttgccaattctgccttgtaggatacaccatttgcatccagaaatatcaccccatatgctttgggcctctggttacctgtccaatagagaagttttatatccggagcaatatacaaacaaataatgagtatggtaatgtgcaacaacgaatgactgcgacggtgataatgaccaaacgatcgccataattgaataattcattataattaccaaaatgaacaactgaaagtcatgattcaaaattaataagatttaagagtaaaaaagaggtttcttatttgaagtttcagttttttttgtaattagtgtatgttatcataaataatgtttgttttataaataagtatcataactatgttaaacatctttatgtattttttgttaaggaacatctacaagttataaccatgttctagtcaaaatataataatagatccttactacatgtaataaatatataaaaatcataatcgtaagcaagattttcaataacaaattaaacacaagttgtgattaaaaaacaaacaaacaagtttgatcacgtgtaagctacgtctctctgactctcgctttgtttttggtttttcaggaacgttcctctctcttctttcatacctctcgttatggaaaaataaaataaattataagacatgtattcaattatcagtcgtcattacctttaatagtgaagaggatcttatggacagaagcatgcaagtagacaactatcatgttcggattagcatactccaacaaattcgccgccgtgtgcctatgaccatcccggtcaaatatcgtaccaccaaatttagtcccaacgatatgttcgtacgtgaaaccattgtatggagtcacaccagcttccaaaagcccatctcgaaacgctgattgccatttgttaacgggtggttcaaaaaccactttcttctcgacccactcgtaagccgcttcgacctcgtctctctcccatcctgcttccgccacgaaatcttcttccgcacgtgagtagaatcctgcgtttatgaccgtgcctccaccgagtacacgagcgcgtgagttgaaaacgccgtcttcggagatgaaaagctgcgaccatgagtttggagttatgttcaagagtgtgtttgcgaagtttccgatgtctgttgccgctggatcgtcgtaaggggaacctccgcgttcgaggactagaacggttgcgttttgagagagcgttgcggctaaggcacatccagcggttcctcctccgatgattatgtagtcgaagtgagataactttggtgctaatgttgcatctttcataaatctatagtttccagctacacgaaaacatatttttcataaagttggagttcatattagtacactaaggtaaggtataacaaaaaaaaaaaaaaaaacataagttgaatgattggtaaaaggaaactaataattcacgtaccttcatcggaataacacgagtcgtggaagatgaaaactgcgacgaggataaattgaaaaaatcgaaagatatgaaaattcattatagaggaagattataggtttggttctttatctattggggccaaggaaaaaaaatatgctatttataaaccaacatttagaaaagaaaaaacaaacaggaacaactctcacggttgcggcaaaagtcttattcgatgataacctggcttcgacctctttattttttctagcacatttaagtcaacggattatagtattttccatcttagactttaataattatacttttaaccccagggtccttattatacaaagtttaagtttttttgttgttgttttccaaaaaaatgatgatttgaccaaatcaaattattgtggtaattttgacgaggtggtgcagcatggctggccactatgttgaatccaagtggtcaagaaatgta

SEQ ID NO: 30097 - DNA, 3289 bp, Arabidopsis thaliana landsberg
ctgaaccagtgttcctgtcaagatgcagcgacagacggatactcatttagctaggagtatcgaacctgaacctgtgaaaagggtattacgaccaaatcatgttgaagatcatagttggcagcacgaaactctgacaaaccagtcaccgaaagatgttactgcatatcatgactctcggcctgaaacgatcaccatgaatgtaagcccattatcataattttcatctggatttcttctgtgtgatggacataaccaaatgaaagtgcaggaactttctgcttccaaaaagccaaagggaaagaagaaacgtaaagatgacttgtcatcagttcaaccagatccatctgtgctgcaaggtctgtttgtcctcttttccttgttttctatgcatgtacctctaccctctcagtaattgtagtttttttttatgcctatttagagtccatcgtacaaaacttttgtgagatgttggaggacttctgtggcagagctgaagtccctggtgatgatagggatgaagcagagtggtcatcagtgcccgttgatgaagttcgtgttcttataaatgaattgatgactatacggtcaaaaatgcttctgcatatggtacctgttgatattctatcaaggttactgcgcactctggatcatcagatacacagggcagaaggcttgtccatttatagtgaacatgtgagtagttttttgtttgtctctctctatttgctcctctcttgctttacagttgtgaggattctttcatgttgcagtcgacgcaaggactattttaacgtacaatttagctttcaatcaaagttatttttttctctgttcgaagtatatttcttggacttgcaaggatgcattattggtttatttcgttctactgtgtgttaaattatgacgtttagtattataaaagtggcaaatacgttttttctttttctttttgtacctaacattttctgcgaaaaatatttcagtcagattcagattcagtgttgttggttcttggtgcccttgagtcaatccatgcatcgctagcagtgatggccaacagtgatatgccaaagcagctctacaaggaggaggtgagtgcttcttaagtgttattttccctgaaggctgtttatctgctcactgccatcgttccaccatatttaaatgattcattttttgatattttttctacttcttataattagataattgagagaattctggagttttctaggcaccaaatgatggctgttatgtctgcttatgatccatcataccgcactggaagtaaaccggcagaaaatttggcatttgaaggttggttttcctatttactttggaagttccatttgctattcatattctgtaccaatgtatggcatgtcatttcctatatttgaaacttgagttttatcctagtatgtaagcgcaaaaattgtgccttttgacatgctttgttgtttttcaatattctcatttctcctccacaaggttatgttccacttacacaaaactgacatgtagatatatgccacacgcttttataggtgatgatgatgatgataatccagatcatgacatggggtcagccagcaaaaggcggcgcatagtaaaaaacagcaaagtaaagaaggcgtcagtaaacaggtttactaattaatacccattcttttgttattttagttgcacacattttcccatctgctatttctgtctgtaggatctctggagcagtaaatactgcactacagaaactttgcactattcttggcttactcaaggacctgttgttggtagaaaggttgtctgacagttgcattttacaactgttgaagacaagtattacaacatttctagtggaaaatatccaaattctgcaacttaaagcaattagcttaatcggtggtgtaagactttccactaactccataatccatatctttactgtgttttctgttctaaatatcaatgtcttcacgtcagtaatgttcttaatattgtaaatgtcttaattgcagatttataattcatattctcaacaccgaacatatgtgatagatgaaatatctcaattgctctggaagttaccttcctcgaaacgagcattgagagcgtatcttctccctgatgaagaacagaggcagattcaaatggtcactgctttgctcattcagttggttcacaacagcacaagccttcctgaaacctcgagacaggctgccagtggaaactctatactagagacctcagttgatgttggctaccttactaagtgtcatgaagcggctacagaaacatgttgcctcttctggactcgtgtccttgaacgatttaccagttttaagggtcaggacgcttctgagataaaattgattattgagaatcttgttatggacttactgacagcattaaatcttcctgaatatccgtctgtgtctcctattcttgaggtaaatgtattgtgttactgtgttttttcttctaattacgagtcaatgtttttttccactctgacaggtcaactattgcaggttctctgtgtcatactgctacataatgcagggttgaaatcaaaagatgtctctgctcgaataatggccattgagttgctaggtacaatagctgcaaggttgaaacgtgatgctgtcctctgcagtaaagacagattctggacgttactagagtcagatagtgaaattagcgttgatcaagtttgcacaaaagattgcacattttgtttaggtaaaagggctgggaacttattggtctgtcaaatttgtcaaaggcggtttcatggtgactgtttgggtttaaaggaactagacatttcaagtcgaaattggcactgtccgctttgtgtatgcaagaggcaacttcttgtactacagtcttattgcaagactgacaccaagggtactggtaagttggaatcagaagaaagcatcgaaaatccaagtatgattacaaagaccgaagttgtgcaacagatgctcttgaattaccttcaggatgtaggatcagctgatgatgtgcatactttcatttgatgggttgacactgactcttattacatggatgttgcaaataggtgactcttatatggaaggtactacgcgcaagatttatctgtgcctgtggtataaagaagtgcgcagatctgagaataaattgaaagattacattggcagactgaaagcagaagttaataagcacgcaactcatggagcacatgcttgagatcttgacaagagatgctaccaagcggattactgtagcctttggaatgaat

SEQ ID NO: 30098 - DNA, 1969 bp, Arabidopsis thaliana landsberg
gaaacatcaaccatttttgtctgcatggtttggtgagtgagaagtgtgtgagatcaaatgtaaggcaaatcaattagctagaagaaaaccagaagggctcccttgaccagaaaaatgagagttagattcagagacgcgaattatttataagtggatacgtcactctgtacctgaatggggaagaatgtaagcttctcaaatccaaggtatgtagcaccaccaaagcggtttggtgtttcagcatctctcacatgaaggagattctgcaaaagcagaccatacaattgttacctaaatcttatatatcctataaaaactgtcatggactggtgacaaagtcgcacctcaattcggatcccaaatgcatggtcttcataatatccaggttcattgcttactatcatgccattttgaagaggggtcatgtttccataccgaaagctaatactttgaggaccttcatgcacattgagtgcagcacctacgccgtgtcctgtccctgtttggcaggcaaaatatcagagtaatatgagttccttacaaaaaagttgttctgggaagaagagtcaaaagatagaatagagtaccatggcggtaatcaagtccaattttccatagagaagagcgtgcaaacccatccaatacaaaaccaggagtaccttctgggaacacggcttgatcaagagctatatgaccctacaaccaaaataccaatcagacaaggcaacccatacaggttcgtctgttcaatataggtagtcaatggtcatcaaaaatgatgaggaaaagaagagccaaatattccacctgcaagactcgagtgaaacattccttttcacgggcagaaggttcactaaaatgtactgttctggtgatgtctgttgttccatcaacatattgagcgccactatccagcaaaaaaagtttttgagggtctacacgactgcagctctcaggctcgggcttataatgtataatagcaccatttgcaccggaacctgcatgggtaattagaggaaaggaatacatatcactcactggctgtatattgactatgtgttaagaagcaagttccaccaacaagggtgacaataaccataccacttattgtatcaaagcttgtatccataaaaccatcttgcattgaacggaattcaagaagcctgtcagccacatcgacctctgttagattcgcattcttatgcacttcttcttccagccaagcccataaatgagctagggcagcagcatctctgcataaaataagtggtcagccaaagacatttcccatacataggaaaaaaagaaaccaaaattttccagaaatgagctagagcagcagcatttctccatatatatttggtcagcctaagatacttagcatttgaaagtacaaaagaaaccaaaatcttccagagaaaagttgaatcctataaaggcagttggattaggaaaatatcgtaaaagcaatggctttctttacctcaagtgagaattcttcattccctttagctcagcatcatttttaatggcctttgcccacgaaataggagattgcatgtaaataccagaaggattggcagtatatccgctggagctatcagtaaactttgtcttaactttggcttcgctttcaaaattcctcgaatatctttcacaggcagatttgtaggtactaatgatagctacgttgagggttgatggatccatcaagagctgagctcctcgtgctgccaaactgagaaaactcaaagtgagggaaattcctttttctgaagttcataaatggacatggacaatcaagtacttacctatctattccttgaagaatggaatcgtaaggtctaagttcgatccctgcgtttttcaaatgatctttcacctccaccgttactttagaattatctacaaaaagttgggcttggtcaacctctacaatcagatatgcgtacattacaggtgaatgtgg

SEQ ID NO: 30099 - DNA, 4079 bp, Arabidopsis thaliana landsberg
  unsure (1)..(4079): unsure at all n locations
agtagcgtgacatatagccaaagctgaatcaagaaagatagtgtgttttacaaacctcgtatctttgaacctcgtactcttcgaaagtggcgatgtactgagaataggtgttggtgagacctgcgattacgacatgcatgttgttgctgaattccttggggtccgaagaaatgagaaaagacttgatagcgtcacggagacgtcttccagccattgttgtgaactctggatccaataatagattcaaaaactgaacaaaagcaaaccgtaaaaccgaagttttgaataaggaagagagagtcttattgatgtacctccgggaacactgaggatgactaattggccaatgcgaagtatctgaatcggaagaattgaaggctgcacaattcatgcaatgaactcttagtcaaaacagtaagatgtcaaatcttggatcagttataaggaaacagagaatggagctactcaccgcccagtcatatggttctttcatctcaccagtgtcaagtaaaatgggttttggtttttggcattggacctgttctggaccaggagttcttaacacattcctcactagtctccaaaacacattaccctttacataagaaagcacattagagaatgattcacagagatataaaaagaggatgtattgaaaagctttttgcttaattacctgatcatctccttgtttgaaatcaaaagcacctggaccatcagttgttccagcagcaaaaccaaaccccattgcagctggacatgtcttaaccgtctcagagccaccgcctgctttaggaactgtgacatcaagattcgagaaatctagatacgcatgttggtaaccaattttcccctgcagcttctctgtagctttgttaaaaagttccacagccattttgaattgcttttctccaatgatacgtgtactctcaaattcatcagggtagctacaacaaaatgtacaaaagatagaattagatgcagagaaaaaacataagaaatcatgaagcagtaaacgtatatacataccccggaccacggccatagcacaactcgttctgtccattgcaggtactgtgattgaaatcacaaggcagtccagtgtcaatgcaaaaggtaccaagagtatttggactcacatcaccacagtttgattgacagaaggcagagacaaatttacgcttcgaaccgtttcttactcgggttttaacatcaagggacttatccacagaatgtcctctagatgacttataagtagccgcaatatccaaaagtctactctctgaaacaaagtaaaacaaaaccataactttccacatcagtctctctgcaactgcaatgtagagaattgctacattaggtaactcaaggaaaggatatgactcacggtttctactgaaatcagaaacaatggttgatactctccgagggatgtttctagagctaacagaattcttctgtccattctcaaaccaatcctccataaaccgagctgcagcgcctttgttatctccactaatcaacgagttagtccgactcatggaagtcccatgagtagcaaaccagttaaaactaccagtaggtcccaactgagaatcaacaaacttaacaagagtcatttccttatcaacatcatacttatatttactcctctcagctgcaggattgttcagataagaactcggacttcgattcacaccagcatccaaaagatcccctattaacaaatcatcacacaaaatggctcaacaaacacaaaaacatcaataaaggagattgacaaagaaaagattgtaacttctttacctttgttaacaaaagcagaaccaggacgtaggctttcgtgtgcttggacaatgctttgctcaatgccgttaacaacaacgtcaaaagattgacgaacaaatccaagagacgtcacaatatatgtgacgtattgaagatatcctcctggtccagcatgagtgtgaattccacttattgctacattcttctctgtgtaaagctcaccatacctattgaacttttaaaaaattagctatccattctcatggattaatcactgattccactaacactctactcaaagattaaatctttagctaattaaatattcataccttgctttgagacgctcaagaactttgattggtacgatttgagaagccatacaagcgtcgagattgacacacacgacgcggttaccttgaggctcagcgacgatgaaggcacgagctcgtaaccggaaatgaataccggaagcgatttgatctgagtttgnnnnnnnnnnnnnnnnnnnnnnnnnnnnnngaccagtgatgtcatagcttccgactccgattaagtatgcataaaccgttcttgaaagaagaagaagaagaagaaagagtataaattgaaacaatggtagtgaaacagccatggttgattgaagtgagcttgagaagggagagtaagagagatacggatcttagagaggagaatcagaatcacacgagaaggagaagtgagagagagagagataatccgccatgaaagattgagaaagagctaaaaagcgtgagtggtggaattgaggaaaattcaaatgtggacgcgagtggttgtcggtagttagtgctcttggcttgttgctaccattaccaaaccaaactcttgttgtgtctactcatcaattcacattaaaccgccccattgcattcacatccaatttctctaacattattatataacgagataaacagagcactgagcaccgatgcaattatctatcgtgcgatttttttcccgtctactttcgtgacaggtgtttttcataattgagaatttcattccttattatttcgttaattgactcttcttaatttagaataagtgtctttgttatttttttattaattaaaaagacaccaaaatatatatatttggtatttaatattacaatataaatttattatcttactccatttaagaatattaaataccaaatgtatatatattttctaaatgaatatagatttaggaattgggttttagagctggaaatatattttcttcaatcagtttttttatgacctgtaaattattattattttcttaaaacgtctaaatttttattaatttgaaaactaattaaatttttcttctttctcttgtaatgtttttatggtaatataacatagaggtcgtaaattgtgttagcagagattgagagaacaagagacatgcatattcatgggatttgtatgaaagacatctcaacactagaaaaaagaaacatacaccaatattgtgcttaatcatacgtgaggtgagatcagtagagtcgacgacgtcttataataaattgttcattatgaagttgtaacttgtaaccaattattccataatgaatcaaaatgatacacaaaactagatatatgttgaatccggacagagcaccaaaaaagtcaaaaaaaatccattttgtgtccactcctaaatacatgtactagaccaacagagatgatgttcgttagtatcatagtatcttttccaggtcaactataatcaaatcaacgacaaaattttggaatcgttcatattgaataacttggaaatgaacgaacatgaaaaagattttgttgccgatatgccgcatgtgataggacttaaaagcatccatgtgtaagtgttattttcatatacctgctctctctccttaaacactggaccaaaacgcgcaattatttccctcgtgaatctctttttagcttacgtacttataacaaccaattatatagtgggtgaaaatatcctcaaccgtttcacacgtggcaatacgaagacccggttctatctggatctgacccgacccgataagaaaaactcgaattcttgtcttgtttcttcttgtaatgaaaatttctctcgcacggagaagaagatcgaattgacctgggttttttcttactctttaagaaaaatcactactttggttaattgggaagacagagagattcgtaatccatggataagcctctgctttcaagtaaattcagacgaacatatcatctcctctgtgtatatctcctttgagt

SEQ ID NO: 30100 - DNA, 257 bp, Arabidopsis thaliana landsberg
tttttatggttcgaacgaaccaacattaatttagaactcttagcttaaatcctatcctgtacacttgaaatactattttatattggattcttattgcttttgccgcaaatcaccgattatacctttacatacttggttacctgcacccacggggaggacatttcaagacctgtatgctctcgctggaatcttattaaaaatgggagcctatgggttgggtccaatcaatatgggaattattaccccccgcctcattc

SEQ ID NO: 30101 - DNA, 2190 bp, Arabidopsis thaliana landsberg
catcttttgatgatgttacctaactaatatatcatatttggactaacaatatatttacctttattatagaaattactcactaataaatttggtatcgcgctaatatgtacttttctaatacttgcgtagatggaggtatgccggtccgagacgaagatcaggtctgggtcgtcagggacaaagtcacttagcttgttcatgaaccaggtccacgcctcgtcattttcactattaacaattccaaagactagtgggaaacattggaaatttgcatcttgagtgctcgcagccacaagacaacctccatacctgcccctcaagtgagtcccatcgattacaacaacttttatcatgtaagcataccccttgatcgacgcgtttgatgcaaagaacagatacataaaacagataactcccaaattatccgtttctgtttctagcgcgggaattgagtttgggttcgttgccatcagtagtttgaagtatggttggattaatgcaaaactccccattgccgaccccatagtattgtccatagcaatctttcttgctctccacgctttctagtacgaaacattgaggctgaattcttgtctcagcattttccttaactcattaggtctaggtcctcttccaaccccaacataccgtgttctcattagctttcctattacttgttgacgcttgcttgtagaggttgcctcttgcgtccacgctgcaagtgtgctgcattaatatcgttctcacttcaaaccaatcactattttctaatttggttgcataaacccgccaaagacaagtggtccccacgcaaaccgcgatgaccattgttggatatgatttcgcatgaataaagtggaacttaaggcgaatcgcatgaattgccagttttgtgcaacagtcatctttgtttttgaacaacctctccacgaaaatattgtccccttcgtaatcaacatatgttagcactctttgcaaataatctacaaatgacaataacttgatcattaatggttactacataaattacctatagtcaatgaatattagtacgataacttggaccttaactaatttgctacctatcgattattggtacgataaaagaataattacgtgctacataccttcttcacccgggtcatcaaaatacggatgtgcatcacgatcatacatgactgttggaactggggtatctcggaccaccagtcgtctgtctccctccggaagttctcgcccttgacatgatccagatcatttttccacaaccggaatatattgtgttcctcccaccaatatgggaactcttggagtcaaacacacggtcttgttgttgtaaaagtccgctattgtgtttgtacatgtcaaatattttcaaacaaatacctcattttcaaatatattaacaacataatacaatacttgttggataactaacctattacaccggttggcgatatgatgtccgtctcttcatccattagctcgtccattgagaaggatacgctggttgaacgggaactcggttgacagcgttacgactatgggttgcggtgttgccattgatgctccagcaagtgtcagccgtaggttttcatcttcaacgagagtttgttgtgatatagttaccccgaaattcaatgctctagctgtttttgttcccgcggttgcctcagctgtccccatttgctgtcctcctagagtcatctctgtagcacacatacttcgccacattttcgcaacgtatgttcttctaaaagcctcaaattccgcttctgcagaagcttgtgctgcgtcaaacatattaatacttggtaaaccagtagttagcacaggttgaggcaatgttgactcgataacttatcctttgcctttctctcttgctgttgcatttcgtttatctccgtcaacggacggcttgggtaccgatgttgtaaagaggcgttgcgtctatcggttcctctatccttatccctgcatttaggtttaccttctcggtccttcaactgtctcgttcactcttggttggagatcacggcgctaccgttaacaacacccacattcctcgttaacaacctcgttatcgcactatcccaaattgacctagtttctgcggaattccagtaattatctgatatctcctctgctatcatgcctccaagatcaagatggctcgtgtaagaatttaca

SEQ ID NO: 30102 - DNA, 1772 bp, Arabidopsis thaliana landsberg
tacaagactcgtagcttgtgtggaaaggtacatcacctaacttttaacctctactatttttgaactcgtttcttgatgcttggtgaattatcattttgctgtatcagtattttatccacataaatatgtacacaaattcattttttgaaaaacagttttgtgggattttcttgacaaacaaataaatgatttgttaaaatgaaatatatgtagatggagtcctgatggcattgacacacttgaagatatatcgcgaagtgtctttaaacttatgttggatgttttcgacgatatcggaaaaggagtgaggtctgaaggaagctcctaccacttgaaggagatgttagaagaggtgattaacataaaccagttttcttacaattcatataaaatacttctgtattgatataacaaattaagtagatatagcttgtaaggttatatatcttttatcatggaaagctacttatattttcttataatatacttatatgtttttgagtaaacagctcaagatacttgtgagagcaaaccttgatcttgtcaaatgggcacgaggaaatcagctgcctagcttcgaagaacatgtagaggttggtgggatagcacttaccacatatgcaacgttaatgtactcttttgttggaatgggagaggctgtcgggaaggaagcttatgagtgggtaagatccagaccaagactaatcaaatctctagctgcaaagggtcgtctgatggacgatataactgatttcgaggtaaaaataattaatcttttctttgatttgcttttatttgttttctaacttaggcgtttggtatatgttagagcgacatgagtaatgggtttgctgcaaatgcgatcaactattatatgaagcaattcgtagttaccaaagaagaagctattctagagtgtcaaaaaatggtcgtagacatcaataagatagtaaatgaggagctactaaaaacaaccaccgtgccacgtcgagttctcaagcaagccctcaattttggacgcttattggaagtcctctacaccaagtccgatgatatatacaattgtagtgaaggaaaattgaaggagtatatagtcaccttactcatagatcccatacatctttgaagagtttggatttgcatggttaatgaatcaataagaagatatgtttgtgttgcttacagtaaatgcaacgatattttaacatttcagtaacagagaatgtcaaatacatatgtaagacaagacatcaataaaccatacaaatttacaatgttttattcattaagcaagcccaagagagagacaagtgttgacacgaggaatcaagcagaagatggaatagcaataagagggaatttgcggaaaaccacgagaccggttgcttcagttaggtcatgttgaaccctttgtggttccacatccattctccagttgaaccgtttcacgatattggccaatgtcaccccgatcaatgccgatgtgaatcctatcccaggacatatcctttttcccgacccgaatggaataaatttgaaatcttgtccctgaaaatccaagtttgtgtctaaatgcctttctggcttaaactcttccgcatctgtcccccatgttgtagtgtctcgttggattgcccaagcattgactataacctgtgttcccataatatttgtgtaattagtataaactaaaaattgttaattaatcgatataaaatgagtaaatgaccataatttaccggatactactttatttgatttgaatcaccaca

SEQ ID NO: 30103 - DNA, 1201 bp, Arabidopsis thaliana landsberg
aacccaacgtcactgattttgctagtgaaatgtctgtctatcagaatgtttgctggcttcagatctcgatgtactagcggctcgggtttggcctgatgaaggaaaagaagtcctgtagcaatctcagcagcgattctgaaccgtgctctccaagatagtggtggagtattatctttgcaaaagagacgatcttctaatgttccattttccatgtactcatacaccaggcagccatattcgggacaagcaccgaggaggatcaccatgttagggtgcctcatgcaacttagaacctcgatctagtgaggagacacatatgttaattagtatggagaggacatgcaatacattaggataatgtcggattatattattacctcttggttaaactgcttcaggccttgtgagacatctgacttcaagagtttgatggcaacagaagtgttttcaagaacggctttatacacaggtccataccctacttccccaatctttagagcatcagaaaaaccataggttgcatcttcaacatctttgatactataacgtctgtaagaaaccgttgtgaacatcatctgtttgtccaaattggcttgcatctcaagtaatcttctcttttggctctccattttcgctatgcgctttgctatttcagctgcttggaatgtagcagactgcgttttctgcgtttccctatcagacaatgctctaggcagctctattttttcatctgaccatggggtttcttgggactacataatgtaatatctaatgattattattcacaacaattgtcatcaacatggaagataacagtatcttacgttttctttttggtttgtagtgtctttgtccttgttaaactgcttcaattccagtctcagtctcctcacctctgcttcaagattttgattctgtcgaaaaggatagaccatatcaaatcatgttgacattctgcaaatccaggaccaaatttatgttcctgaaaagctttacctgttgttccacgttatttccgacaagtggactttcctgtgcatcagtatgaaaaccaagaaggaaatgtcagaacactaagaaactgaacatttataagaaagtgacgatatactactaaccgtggaagttgaagagatcgagcttccgatggtagtggaactatcagagacggtgtaagaactcacagttgataccatatcac

SEQ ID NO: 30104 - DNA, 969 bp, Arabidopsis thaliana landsberg
ttaccattagaagactagaccacaaatgtatggtctattttcacttttagttaacacataaattattaaaatctataacatgcgggtctcgttacatatattttagatattaaagttatatttatttatgctatggaaatatgatgagcttatttagcaattttcaaccatattccccaaattaataaccaactgtaaactaatgtttcatggttctagtattctagaacatataataataggtgagctggtggagatttttagtaatcattactttctaacacgattaatgttaatttttaaaataaatttgttaattattataaagatatatatttgacatcaagttacatgatctcttttgcttaaaaatatatatagtgatgtaaggagagcatcaactgaatagataaacaaataacatctagatatgcaaaatatggagtagtggatagtaaatgtaaaataaaataaagtaaattacgtcttcgagctatttctctccttcccttcgagtgctataaattaagacttttttgctagttcaatcactcacaaaaaaaaagaaacaacaaaagaagaactgagagataagtcatggggagcttaaagttgagcacagttgttgttactgcactagtcgtttgtctctccatcctcctcatatctcctacaggtacgtaaaaaaataccaaaaatctttgatcaaagagctaaaatgaatacatgtttatgaaaacgtttgtctctttgtatggattggacagaagcagtggaggggaaactgaaagaagaatgtgagaatgtcccatatggtttctgtccgttttggttattcaatccgagatccgaggaactttgcaaggagaaatgtaagaggtttaagtcagaaacatccgaatattatggtggtttttgcacgcctaatggtccacctgggggagtgtctctcacggcgacttgcaactg

SEQ ID NO: 30105 - DNA, 1746 bp, Arabidopsis thaliana landsberg
ttggtgtgtgtgagtgtgtgtgttttgctatatgcatgtttatgctttcatttcatcacatcatatgttttgagtgtttgcccttgtactttgttgtgcttctgtttgttatgcgttgtccagtctcaaataaagttggagtgtttccgttgacaaacgcttttgttagttcttgttgtatttagctaaccaatgttttgagattttttttctctttttctttgtgttaaacactaaggtacatgtttttgttttcataaagtttaatgaatattagttaaaaaggggttacttgtttgaacacacaacaaatgttaaaaaggttactagtaagctaactaaagtcttacaaatatccactctagaaacaaaacccacaaattcacagaagatggttagaagcccaactagtagagaccaaaaaggtagtaagccccacaggagtaataagccctgtcaagatgaagggggacgaggcaacacagcatagctaagggtcacttgttcatcgaagatttaatcgtggttgaatcaggttgacccaatgatctggtgatttagaagatagtccaacttaacgctcgaatcaggtttaaaaatattggtttatgtagtattttcttgaatcccatatagtatttttacttttggtaaataaatgtattattgaaatatttaacatgagggtctcgttacatatattatataataaaaatattttattgatgctatcgacatgtgatggtgagtatattacattattttagatcaaatgcaggtctcgttacatatattatataataaaaatattttattgatgctatcgacatacagttagtgagtatatttcaatactatagaccaaataataggtaggtgagtggatgcctggattagtggaaatattttaacaattattattctcttacgcgtggaaagttttaaattactaaaaaaggtaaacttggataatcattttattgtaaagatattgacaatttgacataaagtattttgatctatgtacccattccaatatataaaattgcatagtggttttttcttacaaaagaaaaaagtaacatctagatgccctttcccttggagtgctataaattcagactacttccctaaataaatcacaaagcgagaaagaaagacgaactgatcagcaatgggaagcttaagggtgagcacagttgttattgcagtagtggcttgtctctccatcctcctcatatctcctacaggtacttaaacaaccaaaatctttgatatcccaagatctaaactaaaacaaatttaatgaaaagaagatctagaataaatacaagttaatgaaatgttgccatctttctatggattggacagaagtagatgggcgtttagtgtgtgacactccagcgggtacatgtacctcgagctctacttgcaatgaccaatgcaatacatggggcggcaattatagtggaggcgaatgtgcagattcaagctttcctggtttaagtatatgttattgctgccattatgtagggagcagtgctgaaatggaaagcatgtgattgcagatgatagaaaacgacgtcgctttgtgtgcgtatgtgtgtgttttttgctaatcgcatgtttatgctttcatttcacatcctatgttttgagtgtttgcctttgtactttgttggtgagcttctgattgatcttgcggtgtcaagtttcaaataaagttggagtgtgtttttaacaaat

SEQ ID NO: 30106 - DNA, 2171 bp, Arabidopsis thaliana landsberg
tgagttaatgggctatgtggtgttcaataataaattagtcagtaaacagctgaataatcatacaaccaaactgcctaagagccaacgaaagactgtgaaagctgcacgataattggggaaatgaatagcttgggtgttataggatttttctgtttaaatattagcatttggtttcttatccacatctactttctccagtctcttaggacagagacagcattagttcagaaaccagtggtggggacagaatctaatattgccatgaagcaaatgcttgcttttactttcacggaacaggtatacttaagtggtagtttttgtactacggattgtaaaactgatgttacaactacttaaaatctttaaacattgaacagggttcttttgtaagagaaatccttcttcgagaattcgctaaggtgagcatttaatatgtcttatcagctcttcaataaaagtacaacagttcaatcgcttggcttgagaagcaaatattggacaaaaattactatttgaacatttatgtttatttgataataatcgaaatcccttgcaataggtgtgtgcaaatatcattgtttgttgatcaaaaggattgattattcaacagggtcttgatgcatatggattggcaactttggactcttttacattttctggttcaggaccatcgagttccttgacagaagaagacatgacaaaccttagaactttctatcgcctcatctcattgttctcagggatgcaaaaggctaaaagcgtaagcacggtaacaaatttctcttttcttctgctatttttatctttaattaatgttttgggcaacaaacttgcagcaagtaaaagcggtgagtaaatatggtgaggcgctcacgcctctagacgaagcatcactggtcatgtatcagcttccatcagcacaagagatgcttccgattctctccatattacctgaggtaacagatgttgcaaaactgaacttgattttacgagttcattacagtttttaagattttgtgatactagaataattgtcctaacgtcttttttggggtttgaatgaaacgtggcagcttccacaggaatcacaacagaggttgcttcagttgccaggtgacttggttggaagattggtgactcgggcttttgctagaaccattcgcaggatttttctttgatgtccgattacaaataaaaacttgcagattttagacaagactactgtgatttgagttatttataatttttacataaacttgaagagaatcagaggaatggctgttttgatcccacaacagcatatttataaaagaaaagcatcaacatcttcttcatcaaataaaacaatctcagtttttgttttgtcaaagctcgttttagtcaaccttattttttccccatatttataacttgtaagcgtagccgaaatacatgtgtagtgaaaataaaatgtttattaaaatactaaaatcttcaccagtgaccaaaccaggggccacaggattaaaaccaacgaacgagtacgagagttgtgtgttaatgcaggaaacaaagacagtaaacaaaataaaaatcaaaagagagaggcgaacacagttggtctgagactttgaacttataacttttcctttcttttatattttgatggctgaatgtttcttctataagacaaactcagcacaaataaatgctacactaatcgtacaatcactcacctcaattcaggtgagagagccttcttctttctatggtgatttgtatgcggaaaaatatcctttttgatctattcaatgaaatcgaccaaccgtgttgctttcccctgtatatatcagagaggtgaaaccgagacgagtattagattcaaatatcacagagaagaatgacagcaacacaggtcgatgatatatatataacaaacctacctcaatgctatgaaggctgcatcatgtggtcttgcttgagggcttgttgcagctttaagacctcttgttgttgctctggagtcagtaatctcaactgttctggcgtaaggttcattacttgctggagcaatgttgactgaacatcgggagagatatgtgtctggaagaagagtaaggattttaccgattaatagatttattcagggcattctaagcgacattagatgatgtgattgatatacctgggga

SEQ ID NO: 30107 - DNA, 1310 bp, Arabidopsis thaliana landsberg
  unsure (1)..(1310): unsure at all n locations
ctgttttagaaatatattgattgtaaagaaaaaattgttttttagatattatttttttaattacaaaattagtaaacctcactataaattaataattattaaaattatcgataaattaatatatttatgaatatatagaatttttcgtttctaatattattaatttgtagaggttttatcgtaattgtttttggtaaaatgatttaacctcttaattaatctccttataccatttacaagtctacttcatgcagttttcaacaactgtcataatttgtgtttaacaatattataagaaaaaacttttaaaaaaattaaaccaactaggcatttggttgaaaacaataaaaaaaaaaaaatcaactcaactgtttcatcaccaagcacaaagctccatttgccttctacaacaaaacctagattaatggagcatactataaaccccaaactcaacacgataccataaaaatacaaaaacaaaaacaaaaaacaaaagatgggacattgtcgctgtttagaaccagaaacttatttttcctacaactatgacagaatcaaacacaaaactgtacttctctctctctctctctctctctctctctctctcacgcattctgtctctgatgctccaacgtggggattactctcggtctgagcatattaataaaacaggatcagacttaggcttttgcccttttaatgtaaaattccaaacaaaccgtgaaacaatcggctcttcacgaacattcttaccctctccttctaactctctaactcctaaaacatcactggcgtcttgagccaccacgcccgaacactgtcctattgctctttttcgactctcttctttctccaccgcaacagcttcaatatcttctttattgtatggatcactgttcaggtctattctcgctgtgttcacttccttctcctccttactcttatcagactcagccagttccatgtccttcttcttcttatcttctgctgctgttacatcgcgctccaactgcttcttcttcctcctcatcataagcgtcttgaaccttctcttcacggtgctacacacagtgcagccacatgtaggcttgtgcctacctttcccactnnnnnnnnnnnnnnnnnnnnnnnnnnngcatccagccctgtgccttggatgtctggtcgtggtcgctacctctggctcgcctattgtgtctcctaagactgctgcactcgccagtgcgtccaaaccacacggttcttgctgactttttgctgcctggctttccccgagttcttctcttcttgtgctctatatatatatgcat

SEQ ID NO: 30108 - DNA, 979 bp, Arabidopsis thaliana landsberg
tgttttcttggttggctgctgataagcaccaaggtttcacaattttgggggtttcttttttaagctgacaagtgacaagtctttcttatcttgagtttcttccgtctttgttgttttgccagagtttcccctgttacgaagatgagcagagattcagtaagaatcgttggggttcttctatggatgtgtatgtgggtttgttgttatggggatggagagtatctgttgtacaaggacccgaaacagacggtgtcagatcgagttgcggatttgtttggtagaatgactttggaagagaagattggtcagatggtgcagattgatagaagtgttgccactgtcaacattatgagagattacttcatcggtatgtaaaagaacaatctttcttggagatttccagaaatctgtttacttacttgcttgtctagtttagttggttcatttaaacgttattttgggcatctgtatggctaccttagaaaactggtcggtgctgctggtgttgttaggtgaaatgaggatatcattcagtttttgctttcattgaacttcagtttctcatcatcttgttaataaagaactagataagctgcgtaacttgacttggtatggagtatctgtatttgtgaaacttgaaaattgaagttgtctgtttgttctgtacaggcagtgtattgagtggtggtgggagcgctccacttcctgaggcaagtgctcagaattgggttgatatgataaatgagtaccaaaagggggctctagttagtcgtttgggaattcctatgatatatggcattgatgccgttcacgggcataacaatgtctataacgctactattttccctcacaatgttggtcttggagccactaggcaagtattagcctaaaacgtttattccatcttgcatgtttcccatctctgtttctgtgaatgctgtctatatttcttctgatgatagatttgagtttcacaggg

SEQ ID NO: 30109 - DNA, 1116 bp, Arabidopsis thaliana landsberg
ttggtaaactgaaggatgcaatgtccaatacttattcactactcgatgtaagctatggatttcttcttcaaatctttttctcggagtaatgcgttagaaaagtagttcattatatcttcatacgaatgcatttacacaaacatgaaatttgggtaaaatgaataggtgcagagttgtagtcgaaacttacagcatatggtctagtgtttatggtttccgtaatattataccgaatgtaaaccaggcaatgaaacagtcggtgcagtctgatctccggcatcaagtttccttactagttcgtccaatgcaacaggttagcttccttccaattcatagatagttttattacatcatgtcttggtgaagtcttattttttccactcgcattgtatcgatccaatttaaccagccaaaccagacattgcgttgtaatccagtttatgaattgaaatctgagtgatattaacccgttttctccaccaggctcttgatgctgcgttccaacactacgaatcggacttgcagagaagaaccgctaagattacatagagaacgttttgtacttggaaagaaagagattttcttcgacataaaattaaacattggactgaacatttagattttgtagtgtaatagataagattcttaaagaacttgagtgagaagcatcattagcgggatttggccaagaatgttgcttgtgctacaaggaacctctcaataccccaattgttttttttttgggtggcaaaacagttggttaagaacttgattgagaagcattagcggggtttggttaagaatgttgcttgagctatgtagtcactgaatcggtcattaaactctcataaacagaaatcgatgatgctaataatattgtttagttaaaggttagatatgttgctaatgaatttgtttagttttgtaagagcatagtgataattgagaaattggataatatatagagaagacgatggaagtgataggtggtttcgggtttaattaacctagcatttgttttgagaatgtttgtaataaatttgtttaccataaaaaaaccttatagaaattaaattaacctaacctaaaaaaaaataaaacaatgaaaaatgagaa

SEQ ID NO: 30110 - DNA, 1823 bp, Arabidopsis thaliana landsberg
tcatatgttttcttttttcctgtttttttttagcgtatgggggtcggggtttttatcagtaactagatagtgagttgtttgaaccactgttatggccttcctcattatattttgtaggtcgttgtccctcttgtagatattttttaggtggtcctgtttttttgatctctcggttttctgttgatttaactgaataagcggactaaggatacataacttttattgtatattatagattcgtagaagtcaacacgcattgataaacccagctataacaatcatactacggatgggtgctggtggacatggtgttccccctcttgggactcctgatggttagtaataatgtttgttattggatatttgtgatcatatcaatgttcatacctttctttttcttcatcaaacactttttgctagttactgttttaccggcacaagtcagcaagacattcttgcatttgattcctggcatagccatttgtctgtaggacccaaccttttggagtttttcatatgtagtggtgctttgttatgtttatgtctctgtggaattccttctttatttcaggtagagtgaggtataaatttgcatcgttttggaacaggaaccatacactaaaagcattgcaacgtgcggtgaataattatcatgcaatgttagaagtcgaaaagaaggtctgtctccattttttattaataaatttttacgtttatatgttagtcctccactgcatgctgtattcaatatttgctggttaatcaataagttaattttgatgttgttgcctgaagtcttaacatgttacatctgttgggttactttcttaccatataggagagagcacagtctgctttgcgtgctcatagtagctctgtgaaaggaggtggtaaagtacaagtgaaagctcctgaagatactgcagctgtacctgtaaagtttcaggctttcatcaaagaagaagtccttgttaacatctacaatgtaaacattcggtttgtcttgttagtgctatagttcttcgaagatattgttctgaaatttttgcatcatactcttgtatgcaggatgtttttgccagtacacctgagcaagtcctgaacgtcttgttggctgatgattccacttatactaatgagtacagatctgcacggaaggataaaaatcttaatgtaagtttggcattggtatctagatcattagtcttcatacatatgtgctcttcttgttgtggtttccactgaattgcttacatgctttaaagctgcattcttgcgactcgacttctcaggaacctcattattgtctgtttgttatcttttagattgagccgtggcatactgctgaagaatatgatggtcaagttagagagattaagtttagatccatttgtaatagtccgatgtgtccaccagacactgctgtgacggaatggcagcatgttgttctatcaccagataagaaagtgctggtaggaatgatttattgcaatttcttttccgtgggatatagtagttgctaatgttgtttaggcaaaatgaaataagaattatctgtctgataatacttgtcttcccgtctttcaggtttttgaaacagtgcaacagccacatgatgttccttttggttcttactttgaggtatgttacctatgaggaaaatgtggttcttgtttcatgattctttttgcaacccaccaatcaaattttaccttggcatgctttataaattctgtttgtataccaggtccactgtcgatggcgcttggaagctaaagacgagacttcatctgttatagatataagagtaagtaagtaaaccg

SEQ ID NO: 30111 - DNA, 2873 bp, Arabidopsis thaliana landsberg
tgttgtattcatattttttcatcacaatttttcattctaactaatagttgggacttttagaaacatatatatctatttaaatgtttaaatttcttgaactatatatatttttccttttcctagataactactaaattttaatatgcatcatattgagtttgaatttctttttttagtttagttataggaagtttgtaaatttttctccgagacatcgcgcgggttctgagatcttagataatacaatagctatcattaatgagcggacataccacatttttggtaataatatttacctttacggatttcaaccaattttttttttggtgaattcctagagctaaatccccggattttattaatattaaactaaaacagctcaaacacggacttgtcgcggaagcgtagttccgtcgacatcatccctcataatcgtcttaacacaaagcagaacagaagaaaaaatatgaactcctaacagaagtgaaaacacatagttagctaacacatcggcaagacagttagcttccctatacacatgacaaattcggactgtccagtccttaaccaaaaagccatagcacaaccacaccaggaatgacaacggatgagcctctcctatccccgtccttataaaccctaccaccatctctgaatccacttccaactttagtcgtgtgacccgtttctcccattctgtgtacatcccatagtagacaccccacaactcagccaacggtaaagaacatcgcccaatattaaccccaaacccgccacatcactccccattactatcccgcaacgcgccaccggcagcagctaaacccggattccctctagaggcaccatccatattgagcttataccaaccagcactaggtacccgccatccgatctactggtcgactcgattctccctgatacctccatctgatttcgtctcattcgccacactaacctccacagccagctcctttaaaaaacggaccctatctcgacatttccgttgctcaccaaacacattcgcgcagcgctattttcatccccaccaaacagccactgcaaaaatcgttgcccagactccatccttagttctgactccttcacataaattctcatagagccattcatacaaggactacgtgaaaaagcatgtcttcaccttattggcacaatgcgagcccaaattcttgccattgctgggcagtcacaaagcacatgcaaaacagattatgtacctcccttacaaacctaacaaatatctaagtcacaaaggtgtcttctcctcctctcctcattggtcatgatcacctgatttgcatccaaccagagaaatacccttactctttcaggcacaaccactctccacactctcatgaagaaagttcgtatatcctgtctcggcgagtcatcttgtgttagcaaagcataggctgacttaactgaaaaccggccctcagcattaccggtccaagaaactctatcctttgccccagtgaccctatccagcactatggacgctaactccagccgcttcacttttgtaacatacggagagatgcgctgaatatcccacccagcaccatcattccacagatcatgagccatctgtgattcatatccctcttgtagatcccctatcacttcatccagtaacggtgttgatgacaaccacttatccctccaaaatctgatttgtcgcccgtcaccaatgacccagctatagcccggacacactacttcccggatcccaattcccacactccgccatgttgaggaccaattactctttgccaccatccaagactgatcctgaattaattccaccttatacttctttctcacaacttgcaccaagagacttgagatatcatgaagcactcgccaccctatcttagcaataagcgctatattcatttctttcgcaaactgaatgcctagatcaccatcccatttcggtaaacaaactcttttctaggccaccaaatgttgcttctttttgtccgctatactttgccaaaggaaattcctggctaatctgtccaaactctccaaagtcgattgtggccgcttaatcacttatatagtgcgcaccagaatagatgatatcactgattttatgagcgtcactcttcccgccaggctcaaagttctgcctctccaccctgccaaccgagttgaaactctctcaaggatgtcaccaaaggttgccttattaatcctcttttgcaaaatgggcatacccatatattttcccaattctttggttgactttataccgctctcattaatgatttgttgtccaagctctcgcgaaacattatccgagaagtagattttagatttttcaagactcactttctgtcccgacgcaatacaacacttttccaaaacactctgaatcactcggacttgagctactgaagcttcagcgaagagaatcaaatcatatgcgaagcatatatgtgacagttttggccccgactgtgataaacatataggcttccacctttttcctactattgctccatcaatcaagtggcacaggcgctccatacataaaacaaacagatacaaggataacaagtctccttgccgcaacccttgcctcgctttaaacagctctttctgttccccattccaaaacaagttcatggatggtccctctacacattgcataatccatcagacccatgtattagaaagacctacaatctccaaggtgtcttccaagaagtcccacctaactcgatcatatgctttctccagatcaatcttcaacaccatgcatcctttgtgtccctccctacatcgcatggagtgtacatcctcttcaacaatttcaatattaaccgtgctaaggcaccccggaa

SEQ ID NO: 30112 - DNA, 1978 bp, Arabidopsis thaliana landsberg
cttgccacgagaaaataaatgatcttgataaatggatcaaacctcctgtggttctcatgcataatatgagcgattaagagcttctttggggtgcatctttcatgcctcggaggaaagagtacccgtttaatcgggtccctaaaatcgcgtttatgttcttgacaatgggtcctttgcctcttgcaccgctttgggagaggttattaaagggtcatgagaagctttactcagtttatatccattcacctgtatcttcttcagctaagtttccagcttcctctgttttctaccgtaggcatataccaagtcaggtaatagctcttaatctaccttgcaagatttgtaggaaaacttgtgattcattgactagttggtaacttgtttttatatctaatttttattggattatcttcaccattgggcaggttgcagaatggggaagaatgacaatgtgcgatgcagagaggcggcttcttgcaaatgcgctactcgatatctcaaacgaatggtttgttctcctctccgagtcatgcattcccctattcaacttcacaactatctacacgtacatgaccaaatcagagcatagctttatgggttcatttgatgatcctggtgcatatggccgaggccgctaccacggcaacatggcccctgaagttttcatagaccaatggagaaaagggtctcaatggtttgagattaaccgggagcttgcggtttccattgtcaaagatacattatattaccctaaattcaaagagttttgtcaacctgcttgttatgtggacgagcattatttcccaacaatgttgacaattgagaaaccggccgccttggctaaccgaagtgtgacttgggtcgactggtcgagaggtggtgcccacccagctacatttggagcacaagacatcaatgaggagttctttgccagaattctcaaaggtgacaactgcacttacaatggtggctacacatccatgtgttatctctttgctagaaagttttctcctagtgctttggagcctttggttcaaattgcacccaaacttttgagttcttgagtaggtaacgtcactaagaaaactcatgaatttaacatagatatcatataaatgtatgtggagttggggttaattggctattaaggtgagattgaatagttagttttggtgggaggagagactattaaatttccacgtgtatgatcttggcaggttataaaatctcacttagttgctctctttttgtattttcaactagattttaacccgcggtagattttaacccgcggtataccgtggggacaatttatttttttaaaagttaatatatataaaagtttgcaaattgtatctatctataaaatatttttattttatagtttacaattgttattaagtaacgtcctgccaaacccatcccgccaatccgtcccgtaaaaaaacctatttattttgttaatgttgatcttatttatgacatgtttatgaatcattgtttaaacattttgtaattttgtagtaattaactgttatcaaatatctctacggtttgatgcttataatcgaattattatagtcatgaaaaaagcaatttaaaaaataataattttgtagtgtttaaatgatattaaatattttggaagttttattttagtaactaattgtgtagttaatgtggagagattgtgggaaagtagttaaatgcaaatatttaatcctaagatttactttttaattatgaaaaacaattattaaataccaatgacaaccattgtaaataagtttcaacttgaggatttatttaacaaagtggctgcaaaaatgtatatgtagatggtatgacattgatgtattcaacaaagtttgtaagtagtttgtgcccatccataacaaaaagctctttcgtgaatgaatatttggtttcaatacccgcgacatttcagagatgatatctaccacattctattatatat

SEQ ID NO: 30113 - DNA, 2916 bp, Arabidopsis thaliana landsberg
  unsure (1)..(2916): unsure at all n locations
tactcagtcgttgtatggttgctgatgtctttatggatcgaattatatcagagggcttctgcagcaagcgaaatgggacaaagaaataggaatgttgatttagaaatggagcagcagcaatctcaagcttctctccaagcagagccttgcatccttttaggcagctttccgcaacaaccggataataataatatgcctgctatggttgcacacgttcctaatttagaacctcattctcttcaagacccaacttatgacaactcggccatgttctacgggcttcctcagtatcatcatcatcctcaccagcgtgttccaacgaatttctatgttccctatgtggcatttcaggctcctccgggtcagttaccatcttcaagcagtcacggtgtagttggtgtaagtcctgatcatgaatacgaaagaaatgctcattttatggatcacacaagagggacatacaagcgaaagaacgctgaaggaatacccggacaacctcaatatttaagtaccttagcagctccatttaacacaccggagacaatagccccttttggaggcgctaggaacagaccaggagctgttacagtgaaccctgttcttccttctcatgctccaaacaacttcattcaaggaaactatgcaggtcatcatccttttccacctcctggctcaatctggtatgatcaccaccacggcagatctgatggctcacattcgttctggcccacaccgtacatgcacggtacatactaacacacaatcgctttttaaagttttgagccttgtaatcttatttatctatctttgaatgacctttcaggtagtaacattttcgctggttccatagagtctagtagcagaaaccctacatcatttatgtatccttctcagttaaacccgagggaccactattatagtcatcatcaccacccggcacctcctcctgtacaaggcatgagaggccagaatgccacattatatccccacacagcttcttctgcttcatacagagttcctccagggagttttactcctcagaacacaatgaatagtggtcccttggggtcagagatgggctcgagtcacatgggtccggttcaaccaaccgggtttcggatataccagcatcatcagcgagatgattctgtacctgtagcaactcttagacaacaccgtggaggagttcctcggcttagagtgatgcctgatgatgtaactttctttcctcaaattttctgctccatcttttttcatttttgtcgttgctcaaggttttgtttcttttggttctctttcaatgtgtgtaggaagttgcgcttttggagtttggagacttccttggtggttctggaaataatcacattgatcatcatcgagatatgcgattggacatcgaggaaatgtcttacgaggtgagcccttcattactctttaccgatgtagttatcagatttaggagctaaaagttgctgtcttttattatcttttccctgagaagatcttgggtttcgcatgagcagagaattcacaatgcaattttctgtgatcatagttaggattttgtttatctgatttgtcactggggtttgaacaggagcttcttgctttgagtgagcgaattggaacagtaaacactgggttgccggaggaagatgttaagaatcatttgaaaacaagaacatgttctggaatcaactttgaaaaagagtcgtcgtccccacgaactaaagatttagaaaccgaaccgtgcactatatgtcaggtaaaaaaactagccaaaatgatcaaagctctgtaatgggctgcacaggcttggaattagagctctgaacaactctctcattatctttacaggaaagcttcaagatcgaagaaaagattgcgactttggattgcgggcacgagtatcatgcagagtgcttggagaaatggctgattgtgaagaacgtttgctcaatctgtaaatcataggcactggtcatggagaagagaaaggtataggaagaagaatcnctttctaatctattgggtttatatatatatttatagactttaaagaagagaagaaaacagaattcgggtttgttttcagctccaaaagaattttctgtaaatttgtactttttttttgtgcacataaaatgtgtgaatggtcaaaaactgtcatcttttaatttggtttcttggctacgttgataatgaaaaatgtacaggctaatttgttttttctagggctttttgttcttatacttttcatgtttttatgtcatttgctaggccacactatatactattttacaaattcattagttgttacttgttactgttcttaagtttcaaaattatggaaactacatcaaatgcataatctttaagacctcaaaaccggtaggtccgtatattgatttttctacctcagaaacaaatgttaaaaatcacaattacagtaaaactacaaaaatgggcatcttctactttgtgtaaactattcaaaattgtacatcttgttcccattcactctgtgttctctcaagaatttgaaaaactctcgcttattgctactctttaacagttcgtacacttttgtaacataaccgaactctcgtccgtagatataacttgcacaagcggctttgtaagtcatcatctgccaatctcctgtcaatgtaacgttttttatttctgtctctagcatttgcggggagaaatggcggtttagccaccacttagcccgaagagtccatgatgtcttggtgaacgttattggtgttaggttgtatcaaacagaatacgtttgtggattccgtttatcttcagatccgtcgaggcatactgacaatcagcctttatcaagatgctcaaagaaggtactgaagcaagaggctaactctttccaaatttcatgctcaagaa

SEQ ID NO: 30114 - DNA, 1427 bp, Arabidopsis thaliana landsberg
tttgtgtagcaagcaaaatgagtttgtggtatatcattgttgcattcgtcttcttttcaactataatcattgtaaggaacgctagaaagacaaagaagaatctacctcccggacccccaagacttcctataattggaaacgtgcaccaattgggatgtaaacctcatcgttcaatgttcaaattatccgaaaaatatggacctctaatggctctaaggtttggaagtgtgtctactgttgtggcttctacaccagagacagtaaaggaagttttaaaaacatttgacgcagaatgttgttcgcggccttatatgacttatcctgcaagacttacatacaatttaaaagatattggcttttgtccctacaccaaatattggagggaggtacgaaagatgacagttgttgaactctacactgcaaaaagggtacaatcatttcaacatacaagaaaagaagaagttgcatcactcgttgatttcatcacacaagctgcgtcattggagaaaccggttaacttgaacacgaagttaatgaaactatcaggaagtgtgatttgtagagttgtatttggtatcaatcttaaaggaagtaaacttgagaatctttatgaggaagttattcaaggaaccatgtaggtggtggggagttttgcagcagcagattacttcccgatcattggtagaatcatcgataggatcacagggttacatagcaaatgtgagaagattttcaaggcaatggatgcattttttgatcaatctataaagcatcatctagaagatgagagtattaaggatgatatcattgacttgctcctcaagatggaaaggggagagattgaacttggggagtttcaacttactcgagacaacaccaaaggaattcttttcgtaagtaatatgaacctctcactttgtaatatactttcattcttcacatgttgcataaattttaaaaatatgtactctttgattattacagaatattcttaacgctggaatagacacttctgcacaagtaatgacatgggtgatgacatatttgatttcaaacccaagagttttgaagaaagcgcaagccgaggtgagagaagtgataaaacacaaagatgatatcatagaagaagtatctagaaggactccaatatctgaaaatggtaattaaagaaacatttaggataaacccacttgtgccacttctaattccaagagaggcttcaaaaaatttaaagattggaggttatgacattccaaagaaaacatggatccatgtcaacatatgggctattcataggaatccaaacgtttggaaagatccagaagctttcatccccgagaggtttatggatagccagattgactataaagggttcaactttgagttgttgccatttggtagcggaagaagaatatgccctggtattg

SEQ ID NO: 30115 - DNA, 2274 bp, Arabidopsis thaliana landsberg
attgatcttaccaagccattcctctaatatagtatgcatttgctataaccgcgcaaaagccttttcatttgcttagaatttcatcagaaaccgaaggagtcgatgaccatcttatgactgttggttgcggcgtacacaagatcgtgatgaatacaatcctaagccacaatatgcattcatctacctgcggaattaaaaccgccagttaaaattgatctgatacgacttagctcatatattaaccgatgatatcacaagttcgttgtaactaacaaactaactaacctcagacagcgaaattttggatttagtctgtgtgcttccgccataattctccattctctcaatctctaaacccgaatctttcatagccattagttcttttctcaaatcttcatctgtgcagccgagcgcatatgcattcacaccagcggatatgaattcctgaagatacacacacaaacaaattaatgaaagatggatatacaatcgagaagaaagcaagaatgactcaaataaaaaaaggaagttacttttaaggtttcgccttcaccgcgtccaatcacagtcctgtaacgtcttaaaagacttatagctatgttgggtgatgaacggtactcatcatccgatgaaatcgagttgttgcgtgagttacaaaacttgatgaaatcaaaagcacaaacacaaaaaacttaggagcagtatacagatggatgtataacttgccgaagagacgaaaactttaattactaaccatccatctccttcgaggctgaatttgatattttgtagaaaaagatgaatgataacactctacattgctacaaggaactattgatcttggggagacagaacaactaatcagaggaccaaaaggcgaggtcttgaatctgcgcaaagcggcatagcagctaatagggatttggaatttgttgatagttcccgcaggatacgcaactaacatttcttaaccatatcaatgaagcaatgcccttatctgcataagagagaagctttttttctttgaataacacaactatattaggaattaagatgtgtaagagtctaagatacattgatgttctagaaagaaaaaatcagcttccctgttcaaattgaaagttgaaaccctaatttcatctctcaattcactcttagtccttagagatatccataagtggcaaaaaagaaaacaaattcaaatgatttggatttggatttggagattagctaatattgcgatcagaaaatttgtattagctcaagaagaaaatcaaaacctctgatctttggaaagtgtcaagaatctcctaatcatactggaccaattcacagatacttaagatcatttaaatacatctgagattaaaaagcaagatatgaacaaaaaaaggcttacctttttgagaaattcagagtcagcaattcatatgctacaagtgtaaaaaggaaaactttttgtgtgttttaatcgctgcaaagaattggatgaagcacaagctacaagtgtaagaggtgaatttgaagccaccaatattttgaatggctgcaaaaaggaaaacatcaaattttcaatcaatctagacaaagattatttttattttatttttgggcactggaaaaaaaaaacagatagaagcaaacaagaatcatggggattcgcaaaacgatgtcgttggaatatgagtccaaatatgatgaagagaattgagaaaagagagaactttcaagagtaccttatcaatttctatctcaattctgatcccaaatcaatttttatgtttaagtaaacataaataaaggctgctttttacgttgaggagtcaacccaactggatcctctttccttcttgattcttttactctccatgttcattctcacttgagaagcttcgtcccatagtcccatatccgcgtacatgttgtataacagtacataaggtgttgagctctctggttcgagtctcgacattgcttcagctgcaacatgtgcaagccctacattgttatatatcctacaagcatccaataatgcaccccataccgttttgtctggctcaaaaggcatactctttatgatatacatggcctcttcaaactgcccttgtccactggtaacgttgaccagggaagaataatgttccatctgcggctcgatcttgtacacactcatcatggacacaaactgtgctttagcctcatcaacaagtcccgcgtgagcacaagcgttcagaactgagacgaatgttatgtgagaaggatatatcccgttgc

SEQ ID NO: 30116 - DNA, 2791 bp, Arabidopsis thaliana landsberg
agaaccaatcgaataacaaatatcacaaattttttgaatattggcttcgcgtccaggcctattacgaacaccatcaattcactttgccacgtgtagtcaaaacctgacctggcttgacttccacaccacttccgttcccaattcgccacgtgtcttcccctctatttaaacaagaatccgaccgcataaatcaaacacaccaaaagaaatggagaatcatcgagtaacaacaaactccgacgagccaccaccggagtttgagttcggatcgttgactccaacttctccgtcgcaagactctttctcagagaattctcccgccgatcatctctttttcaacggccgtctcttgccacacgcattcccggcggcgagcagtatttatacaaagcggtcaatctcgagtacgaccagcgaatacacctcccggtgcaatagtacgaacagcagcagtagttttggtagtaacaacagctcaacttctcaatctccgagaacgagctattcaaccagtaacaagaacaacagccccattaatcaagagccactggatttgaagttgaagcctccaattagcagatgtgacaaaaccgtaaatacgatgagcagtagctcctactcgtcgccacaacacaagagaaggaaggcgatggagatggcgacaacgtctctgtacaggtcgtattcatcgcagcggtggcaatatataactccggtaccggtgagaatgagtggagggataagggtcggtggccggaagaagaaggcggtgagggtgaggaagaagacggaagagagaagggtgagtagggtgatgaagttgtggagaaaacttttgatggcggctatttttgtttgtagagagtgtcatgcattggagggagcttgagtgagacttgtgattttgtgacgtggttatgattaagaaagtattgattgttcaatagtgaagacttgtgacactgtgacgtggttataattatgaacataagttacataacgaaagtattgaactattgattgttcaacagtaagcaaaaactctattgggcttgtgggttttcacttttcacaattgtgtatctatatatttttctttgattacttgtaaatagaaatatctttactacagcatcacactatgaagaaacaaaatctacagtaaagttttgtaattttacaacttaagtatgattctttattgtaaaatgctattgcaatctcttgaattataaacacaagcatccttatgtgtattagatttaaaaaaccaattgttatactagggagaatgtcattttaagttattcttcaacaaagaaaaaatctttattgatttaaagtcatataaaactttactaaataaatttggtataactttataaaaacacatacttatgccgtttgaaaaaaaaaatgtcaaaaaaagttttagacggaaaaagtaaattgttaagaaaaaaaagtagaatggaaaaagagagtagattaactaggtttaacataagtgatgataaaatgatccaaacaacaaacaagaggcatagaaaaaagaccaaactaagttcttacgaggggaatacatgaagtcatatcactctaagaaactcatgtttcggtggtgactatcaaggctcaagaactcgctcggattcgcttgactctcagagttgctctgttcctggctctggttctggtggtctgttttgtcacctaacccctctgaatcaaacagaagcttagcgttgacattgttagtcaacgcattgaagaaagataggcccgtgggccatttcacgtcagggtcttgttctttgtttgagtgtggcattactgggaaaggcatagtcatgtgaggctggtaggtaggcaaagaggtttgaggcatcattggtcgttggctcgtaccactccagttgtagtggggaagagtgggttgcaatggctgagtctgtgtaggtagtagagggtggttcgaggccatgagcggtgtgtttgaagacgaagtggttcggtttgaggagaagagctgagagaggtaaaatccggattggtagccaagtgattcaaacgtgtgcctcatccgaagaacaaagtgcagatcttcaggtatctgagtaagtttagagaacataaccgcaaagatcccaagtaagagaagacttacaatcttttaaccatgaaccaaaataaaaaagacttacaatcttgcaagaaccaagttgtaaaaggccatgtccggcttgaataacagctatggtctgtaggtacaataagaaaagattacaaaggtgacttgagaaacaagaaagtcaagaacattctcatatatgattagtgttctttattttacctgaatcccagattcgaactgatcattccactctgaaggaatctgcatttttttttagagatagatctcagccgttttacaaatttgcagattaaaatcttattatacgtaaatgcttcattatattataaacaaacttacagcatcgaatgagctttgccagtaactagaggcattagattcagattcagtttgttccttgaaaacccatttatggcatttgtcagaagcaaccttccccattaacctgttggccagaaatatattttgcaaacttaaaaagaggaagataaatagtttctattttgggctaatttgcagtgaatattgaataaggtcaggagctgcatatattcatgcagacatatatgatattaaaaagtatgtaaggacctaccaaggacccacccttcgccatatttatatacctgattagac

SEQ ID NO: 30117 - DNA, 471 bp, Arabidopsis thaliana landsberg
tctccgtcttcagatactatgaaagggaagaaactactgcttagcccaccttggtcttcaatctagattattggccagcaaaaatctcacgtttagatatcactgcaacaacaggaaacgcagagcacgaaactgaaagtacacttacttccatgaaacctcgaccacttgcaataggcatctcacaggaaaaattgacaaaatcaatctcattattctcctttagatcatctctctcctccatccctccttgtgttgcttcctgaaccaagtatgttccttcaacagtacaaagtaacctgtaaaaatggcgattagcatcaacagaaaagatatggagggtcaagcttcaacgagtatataaacataccttgtgccaggtcgacggagattgatgccttttactggaaattgagcttttctttgttacagcaaggtggtctaaccgttattgatcttggctataaatca

SEQ ID NO: 30118 - DNA, 3432 bp, Arabidopsis thaliana landsberg
  unsure (1)..(3432): unsure at all n locations
taagcaatggagtgattcactagaggtccaagggtttatgtccattcatagtctcgggaatttagaaaaatacgaaatattttagtaaagataatgaatgatgaatgaatcgtagtgatacaaaatttagcaaaatcttaacaaacaattaacagctaaggaactattagtctttacatacattatttaacacgttaacaaggattattttaatgtccccacgttgagttatgaataaaacaattaagttgtgataacgccctttagatccaaaatacaagaacagaattcttcaggtctttcaataaatggttaggttttcattgtcatgatcgcattggactttagtagatacaatagaatcatttgtataatatacacaatttatatacagaattacaaattacaaatatttgatattgacatgtggccatgctcagttctaattattaaaaaacggagcatgctttccgagtgtgatgtttgatattatcttacttttcaagaatgtttttatgctagattgtattccatagcttttactatttacacttaaaatgctataaaaatataacaaaacctgttttctagctaggtttgaactagtcgaaaatgcaaaaattatgcatatgggattagtgatctctgtatataataacatccacacaagtagaaagagtatactttaaggcaaagtcttaagttattaaagtgaaataatgagagatttgctttcctcaagtggaccaaaggcacaagtgatgtgacgtgtgccgtacgcaacaacattaaaaaagcgaagagttttcataattatatggacaaaattttcgtttcgaacaatttattggagaacatctgtggagatttaatttgagacgaacccttattgtttttacagaataactggagaatacaacgtgacgtagccacactaactctctctatacacatgtattttcaggcaacaggtttgagaacatacaacttacacgcatgagaatccactgttgctgtcaagttccccacaaacttttgcttcaatgtcttgtgctgttctcatatcacaacaaaacattcatcagttaaatatctgattttcttatggtgtttggtttatgtatgtgtatctacaattgtatatttatgagtatacctcccatagatctctggcttcaacgatgctatttgcagggatctcaatatcctcccaaagagcagtaatcgaagttcgcgatggtccacggttcaatataagcaaagctactctgtaacctgacaatggtcctgcccaaacctgattccatttcgggatttattaccaaaacatagttttcttaaagcttatgtctatagacgagtagtacatgtaggtgtttttagatgtaatctaacctcgagatcgccttccattctaactttcttggcctgaacaccatgtggatctacaagaaacggtttctattttcttaaaagtatatattcaaacatggttcaaagaggacatatgatggctaaacagtaatcaagtaccttgattaatagcaatgacttccttgttggcgacaatctccattgtttctttggtcatgtttcttatgtcacaaccaagtagaagaggagcctgcagtgatatatatacatcattggtttcagacttaatatatgttgtttgaagagagtttctctatttcgggaatatatagcttacctttgagattgcccatatgctgaaatggactatgtactcgtcttttgtcatccctccatttcccacttcaagcatatccgggtctgcaaccaacagcaaagtcacccactcatcatgaaattatcatccttcacaaaatctgcaacaagcttaaagtagtagtagtctcttgctgagataataacagtaccgttccagccaccaggtcttgcatgctcagcgtagacttcattcatgtctgctattgagatcatactgtaacaagcaaaaaaaaaccttgtcaagattagcaatttttaaagaaacatgtcgccatcttttttcttttatacttacctaagccaagcatctttaatgtcattagtggttctccaactgttgcctactggagatccccatagagctggatgcatatctcccctgataagaagtcaatttaaaactcataattcttctatagacaaatcaacacaactatattatttgtttttttgaaagggaacatgcatgatttataccattcacacaatgagtgaaagatggggcggccagatttcatcagagctcgagtcatcactggatacctgaattgtatcatcatccattattggcagtgaatgtatattataacttttatggctaaaccaggtgtcctcacttatacctgacagtaggtttagagccatcgctgttgcagttgtcatacttcaagtaatcaattccctgcaatttgagcccaagcattgttacattgtctgaaaagcaggtcagtaaccagtttatgaaatgaaaaagaatgacatggacgtacccattctgcaaatgtcttggcatcatgctcctcgtagcctaaagaacctggcatggttttactgcaagtgaaatacctgaaaaccaaaacaaatatgaggccaaatgtgtattcttgttcaaatcaccaggaaaaaagtgtaggaaaatttgcaaaagcaatagtaatttacccggcatctgagtaaatcccaagcttaaggcctttactgtgaacataatccgcaaccgctttaattccagaagggaaagttgacttctttggcaccagacttccctggaaaacagagttaaggaagataaaatctagcaaaactgcagaaacaagaaatgaaaccaggaaacacaaagaattatgataataccttgctgtcacgagaaatttcagcccagcaatcatctgaagaacaaaccaagatttcagtactgtgaaacacaataatgatttttatttatttatttctaagctatcacactgatgaaacattaatcaacttcagagactctgaatcagagtgatacaaagaatttttttaatctatattatgagttagagccttaccgatgttaacatagttgtagccaagcttagagaggccagtggtaaccaaagcatcagctgttacaaacatcaagatgtgttaagataaaccaaagcatcagctgttacgagcatgcaagaataattcatgattgataaattaaaattgagacttcaccagtttctttgatcattttttcatctatgttgcagctaaaatggttccagctattccacctgcaacaccgttacattgaacctcattcagaacacanaaagccaaacactttccacaacgtaggattattaacagcanagttcaggatattgaagtaaattcaagctatttattcttagttaaagactagtg

SEQ ID NO: 30119 - DNA, 3214 bp, Arabidopsis thaliana landsberg
attgatatgcagggttggggcaaaagggttcttgggatgcaaaacctagaatcacacagaaatcgtaatgataaaacatgagaacctccaagaatcgtaaaattgaagggagagattcattaccgagctgactccagcagcgaagaacggaacaggaccaggtttctgatcagaagctgagccctttgcagctctataagcttcaggaggcataacaccataaaccacagagacattaacaccagctttctcaaagacattcccgtcctgcaacacacgactgattccaccgccaccaccaggtcgagaccaaacatcttctttaaacttaggaccgccttctatagcttcaattgcatcacaaacactgtcttgagcagccctaatcatagtctcgaaacgagccctgacggaagaagaagaagaagatggagtgacgtcatcagaatccctaaggaaagtaaagggtcgttcagtttcgggaacttctttctcaattgagactgaacatcgcaaggcgagattaggtttatttctgattggacgggagaatctgagagtagagggattgggagaataatgaagccgatgagaggagaaaggagcgaaagtaggagaagagaggagagtcgacgagtgagaagccatgtttgatccgaatttggatttgatgctgaagaagaagatgatgatggtcagatattaactgatacgaagtcttcttcgaccactgattatgaccgctctttctttttatttaacatctccaggtcaaggaaatacaccgttccagtcttttgagactaaaccacttctgaatcttttagccgaaaccataccagacacgaaattaaaatagcggtttaatttggtcgaaccgaagatattgatacacaataggctcttatccttcttaacgggcttaattgcccaaattaggcccaaaacgattagccggtttacggcactatgctattttgatgtggataaatcatggtcatgtaatatatctttatctatcgatagaatctgtgataaacaaaacaaaagtgtattatagattcgaatcctatctaattattatttgaaataaccaaatagatgtaattactaccgtcttattctttccaaaaaatagctaatcgctgacaaaagaaaatccggttgggcccatcacgttgtctatatattcatgatcatatagagagttcagccgcttgacctgcgaggaattcaagaaaaccctgcttcacagagcagtattacacaagagacgaaagagcacttttaaccttagcaattatataggtaccttagctagttcttcttcgaatctatacgatcgatatgaagattcttccggttggatcacggttttgtccgacggatctagggttggtgaggctttatcttcgaaacaaggtggagagaaatcagagcagtttcataacaactatggacatccaccaagactacccttggcttcttcctcacgtaaacaatcctttgttcaataacaacgagtggtactactttgttccgcttactgaacgaggtggcaagatattaagcgtacaccggaaggtagccgcaagaggaggaagcgaaggcggcacttggagaagcaacgatgggaaaaaagagatcaaggacggacacatgcaaaagggtgatgggttacgagcagtctttcacgtaccacaggagagtgcatggaaagcttgtcaagaccgattgacagaagatggagtattctcttcactagagtgatgacctccaaaaggttgtcttgtgtcggatccgatacaagaaagaggcgaacgtcaacgagtttggactcgttaaccatcaggctcatcagactcaggtggcggagaacaccaacaacatcttacggaaccaagtagtgtaagaagaggatgctttaaccggttttgctgatcagcttgagatgatgctagagggacaagaagaccgtgagcagaaagaagaggctgatttaaccggttttgctgatagccttgagacgatgctagagggacaagaagatcatgagcagccagaagatgctgatttaaccggttttgctgatagccttgagacgatgctagagggacatgaagatcgtgagcagccagaagaggctgaattaaccggttttgctaatgatgaccttgagacgatgatgctagatggagaataatctcgcgaagttactcaacaacaacaacaacaacaacaacaacaacaacgtcaagaagattgtgacgttactcaagagcaagaaaaagatgatgtgatggtactgataaacaatcctaatgatgccctcgcattggggaattatgagattattgatctaactagggttgataaatgatacgacacaaaccagagaggatagaattatattttagtgggttgagttgatatgtgacaaagattactatagacatatggttagtgtatttgtgtaactccggtaaaggagatatcataaaaatagtggattttccggggtaaaattctagtttaacgaactttattttagtttgtacttttgtttttccataactctacaattaatatagagttgcagcagtaatgttaactatttagctatgaatttcaattgtgtacttaaaagtaatgtttttggttttcaaagattataaaattcgaaaatactaattgtgatttgtgagttccattgataaataagcaaacataaaggaccaacaaatgttttgaaaaccaaaaaaaatggtggttgtggaggttggggcacatgagagcgtttttttgaccaaagtacgtaacagaatcaacttcttcacttgcccggtggtttcattttccttttataaaaagacaaatatgaactcatttcctcaaaacttaatcacaccatggcggctcaacttcaaccttataacatcatcgagacctgtcacatctctcccccaaagggcaccgttgcatccaccactcttcctctcaccttcttcgatgccccctggctctctctcccactcgccgattctctcttcttcttctcttaccaaaactcaactgaatctttcctccaagactttgtacccaacctcaaacattccctctccatcactctccaacatttcttcccttacgccggtaaactgattatcccgcctcgtcccgaccctccatatttacactacaacgctggcgaaga

SEQ ID NO: 30120 - DNA, 1333 bp, Arabidopsis thaliana landsberg
tagttataatagcatcaaggttttacataaatcttgcatagacaagattttaatgttagttggatagtctttactctttagtatagttactgcttttataaaccaaaaactcaatcatatctttcaattaatttattatgattttggttttttaactaggtaaaccaatgaaaactttgaagtattcaatttatttgaaaaactaaactcttttcatgtcaccacatctcttgaagaaaaatatttagatgtgatcaatgtcaagcaatatttatccttgattcgttttctaatgtttatatatatcttatacatggagatttgttctgattgaggatttttatttatcccttttagagttcacatagtaaaaatatttttgttttgaaatcgaagcaaaaagcacttttcgattacattggtattattgtgcgagaaagacaattgttgagtcatgtcctttttaattacatacggtggagaattgttgagcactcctaaaaatagttaacactagggcatttgacagaataccaattcttcacaatagaataattagttgtaatatcatttatgtttgatcgtttgtaaatcgtacatcgagagaaacacgtccaaacaatcatgacgattttggtgccaaatgaagatgaaatgcatgtttaggataacaaaaactgaaactttttcaatatttctttacttttgagcactaaataagaaagaaattgagcgcttagtcgcacttgcagttatcccctccatgttagataagtaaataaacaaaacaagaacaaatgatacttctgtttgggacgttgattattggtttttttttgatgtattttagtttttttttactaatacaattattttgtatagattatcctcgaacgctaccttgttttcggatatcatcaactcaaaatttaatgttggtgcttccttttatgaggcaatgaacatcacaaatacaagtttcacctgaaacaagcacaaaactaccacttttaataataatgtgatgcctcttaatcaatatgcctcgtcgatagagcaaaaggattaccagaatcttagtcaaataggattgcctacattagtgaacttggacccgaaaattagaggaagggcattatgtaatctttgtgaacaaaaaacatcaaaagctatatactaataagattatagagactcgaaaaccataatacatcggaaaaaactcaatagtaagagaaaaaaaaatactaaggttattgcaaaaaaagttggaaagcttgttggatcgtgaaaccaaaggtcagaaaaccgatttagattttgattttgattg

SEQ ID NO: 30121 - DNA, 3008 bp, Arabidopsis thaliana landsberg
gaaacagcaactggaaatttcaaacaatattaaaactcgaaacagcaaagaacaagaatatatttagtgaaattattgagtaaacattttgaactaattgaatcgatttttgatggcagaatcaatcacggaagccaaaaagagaatatagacattaatcactaattaaagtcgtaagggaggtttgaaaagtaattatggagagacgcttcggcaattaatgcgtctcattttcaatctctctccctatatctatcgtagagtatttaataaactttggctctttcgcctagaattcctctcctccattcgacgattcctcttgtaacaattactacaatattagtctattttcggaaatacatatttcgagactattttgaacagtgtttcaagaaaaatactgctcgagtagaattatcactttatcaggtcgtttgcatgaaaatcgcatcattttgtatgaaaattcatactatttattttgcaaattaaatagggatttaaatgtgagaaaaatatggtaagggtatgaagaaaacgaatagtgagaaaacgtgtagagcgtgaaatagggaaagaaaaaaaaaggttagagatcaacacacattaaatacattaaaatttaaatgctagtcaataatggtacaacgataaatgtaacccctcattaaatactattagctctttgcacaccagagaaagtaaactaaaatcaattttgaaaacgaacatttaatcgtataatatttaatactagtagtaatcaattgaatttttttttaaaaatactattatataacgtgccgcatttaattttgccccatagactttaaaacaatttctacatttcggcccttaaatattggctccgtctatataactctctctgcgtttacacatccccccattactctctctatctctcgatgattcttgatatggctgctgacgtcagctctctcgtacggttactaagcggttacaaagatgatcgagcggtggttaaagatcctgccggagccaaatcctcggcggcgctgatgactcgtgaccttctaggaaacggcagaggaggaggaggcgatcggtctttagagcttgacctcgaccttcaagtccccaccggttatgaaaaacgcctcgacttgaaggttcgtgttgaattgatggatcctctttagtctttcctttagtggttttggctgatgagatcgtatcattgttgttttttttaacagtcagggaaagtgtatttgcaacgatgcaattcaacgagctcgtcgtcaataacaaacgcagaccaaaccaatcaaacagtaccaacgtttcaggatttgaattttcctcctccgactttgaacaattctcctttgttgaacctcttcgacgatacaacgccggaactgaagctacttccgtcgtctcgttgttctcgtccgaacactagtaatttacagagtgtatgcacactggacaaggtgaaatcagctctagagagggcagagagagatcctgctatgttcaagaaacgtcaatcaccggatgatacggtttacgatcattataggacggaggctgtagcgtcaccggtggttgctggatgtcctggttgtttatcgtacgtgttggtgatgatgaataacccgaaatgtccgaggtgtgataccattgttcctttgcctacaaatcctatgaagaagaagcctaagattgatctcaacatatcaatctgaatgttttggagtttatattggaacatttttgtaaagatagataacaattcagggggtttattttgtaaaacttaagaaagaagaaaaaattaatggtaaggaaggaagattagaaggatgttaatggtgtttttgtaaatgcgttagttgaacaacaacatacttattagaattttatttataaacatagtaattcacggaataaatgagtcaattaaatgacgataattaatgttacaattatcttattttctacttttgaataaactcgtagtccatggttggttggaaggtagtttgaattcattgtatatgtccatctaaattcactgtctttttatgaaaagaaaaaaactattattaatagtgttatttgtcaattttgttatatatttttaaaaactccttgataatgtttggcttgaaattgtatccaaatgcctctcttatctgagtggttatgatttcctaaaattacgactactaattactaaatgaaacgaggaagttgtgtttgcatgcatgcatgatatcttcaacaaacatgtttctcaacccaattaaagataaattatcaatctatgtgtttggacaaaaattgactataagaaaaaggcaaaaataaatgtgacaactgtttaatttttttaaaggattcaatgttgtcatttatgtgaggtttaactgtttaaggtcattcaaagttaagctgacctaatgcttaggtcaacagagcacacatattcacatactatacgaataactgcaagtctgcaactaacgtaataaatcgcggctattaaaatccgatatgcatgtagacatgtagtagtaaacttatcttattagtattttttaaaaatgtcaacgaggtaaggaaatgtagaaatgcaaatactcacgacgagcatatattacatggacgtaatttctccgatattatactacgaccgacgagtagatgagttagatttattacgatagaattatatactaacggggggacctgaaataataatatttcgtaggtagtatagtttttgcattaaacagttttgtatgtgtgtggcattaatacattactccggatgggatacgtatcagatagactgtctggtttgatattaatacttatccataacaaaaaaaaactagctagtgtatatttttcacacgttacaagatacgaaaatcaggtctacgtctataattacatgacaaacatattacaaatatctaagtctcatcttcaatggaaactagttcctaact

SEQ ID NO: 30122 - DNA, 3541 bp, Arabidopsis thaliana landsberg
gaaaactggaattatgtggtagaggcagtaccaagaaacattttttatttggtttcaactgagctttttcttcaatatatgtatcaatgcatgcaacgatatgtatcaacagaaggaactagggcagcaacttttgaccactcttctttgctggcatcttcaagaacccacaggtccattggaccgctgtatgcctgactcactatagctatctttccactatggtccaccatattaccaaactgttgtaatatataatcctcaggtagcttagtaacatgaaattcttcagagctcagatcaaagctcatcagagattttatcgttgaaagaagctaaataatacatcaccccatctctacatatcccttgagatccagaatgatgacgatgtagatacttacattcgagcattctccatttttgtttgggtcctagcgtgaaaacttagtgctcctctgtcataggctcctcccacataggatcttcccatctaaaataatgtggtccacgtagacttcttaccgtcatacacaagactttgtacaaatcattaactggatcatatccaaaaatggagaaaatgtcctttctctgcgttttgattctaggtaaaggtacaaactgacccgtactagggtttccaatcatagctttagtattgttttgaccgaatatcaaaccgccgatgggtggagaaaatgagtaccgtagatctggattcagagtgtaactgacgctacgatgatcagaagacggatcttcctgagagcaggagtgaaagaactgcatctgcatgttgggacggtacactgagaaaagaagacgcggctgagccaaagatcgtctcatgtacaagtcggtgaaaacttggctgcggattatcgatgaccaatgatttgaaacgaaacctagcttggctatggatttcggcggtgacttcatgagaatctctattttcagttccagaggaagaatcgaactcgggtcgcattcatctcttttttcttctggtttcttagacttccttccccttttcttcatcgcgatttctcttcttctcactgtctcactgcttcgtttttttttcccactcttaacctaaacctaataacgttcacggcagggtctttaacaatttagggatttgtaaataaacctcgtatataaaatttttacaagaatacaatagtactcttttgtttttttttttaatagaaaccatttttgaccaaaaaggttaaatatttcatcacaatatatattcattgatttttgaagagcctaaacaaaattttcataactagctagacaaattcagcttctttttttttgtttgtttcatatagcacctcaaatcggctgtggttttgtcaccaatgaagaaggaggctgaaaatggtgagcctctaagtagaaactgatatcactgtaagcttaatttgcataacttcttagctttttcgtcaagtaacagtagactgatgtattcacagcagctgatatgcattagcttcttccttttctcccactgatgttaaaccaggaaactgaccaatatcatggccagcaagaggacttaacctatcatgtaaaccgattgcaaattcttctggattagcttcaccgctctgtaagaattccgcaatctacagaggaaaaaaagaggagcaaaataccaaaacacttgtcatcttttattctgaaatccgcaaatttttgttaaggagagtcacaggaagcttcttacatggtttcctaaggctgcaccgcttatagctgcagattctaagttagaaccgagaagccaatcaccgcatataccagcacggccttgtggatcaaatatacatggaactgcaggagtgttcttcggcaaagctgctcccctgtgtggaaagtattgaatcactccacaaatcttcaaacattttagcaccgttgatacaactattacttaccatagctggagacgtgtataaaccggtttaggaagtgagccttcaggcaaccccaatgcgatttccacaccttgaagcatcccggctttaactttctctgccgtgaccgttgggatgttttcctatgagcaaaaaagggtggaaaaccatttcatttctgcattacattatttgtatagctttgaagaaactaacctgaggaactttgttctgtttcccatatgccgcagtactgaaaaaagtccaacaatgtggtggagttctgccatttccaagctttgcagagttatttcccatccaagacagtgattcaactcctttcacaaacgctccctcaaagttcactgtgggaagaggatcatcaaaagctgctaatagcgcccatattgaactcaaatccagtttctagaacaaatcaagaggattgtatcagaagatatcatagggcttaaaaaaatatctgtttcactagatattctctaccttcatctgtttagccactaggggcaagcctgatgctgaaagcaagcgattggcgcatttacctgaacaaaacgcaaaccatttctataaagaagacataacaaagcatctaaagagattaatagagaaaccgatatatacactttcttaccattatgagcaataactatgacatcaaactgaccacgaggtgttccattctcacttaaatgccacataccattaagtggttccaacttactgatccaacaaggccttaccagattcaccatttgactctgcaacaaattccagtatacttacttcaactcataaaaatttcaaaaaagactcaaacttttcgctgcacagagataacatatcacacctctaatagcaaagaatcagcgagagatcgcatgccattagcagcaatgtatcttggaggtgatgatgagggaaactgtgagaagctacctccaatttcaagctctcccacggcacctttccactctcgaacaagtcctttctctaaccacccatcgaccaatttgataaaccgagaatcatccgcggtgaagaattgagcagcgtgatcgaaaattagtccctgtggttcaataattcttgttccaagtcttcctcctaacccatgtatcccctgcagaagtgacacaagatattcttactaaagcttggagtttgaagtgaaattacaacagcaaaaacaccccaaaaaatcacaaattttacagcacccgttctaccaaattctaattcagactagaaaagaataaaagaaagtttccaaaggacatgaacgcaacacaaaagagtattacttgattgctctgtccatgaaaatggactaatacgattcaattagccacatttgagcccaaaaaacttgactttgaagtgaactgtgaatatacaaaggcaaaaacacccaaagaccacaaatttcacagaacccattctaagaaactttaattcagattcgaaattatctaaattgacgaaccgtatcgaaaactgtggactggacgccacgagcttccaggttcaatgcgcagaccaaacccgccattcctccaccgataattgccacgtggggg

SEQ ID NO: 30123 - DNA, 2038 bp, Arabidopsis thaliana landsberg
gggagagatcatgtgtaatcttctatgttaggaacaaaacctggggatgtctaattgtgtagataaggtgcagagatatgtgaatttgaccaaccacctgttttgttgatcctttaggttttaaatatcacattagatggccgaaagcggaggtgatagtggttcagtggccacacctgttcaacagcgagcacatgaggcatggaggatttaccaacactatcttgacaagactacacctcatgcaaattacagatggattggaactcttgtcgtcgctcttatctactgtttgagggtttactatattcagggtttctacatcatcgcctatggtcttggaatctaccttctcaatctgcttatcgggttcttgtcccctcttgttgatcctgaagctggtggggtctctgatgggccttctctgcctactagaggttctgatgagttcaagcctttcattcgccgtctccccgagttcaaattctggtaatgccatgtcgaattctctcatgagcctttatacatttttgttgatttttccaagtttaccagttgcaatgtcaaattcctttcatgatctgtcgtgagttttaaattccttcatgatcttttttttactgcattgctaccttccatggggtcatgattgatgatgattgtagattctgggaatgttctgaatatctctgaatgcatgtctccatagtccattctttgttcattttagtatttttgatgtttgaggctttcacaactgatcctggtagatggagaatcacagatatgtgagcagtaagctttatcttctcattacatattgcattctatacagttacaacatcagaatccctgtggtggtatactataaaaacgtaagataccattgtctttcggctaatgaaggatagctacttacatgtattgttgtctcaggtactccatgacaaaggctttctgcatagctttcctcatgacattcttctcggtgtttgacgttcctgtgttttggccaattctgctgtgctattggatcgttctctttgttctcaccatgagacgccagatcgcccacatgatcaagtacaaatacatccctttcagcttcggcaaacaggtaaaacttctaactgattgcggttttgacttgcaagttaattcatccatttgtctactcatgcatgttacattttgcaactgaatttttgatagctacaccaacttatccacattcatatcggtcgatacaagatacttgatgaatagtgttatagattttgagattaattaggctacttccaaaaagtctttgttttcttggtaataattgttggtttgtgtggcagaaatatggtggacggagcagcagcggctcacgtgcggattgatctgaccaatttgctgaccattagctactttttttgtctttgcaaaagagaaagaaaaaattgttaagaatatcattttggaccatttttacattgacaaaactatgcagagctataaggaagaattataggcaggataaaaaaggatggaaactaaacttgatttagctcggaagaaaattgttccctttagttgtttatccatgatttgcaatatgatctataatctgttgctttactaattagacccgaaagcagactactacttcgactataccggctgccgcttctaaacccgtgaatactggaccgtgtagtaaacgatgatacatgacactaattgtggaccaatattaaccggatctaaagccttacattcaaaataaaccaccacttcggtttgattagccggagaaacagacaggttaatagccacttatttaaaacccaaaatacaaattgtggagagtcattctcgttaagcactcagctttagacatattggttgaggatttcatcaacagtagtgtatttgacatcagggtaaagctcagaagcttctaccccgaaagaaggttcgatttcaaagcttgtgtgtccttctttcacgaaaacgcagtgacaaaagggatagcatcacgttgagtggg

SEQ ID NO: 30124 - DNA, 1568 bp, Arabidopsis thaliana landsberg
  unsure (1)..(1568): unsure at all n locations
gagcttgtcatggcggcgccagacaatccatcaaacgccgtggaatgggccatggtttagatggtgaacaaaccggagattctccgtaaagcaatggaagagatcgacagagtcgtcgggaaagagagactcgttcaagaatccgacatcccaaaactaaactacgtcaaagctatcctccgcgaagctttccgtctccatcccgtcgccgccttcaacctcccccannnnnnnnnnnnnnnnnnnnnnnnnnnnnnnnatcacatccctaaaggaagtcaagtccttcttagccgatatgggctgggccgtaaccctaaagtttgggccgacccactctgctttaaaccggagagacatctcaacgaatgctccgaagttactttgaccgagaacgatctccggtttatctcgttcagtaccgggaaaagaggttgtgcggctccggcgctaggaacggcgttgaccacgatgatgctcgcgagacttcttcaaggtttcacttggaagctacctgagaatgagacacgtgtcgagctgatggagtctagtcacgatatgtttctggctaaaccgttggttatggtcggtgagcttagattgccggagcatctctacccgacggtgaagtgagatgagacgacgccgtatatattttatgaaactacttttatataatcgcccaaccaagtttggtcaattccggttaccagaagataattggtcaaattgtgaacaaacttgtgtgttggtcttggttctttttgggacacttgaattgtgtctccttttacctcttcttttgttgttttcaataaaaacttttattaccatttcaataaaaagattatcaaattaacaaatctgcctgtaatatatatatttggtcaatttaaatctatactattaattgaaaatctatgacatttgtttttactgttaatataaagctctgtttcggttttcttgtgaccaacaaacataaaatggtttgttatttaattacaaaaaggcccattagagaaatattgcaatgttgcgtcgtctcttgaaacccaatcttgttgttactctacgcaaactctcttcttcttccgcaagctacgtcgatcgtcatagtagtgtgattctctgcgatcagagcttgagcttagagtctctgcgtaaacacaacgctcttatcatcaccggaggactctcggaaaacatcttcgtcgcatcgaagctaatttcatcttacgcttcttacgggaaacccaatttgtcttccagagtcttccatttggttactcgaagagatgtctttctttggaattctattatcaaagcacatttctccaatggggattatgctcgatccttgtgtttcttcttctcaatgctcttgtctggccaatcccctgatcatttcactgctcccatggttgtttctgcttgtgccgagcttttgtggtttcatgttgggagtttcgttcacgggcttgttttgaaacatggaggttttgatagaaacactgctgtgggagcttcctttgtttatttctactcaaagtgtgagttttacaagt

SEQ ID NO: 30125 - DNA, 601 bp, Arabidopsis thaliana landsberg
acggccgcgtcgtgaggaagcgggtgattcctgcagtacctcttcacattccgcacactggtgtgtgatgttgttcgtatattttaagcttcagtatagcgtggcaaaaggcaaggaacgtgttcgtttctaacgaatgtttaactcacgtaaattcaacacatgtttctgatgaaggtttaactcatgtttggaacagtatatccatgcgctggtgctattgcagttgttaagtgtaccttaaatcctcatgttcagatgttaacaatacgataatttggacatttaagcatatagacttcagaaacttatatttaataatccggtcagtcaaacacctagattctaatcatcacccaacttcttcctacactagcttttttctacaaccagcttcttagaaaagctcatcagaaaaaagtcgaaccaaagatgccagcttcattgctcttgcctacccgtatttctaaccttcggaatagaattgcacgtgcatggtctactagctctttgattttttcctcgtctatatataaaagagcctagtagcacctgcgtttctatgttctactatttgttatagaggcgaatattttagaat

SEQ ID NO: 30126 - DNA, 2609 bp, Arabidopsis thaliana landsberg
attgtaatgtaagatatataattagcatatcattctctcgatttccaaatattcattgaaatcaaaataccacccaaatatgtatgtgcgcgtctaatttagattatttttattaaatatttttctatttacaaatagaagaaaagaaatataatatgcatggttaattggtttttttttttaaacataaatattttaaaaacataaaccctttaaaaaaaaaacctttaaaaaaaacataaatatatgtatataataattcgaaaaaatctacgtaattaataacgagtgagattcattcaagaattttgacaaagtcctaacatcgatctggtccatctgtatttaccaaaggcgtaggccctaaattcgccaccaaatatttaataaatttttaaggggtgtttgtttagtaaagaattacgatttttatctgatttgacacaaaagtatcttttagccttaattcgttacgttgtaaagacactgatccaatcccttctacacaacaagatcggattatatagacccaatatgtacagatccgcgagctggaaccgtgtgaccgaggattactcggtgccttggtccgcaccaaagggattgtggaagggcttagacgaagacgagccggctccatacgatcccactggccaagagatgactaagaaagagcagtcacgtaccaagtttgctgtaaacgccgttcacataatcccttttgtccttcttgcttgtgctctcgtcctttggttcttctctaatccaggtttgtttacaattatacacattgtgtccctattcatgatcttaggctatcatatatatttgctcgattctctatgcgtgcaaacaaaccatctatttgagaatgttgcatcttctagtctttttgatccagttatttacttgtgatagaaggccatgaatcaagtttccttaaacacataatctttcttttttaaaatcaattcggaactcacatgatagatatgtgtaacgtacatacatatttgatactcttaagtagatttgtagcgtcaaataaaatgattgcacatttttttacgtatagatgtagatgttggggtgaaaggggactccattgcggctaggattgaaggattaacgatcgaaggagacattgacaatgacagcgacggaactcagaccggattcttaggagccgccacagaggtcggacattcaaaaaataaactaaaacgcgaggctaataaacgcaatcggaggatacaagcttcaaggaaagtgatgaaaggtttttattaatcacctttttgtttgataaatatttacgagataaactttcaaaacgaattattcttttttttctttctattttgattgcgcatgttagttgatcaggagatgtgtttctttggttaaacttttatatttagttcttcacattatcttcaagatccacaagaactactttcactctgtattgacgcctttctttttgaataatctgctacaacttggaggacagcggtttgatgtttaaaaaagactagggaaaaaagtttaaacgttaccatttgtgcatgcaattgcttcttttcttttcagaaaagaatacgcgtctttccaaaaaaaccttgtaaactggcataaattctgattaaaaaccgtcactttatagatctgccaaaaataaagacattaatctagtgtgtaaaggctctaaacaaaaagaaaacaattatatccgaatccaatttttctataacatgattttagattcaactgttttagctacaaattagaaagaaattatttttttatctaaaattcatagctgggcaggtagaatctaaaaccatatttttaaaaaagtagattcggatatgagatgatgaaaaaactttattttcgtacgattctcaatttaaaaagatgtatttaacgtaacaattttcggatataacgaaaaagcgatttgaatagtagatgcgaggaaaaagttttgtttttgtcttatcttcggtccgagaaaatgtatttaacgcaaaacttttcggacataaaaaaaaagcgatacgaatatcaagtgcacagaaaaagctttatttttgcctgatttttgctccgaaaaaatgtatttaacgcaaaacttttcggatctaaataaaaaagtgataaataagctttttatggtgataatagtatgctgtataatcatttcctacttcgatcaaatttattacgactaaaatataaattatggaaatgacatttgcaaactatttctattgtctttggatttagcaatgctctcaccaacctaccaagattgcaaaagagaaacggctgtcgaggatttaaaggattcctctcgacacgtgtgccagatggtgctcctctcctctttattatttttaagttcttctgattatcacttacacgtgtgccttctcatgcaatttttaccactcgtgtgtttccaaaagtttttcactcttcttccttcacgtaaacgctgcccttattaacgtctgttaactttacctctcacgaatcaaacaccatttaacaccataatcaaatattgaaatatttaaaacgttgatcatgatgacgatttt

SEQ ID NO: 30127 - DNA, 1327 bp, Arabidopsis thaliana landsberg
agcgtaaaagcaaactccaacaactacatgtttttaatctccatatctgtgcaacaatcgtgaaaataaaatccttctttttaatctttattgtggccagagtaatgtttttgcgtttgggatcattcttgattgttactacagaacatggtaaatgataagaaccataagtcaaaggaatctaaggagagattgaaatggagttgtgagcttcaaaacagattcatcgatgctgttaatcaacttggtgggccagaaagttcgtctctatcttctttgtccttctgaaaactcttaatcaaggaatcaagaagtgtttgtggtttggtcttatgcacatttcttgattgttttttcatttttttctctttgttatgtgtgatatcagaagtgatgcctcagggtttgatgaggattatggagattcctgagcttactttgtaccatcttaagacaaaaaaagttcatcaaccttttcccagaacaagaacaaaaaaaggcacaagttttttttacaaaagcttcttatgtaaatcctaattctcggactcaacaccatcactgtttccaccgtcctgcgcagaaaaatctctaattctccgaccatcgttgaaactgaacctaacccaaatctcattcccatcgtttcttttcttcccaatctcatctccatcaacaggcatctcgtacctacaaacaggacacgacccatgaaaccctaaccatttctctatacatccaccgtgaaacctatgcttacacggcatctccttcaccgtctcctcggacttccactcctccaaacagatcacacactctccttcacagccatcaatctcaacgatcggcatcgcatcgatggaagccttggacgcaggaggacgaccttcctcacgtgactccagtaagcgaattagatccaagtacatcaaaaacaatctaaagatccaatttagatgcgtcatttcgcctaacaagaagagaacaacattcactcacaagtctatcctcttagaagcatgaaccgtagaacattgccctctattatcatcagcacacaagtttctagactctgtttctttgcttttccccttcttaagctgagaacattcttgctcctggaacaatcaaagataatttcaacactatatatacatgaaaatggaaactccaatgaactaaaaaactcaaagatatgaatataccacatccagcaattgcttcgagacacgttccagctccttctgtttaatcaaataccacaaagaacaatatgagaaactacatctttgtgatcacagagaacgcaataataaaccgaaaccct

SEQ ID NO: 30128 - DNA, 3070 bp, Arabidopsis thaliana landsberg
  unsure (1)..(3070): unsure at all n locations
tttagatatgtgtttctttgttttataaccaaatcaatgatcctggctcttttgattattctgcatgtcctgacgaaataagatggcaaacgtgtctgttgctgcggaatggcagcttctctatgatcgatattataggaagcctgagatataccaaatgaaatggaaacatgtagatttgagtcgtaacaaggtggcgtgtgcttcgtttggtgggccaattgcagttattcgagatgactcgaagattgtccaactatatgctgaatctgctctaagaaagctccgcatctttaactcagcaggtatacttctctctgagacggtttggaagcatcccgggggacgtctgatcggaatgtcctggtcagatgatcagacactaatttgcattgtccaagatggaaccatttatcgttacaacatccacgctgagctcattgagcccaatatgtctatgggccaggagtgctttgagcagaatgtggtggagtgtgtcttctggggaaatggtgttgtctgcttgacagaaggagggcagttgatctgtattttcgatttcaagacaatgaagccttctaagttgcctgatgtgccggggttagcagaagatgatctgcttcagccaatctgcttgactgtgagggaacctaagtacacgatgtctgggattgctgaggtgttggtagcagttggcgatgatatttttgttgtggaggaggacatggttcaaactattaggtttgatgagcctagtattgatgactctgagatgcagaatgatgattctgggaatttgattggagtggtccagaagatgattgtatcacctaatggaaaatttctaacactcttcactcatgatggccggattgttgttgttgacatggaaacaaaacaaattgctattgactactcttgtgaggtatgcatcattgcctctttagatgcttggttctttgtaatagactgtataataaacattgcttgtcgttctgtagtatggtgacttaactgtgtcttttatcctacttttctagtcagcccttcctccgcagcaaatggcttggtgtggaatggatagtgtgctgctatattgggatgaggatttaatgatggtgggtcctgtaggagacccagttcactatttctatgatgaacctataattcttatcccagaatgcgatggagtgagaatattatctaacacgaatcttgaatttctgcaaagagtacctgattctactgagtcaatctttaagattggaagcacatcacctgcagctttgctatatgatgctttggatcattttgacaggcgaagtgctaaggtaggtttattattgtacacaacagcaaaaagcatatgcatcttaatggtgttctgtggcagatgttgtgcattatgatgtgaatccttcatagtcaagctttagtgtctcagttcttcctgctgttgctaatattgtaacaatatggtgttcttactgaaaaaaaaatggaatgaattgagaataatattttatacttactattcctagatctggggtgatgaagttgatttgctcttctttctgttaggcagatgaaaatttgagattaattcgttcatcactgtcggaggctgttgaatcctgtattgatgccgctggacatgaatttgatgtaactcgtcagagggctctgttacgagcggcaagttatggacaagctttctgcaggttagtcttaaaaaaattgactttcagtaatttaatttctgagactaacgctcggtgagctgcnnnnnnnnnnnnnnnnnnnnnnnnnnnnaagagacttgtagaacgttacgggttttaaatgcggttcgtgatcctgctattggcatacctcttagcattcagcagtacaaggtttttgcagtttatatgattgtgtctataaagaaacgtttgcagctatccttttcctcatgaaatttatttggtgtgcagttactgacaccagtggttttgattagtcgccttattaatgctaattgtcaccttcttgctctgcggatatctgagtacttagatatgaataaagtaagtcagaggttaccatattcgtccctgaaacgcattcctctatcttcaatataaattttcctgtgtagctttagggtgaatataattttctatttttggcgttatataggaagtggtgataatgcattgtgcatgagcaaagactgctgggctaccatcaactccagattctgatgttcttgaaggtttactcgataaggctcaaactctagggtatataagactatgcaagatatatatattgagattgaggaaattcgtggacttagaaggattgatgtcattgaatttcagctccaactatgcaaaggaatatcgtatgctgcagtggccactcatgctgataactgtggccgtcgaaagttagctgcaatgctagttgaacatgaaccacgctccacgaaacaggtttgtctatctaagatgactacctttcgttggagttctttatgcagaagtaaaagacattcatgttttcggggtaataatttgtgtaagaacttagtttcacatgtttcgtgatcactttctgtaattctaggtacctcttttattaagcattggggaggaagacactgctttagtgaaagcaactgagagtggtgacactgacctggtttatctggtcatatttcatatatggcaaaaggtatatgactgttttttagtgatgttaaaactttaactataaatctgtatgttgtgctaacaaacaagaactatctgatttcaacttgtggggttgaccagaggcctcctttggaattctttgcgatgatccaaggaagagttttggcacgtgatctatttgtagcttatgcacggtatgaaaatcttctatctaccttgcttgatatatgcgaaactttgttgcttatgaaaactttcctgttgtaggtgtcataagcatgaatttctgaaggatttcttcttatctacgggccagattcatgtacgtttcatgatcacgtttttcctgtaaacgctgaagttgacca

SEQ ID NO: 30129 - DNA, 3359 bp, Arabidopsis thaliana landsberg
cttcataaagaggtatgtctttgtgagcatttagttctcttcgtcttcgctagagttggactgtgctcacttctttgttcttgcctttatcaaacatttcaagatagcaataatcaagagagttgaggaatccaagtcttgtccatttgttcttgaaggcaaacaaagtctcggctcttgcttaagaatccgtgtcaatgctcaagacaatgctccagatctttccaactgttctattcagtggtatcgtgcagcatgtgaaactagtcgcagggaagctatatctggtaaatggacctatctgtttgtttgcttcatcatttggtttttagtaaatgaattttagcttgagcagttcatattcttgctcttaggtgccatccaatcgatgtatgctccagaaccatttgatgttgggaggatcttacaggcagacattctttcaaatggtcaaaagttcacagttacaaccgatgatccagttgatcctggttggtattacggaaactttagacgatacaaagatttttaagtggactataagtgaatgtttggcttactgaaatgcagattctggcttgccatcccgcgtagagtcgctgatgcgaaagtctaacagtgaattcagtgtatgttacaacgttcttcaagattttcagaacttattcttgttttcttggaaatgtttgcattgagttcatgttctcaaactcttcttcaggtggttatatcgcagatgaatggacaagactatgcatctcgatcgcacgtttttaccgttggaaagacgaggataaagctgtctcgaggatggatcacaaaggcgagagaattatattcgacatccatgcaggtatctagagactctttcttcattctatttaacagaaacatctctttgacattcaatgaaaaacatttattacaagttttttggtatgataattattcagctctgtggagttagaggcaatattaaggctcccaccaaggcagtgttctggcaaccaagaaagagtctaactttcatactaacctttgagtcagaacacgaacgtaacgcagccatagcccttgctcgaaaatacgctttcgattgcagtgtaagcaaaagtagtcaaaatgtcgcctttctcagactctgcaaatcactatggttttgcactttatacagttttaagactgcaggtttacataacaggcttgcttaaatctgcaggttacactgcttggtccagatgattaagtgaagaagacaatgtcattaacgaaccacctgatattttttcccctgacgccggattttcttgttctgtgtgtttgtgtgcggctactttttgtttatttttcgcactggttcaaagaaggaaggtgcaagtttgggttctctactgatgatcatacaatgttgctgcgtagagttttattataggcagcagacttcttttttttcttttcttttgcttgatcatttgtttggtttggtttgtttgattgttttattttttgattcaacattgttaatcagcttatgagtgtgagatcaaaacccaaagcggtttctggtttgtatctgttaccattgtttcatcattttacctgcttctgagaatttccttcttttattatcagtaaatgagtaatctgtatataaaatagattgtacatgtgtttgaataattatgaacaagaattctctaactattactagatacgatgatcaaacaaagggagatcaatgaggttgagtggtggcatgatccagatattctcatacggattctgtcttttccacttgaagcaaacctcactctcttcatcaaccttataatatatgcaagtcctcttgaatccatggaacacagagagacacaaacagttccatattccactctgcttctgctgctcggctctggattcagaagacaaagcgcttgcgtagatcgtcaagcctcccagtgttttcctctcagcccattcaaagctagtaaggtcaagtttaagcactgttgggttcatgtgtctgtacatataaatgagaaagatctctccttggtgttctgtcataaagcatccgttgcttccaggacgtttaggaggtctcccaggaagaacattccaataattcaaagatgggtcaaagagagctaagcatccggtgtttgtgaggcagtagaagacaccattggagaagacaatctgctcgaaagtgttgaagtttcgctgtaaccgattcttgaacacagatgttttccactctttagcattagcaaaatatgtcttgatggtgatgtaattccaagtgacagaagtgacagtgaacaagagacaactagttgatgtaggagcacaagagaaagccattctttgatcatatgccatccaaagcgtaggcatgggtacgcaatcacgagtaaagggattgaagaaaaggagttgataagaattgggattgtacatgagtaaccaaccatctttggagtaacaaactcgaaaaccggataactcagggaagtgaagattgtagtttttctgcattgatgggtcataaagttcataggaatcgtctgttttggagaagtaaataagccaaggagatgtatgtatcactcgaagagaaacacaagcttcgtgccatgttttgcagacagcagaagcacggatgttatctttcaacgggagacgagaaattaccagttgtaagagatcacaaggaaggtttatgaaagtttgatacttttctttttccttgctactctgtttcttccttttcgtcttcttcttcttcttcgacctgtaaaagtaaaacccaaagtctcaaaatctcaaagctacaaatcatatttttaagccgaatttgaaatttttgaaaactcaagatccaagctttgaccttcttctggtaaccatggtgaagaatgggagattaaggattaggttttggggtccgacgaagtcgtaacgggaaagaagcacaagatatcggagaagagtctcctggccgttagattaggacgacgacgactgatccaacggtgatctctgatcgttctcttggtctcttcgccgttgaattttcagattagtcataagcaaatcatccaaagaggaccggttcggttttatacggtcttaaagttattaaattatactattaattacgatgatctaaacggcgtcgtatcaaattcatctcatatgcttacgataacgtcccattgccaagctggttctttcactcttcaggagagatagagagagagagagagttatcagagatagcaatagatgaatagtatgatctgctttccatgtgaccgtgtatgcatgccgcatacggcgaacagcacaatctcggc

SEQ ID NO: 30130 - DNA, 909 bp, Arabidopsis thaliana landsberg
tgagagaacatcagatctattgtctaacgtttcttctttctttagctcgcagatacgatccacaatcatgttggcgacgaacccgtgcacgaccccaacagctatcctgagacctttttcatatcctatgtcgaggaacctcatgggcttccatataaatggagggatcatgaatctaaacagtgtagactctgttgcttcttcaaaagctttagcaaatggaacttggggaagatcaacagctagagtttccgggtcagcacctagacccgcaaggcagatgatgtcaaacgtcaagcgcaggaacacgtcttggagatcgaaagcttcttgtgactttgcgaaactctccatcaccttcaacagcttcttccttaccaaatgttgtgttgtctgaaaggaatgctctacaaacccggttgaatgcatttcggttatgatgatccgtcgttgctccttccaagaatcatcatcagcattaaagataccttcctcgagcagatcattgaaccggcttttaaagaaggtaccttttgggaagttcttgaagttagtcttgagcatgtactcgacatttgcaggaacacaagtcacagctccataagacccatcaagccaaactccccgataaagaaaggtacctcgacattttttcaaactccttgtgacccatccatagacatcatttatatgaaagaaaaactaaaaagtaattccgaaaactggccatagcattggtccacgcttgttggttaacttctcacgcaaacagcagaaaacaaagagccccaacaaggaaagaagtagatcgaagagagaaagacgattataaagtcgctctgttaaagacattgaagtctcttctcagtaaactctctgcagttttgtttgtcgtgatgacatgtttca

SEQ ID NO: 30131 - DNA, 1460 bp, Arabidopsis thaliana landsberg
ttgataattcaaaactcttttgaatcttcaatttactcattacattttcccatcaaaccatctgaccacaaacaacactagaaatttactgagagaaacttaccatgtctgaaatatcatcttccatgccttttcagagagagtttataatcatctttgtctgtccgatgtttctctggccttgttgggactgtttgttttctgttgtgtgcgtgagaaggttactaaaaagctggggccaacgatatggcctgtgtttggaattactccagagttcttctttcacaggaatgatgtttatggttgggctacaagatgtttgaaaaaatgtcgaggtacctttctctataacggaatctggcttggtgggtcgtatggagctgtgacttgtgtccctgcgaacgttgaatacatgctcaagactaacttcaagaacttcccaaaaggtgcgtttttcaaagaacggttcaatgatctgctcgaggatggtatcttcaatgctgatgctgagtcttggaaggagcaacgacggatcatcattaccgaaatgcattcaaccaggttcgtggagcattcctttcagacaacacaagatttggtaaggaagaagctgttaaaggtgatggagagtttcgcaagatcacaagaggcttttgaccttcaagatgtgctcttgcgtttgacatttgacaacatctgcatcgccggtctaggtgatgatccaggaactctggattctgatctcccccttgttccattcgctcaagcttttgaagaagcaacggaatctactatgtttagattcatgattcctcctttcatatggaaacccctgaagttcttcgacatcgggtatgagaaaggtctcaggaaagctgttgatgtcgtccatgagtttgtcgacaagatggttgtggatcgtatctgcaagctcaaagaagaaggaacgttaggcaacagatccgatgtcctctcaaggattattgagatagaaagtcacaagacgactgatgaaaaagatccttctaccatcaaattctttagacaattctgcacaagtttcatcttagctggacgagacacaagttcagttgcacttacatggttcttctgggtgatacagaaacatccagaagtcgaaaacaaaatcatccgtgagataagtgaaatcttgagacagcgaggggattctccaaccagcaaaaacgagagtctcttcacggtcaaagaactaaacgacatggtatatctacaagcagcactttcagaaacaatgagactttaccctccaataccaatggaaatgaaacaagccatcgaagacgatgtgtttcccgatgggacattcatacgtaaaggctcacgggtttactttgcgacttacgccatgggaaggatggaatccatatggggaaaagactgtgaatcattcaaaccagagagatggatccaatcaggga

SEQ ID NO: 30132 - DNA, 1375 bp, Arabidopsis thaliana landsberg
ctccttcacgtagtttatagctcctcctactatcgacgcttgatctccctttaccaccaaatcccggtcatgtcagatcatatagggatcataaagattgaaaaaatctgtgaatgtataaatatacacacacacgtgtcattgctagttgcttaagtttattacaaaaatgtgctaaaacatatcccaatattctgaatcatactcgttctaatttttggtgacacataatattttatttataaaaagacattaaactttgttacagcgaagattattagaatgtatatgaacgcgtcacccttccatatttacggtggattttctttgtaatatattgtataaaaacatcaatatatattctcagtcattttgattctattctcttgtgctaatatattatggagagatgaggtctacagcctagcaagtaatgaaacaaagacacatatacctaagaatgaccctgactaaatgatgtatagcatttataaacattgaattaggaaggtactctttgagcatacgacgactgtattagagaacggagcacagccagatactcgttcatctgtttccggcgatttctctcgacggcgatgtgagtcattctctggttctcgatctcttccttgttcttgcagtttctcgttctcctcctcttcctccggtgctgtggaggaggatgactctccacatcaatggcggtaagaccaagctcttctcccaacgaagggatcaacaaaggatactgatgatagtctcgccattgatgatcgtcctccttaccttgttccacaaagctctgttcatgccctaacttatcaatgttgttcttcgtatcttgagctacgaactcttcttgagagtataagtcgtggaacataaaatctttgcaattggagagatatccgaatggatcttgcgggtatacgacagcctctaagggcattttttagccggagattgttgaaaagaaaaattcagaattatggaaaaaataagaaagattgagaaaccgagagagggagagagaaggagagaaaacaaaatttagacaggaagagtttgtcgctctcctttttgtctcgagggggaaataaaggcaaaagggttaagcccactaaaggaaactaagcatggtattagttatatgaagattttttgtaaattgatttacaaaatattaaattctcaagaactcaccggcatggaggaagaataggagagtgaatcttcaacaaaaataaatatacaaaagaaagatatgagagtgaaaaccgaaatatgaggatcaaacaaagtggtgtgatttatttaaaaaagggacttgaaaagaagctttgtgaggctaataaatttttttttttttttt

SEQ ID NO: 30133 - DNA, 505 bp, Arabidopsis thaliana landsberg
  unsure (1)..(505): unsure at all n locations
ctctggacgtggaaaggaaaacggaaatcttgatactgcgccaagatattccagcaagacgatgactaagaaggttatggctattgagagagtcgcatctacgtgtgggattgcatctcagacagcatctggtgttctgtcaggttcgggtgttttaaatgctagacctggaagtaccacatcatctggtttacttgcccatgcgctgagtgcagatgtctcaatggattacttggagaaagtggctgatctgcttcttgaatttgcccgagctgaaacgacagtcaaatcatacannnnnnnnnnnnnnnnnnnnngtcgtcttttccagatgttcaaccgtgtggaacctcctattctgttaaaggtacttcaaaatatattttttggttttcttctctgacggtgcttcatatactctttggacaagcttggatgtgctggttagaggatcttcaggtcgtatgcttacaataccttttggttgtccagatactggaatgca

SEQ ID NO: 30134 - DNA, 1968 bp, Arabidopsis thaliana landsberg
ggtttatctttgaaataagcagtggagtcaatcggtttacagctaatgtcttattgatccgatatgatttcctagattcaagaatgagacaggattagactaaagaagcggcaacttcacttctacttctacttctaagtttagctgtaattgtctcgtattacaacgctttggaaagatagatattagaaaggggagagatacatacgtgataatctttaagaatggctccaatatgtgcacgaagtgtctctctgggcagctctggaagaagtcaactaatttctgaattgcatcttgcttgagcaatgcctgctctaccttgcggttgtcattgtcttgcgccaagcaaacagcgattgaatctaaggctatcacggaccagtattcatcatcgagtaaactcaggtaaacatccagaccaccgtgggcccttaactgttctcttgaatttcgagatgcatgagccatatcgcagagtagtggcaatgcatactgtttcagaggagaatctgacataatgaaaagcatcagatgcggaatgattccgttttcagccgcttgttcctgcctcctcttgtttatcttgcacaggttgaatagtgcactaagcacctacataaataaacgtttaagaaattttaaacttcaatatttcagataccatactggacaagaggttgtaaccaacaagccaatgatatctatatgaaagtcaagaaggtaacctcatgatggatctgataaacaagatgcccatccttaagctcaaggttggggatcaaatgcttaattgcatctgcacgctgcagattctccaagcaatttggatcagttgataaatgatttgtgcactccagtatctggaaatgaaaggcattgtaagcatgcgtcctgaagatcctctagaagaaacatccaagctcggccagagagaaataaagaaacttctgagtatatgcaagtacctttaacagaataggaggttctacacggttgaacatctgaaaaagacgactgagtaagctttggctgcacatatatgactttactgtcgtatcagctcgagcaaattcaagaagcaggtcagcaactttctccaagtattcccttgcaacatctgcactcagcgtagagaccatatgggcaagtaaaccagatgatgtggcacttccaggtctagcgtttagaacacccgaacctgacagtactccagatgctgtctgagatgcaatcccagatgttgaagcaactccttcaatagccagaaccttctttgtcattgttttactgggatatctagtcgtagtatcaagacttccattttcctttccacgtccagagacctctgatgaaacaatgtaatgataaggtgtttacaaaaaaatcatatatgaacactcttgctaaacatacaactttaaaacctacctgcaaattcagccatcagaaaatctaggtctccgttgtttttcttttcatttgatccatgcaaaagaggaagtctactttcatgtctctctatgccagtgatatgcttaacataatccagttgaccagaataatgtcttgaagggggttctttatccaacaagctaagcaaaggtcgaacttgttctgtctgagtaacaggaaaacaattagaggcgccctctgccagcttctgaagcttatctgtcgatgtcctattggcggaaagagatattcgatgctgttgtctaacatcttctgtgccagaggttgaggcatctggtgcaacactgcttactctaggcttatcaccatctgggtgcaaagcatctggttgatggacatctgatctttgagaatttgaggttgaagcatgagaaggctcttccccacccccatgcctagttttcaatacatcaggctgatcaatcatactgagtgaagaagtctcattttgaccaaaaataggattgttagggtcacgttgaccagagagca

SEQ ID NO: 30135 - DNA, 3836 bp, Arabidopsis thaliana landsberg
gaatatttgtgtaaacattggattgtttataataatttactcatcaaattcccattggagttcatttcaaatctttgtgtcacatagtcgactgaaactccattgaaattcaatttaaatctgtgtcaaataaacaaataagtcttccaatggaatttatactgcaaatctttgtgttaattatgcaaagaagttaattcaaactgacaaactccattggaattcattgcaagctgatttatcttagagacgtccaataaagcaagacagggttgcattgtactaagctccaattaccaaatctaaacaccagaaaccgcaatatatcctggttgggttttatacacaacataagataatagtatcatttggttcatcaaatgaattcagttttagttacaatcagatagatacagagtcattgcggacctaaaagcgagagggagcgcaaaccaaacctacttacgcacatgacgattatacgggtctatgctaaaatccttattgatcacttcacatctgcacctgacatcaagtgaaatggatagtaattataaggaaaggttatttgattttctaggttgcatatgtgcgtgtatatatgcaatgctgttgtctaaatgagttacaaaaacctgaagcacacatacaaagatgttcaaaccagcatgaagtttccaattccacttctatatgtttctgagggcatacagcagagtcagcagtaaacaattctcagatacttcgttaaattaacaatatttgtatacgtagctagtggcttcgttaaattaagaatagattgtctcaaaaaaaaatagactgaagaattatgggtaaaaattagaacctgacgagtgtacaactattcatcatatgatacatcaacttagatgaaagccaacatatgactactacactatcagccattacagcaagtgtgagacctgtcgctaataagagccaatatatatgactactaaactgtgatttatgtatgcataacaaagtaattgattttaacagagatattgattcaggtaaatctaaaacgagttagtgtcaaatctctagtggctttgttatcaagaatcgaaaaaacgtttagttaccaaacctagaagactatctgtaatgcaccacaatctaaaccaataatcaatgcttcctcattagaatctaggcctagcaaatgagaattatgtatcgaaagagaaactctcacctcaaactctaaggagctgcattttgttagcaaaagcaataccaatccaatcaggctgcgaagaagaccactgcaactgattaatctccgaaccagccgaataaaccgacatcggatcaatcccattgggtccagcaacagtaggaagctcccaaataagagcctgtgtatcatcaccaccagaacaaatatgtttacagctctgaggcgcccaagctatagcattcacactagcctgatgtctttcaagctcagcaacaggcatagtcggcgaacgaatatcgagaatcacaaccttattagaatccatcaaaatcgtagccatatatctaagatcttgtttgttccaagcaagtcttaacaaaggcgtatcaggctgaggactctcgtaaatgattgtagaatgttccttatcacgtaaatcaaagatcctaacggatccatcagcagagactgatgcgaaaaccctagcttctccccaagcaatgtcatgaacctctttatcatgagctataagctgagtctcaacaacagacttctcaatatcccaaatcgtacacgtcgtatcaatactacaagttccgagacgtttcggctctacatcgttccaatcgaaggaagtcaacggcgcacaaaactcgctcgttttgctgttgttgagaaccgagattggctcgacggttgatgaatcttcgttaatttcccaaagacggaggaaatcgccggaggaagcgaggagatctccggaggaaggacgacggagagaaggaggactgaacattagctttgttggaggataaggatgctcgaaggagagattcgggagaggcttaacggtcattgaatcggaatcgaaagagagaatgtcgatgcggttgttgtaatcttcgaggaagcttccgacggcgattctgtgaccggaggatgagcggagagaagagaaagccatggcgtagagtggatatggtgagtcgtatgtgacggcggtttccgatctggataacgaatctggagctgaattatccatggaaatgtgtggtgctgattcgattcgagatttggcttcttcacgacgaaagtgagaggagagttttgaggtcagtgtcagtcggatttttcaagagacggagaaataatcaatggagacggcgtagatataaaccctctggattaatcagtatcttttaatgtatctattgataatgggcttctgtatattcagataatgggccttttattttaacgttacgagctatagaatggcctaattattggatcactaggatgacatgaaacactaacaacattaatatgtgacactctaatcattttactaacaattgtctaattcagctaaaataaattgtttgtgattaagataatcaacaatccttttttattattattattaagaaaatgtaaaatttattcgaaaaaagcttttaacattcggtaaataatttgcatacaatttttcaagaaagttctactcccctttagtgtttatattaaagcaaaccaagcttccatgcattcatcgtagcttctatctccttgttcacgaatagagaagatccagattcaaatttgtttgtcaatatttggaagcagttgcgccggcggtaatggtgcctctccatgtctcgtatggttgctctctctccatatggaataaacgcgatctcaaaggtgtaacgtgctaaaaagagatttagtcttcccaatgacgtgtctgtgagggttctttcaacatcactccaccttgcaagtgaataataagcttagttagtctgctaatctttatctgaaatttggttgttggcatttatcataagacatcaaagttgtaaatttggagacaatataaatctagcattaaacacatgtcaaatggaggatttatcaagtggtaacataaattcttatcataatctagcataagtcatgaatcaataaataaataataaaaactaaccactaaatatgatgaaaagcataaacataactaaagaatataaataaaagataagagattaaaaggtgaaaaaatcttttactaattggaatgagaatatgaagatcttgatccaaaatgtaagaacattatatagatctcaaaatttatgaagggagaagaaaacttaggttaaaaatgtctaaagcttacttaaataagaaaagattcaaattaaacatgactagaatatgtgtagaaaactcgaaataatgttttttaaaacacatttatgggttattacgatttttctgtaaacaatgacagaggttcaaatttagaggaaagggacataacgaaagacgccctactttgacatgccctacctgcttcaaccccaaacccacgtttactccaaattcttactatttgatattacatcaatcaatacaaatagatacattcaataattcgtacatactcgtgatattcacttatttagaataatagtcaatagttcatactgcaattaataaattagcccattgacgacaaaaaaaaaatgagctcattaattagctacctagtatattatcttgatcaaatgttggtaattcaattagctagttcttggggagaataaagtatggaagaata

SEQ ID NO: 30136 - DNA, 3711 bp, Arabidopsis thaliana landsberg
  unsure (1)..(3711): unsure at all n locations
actctatctcagattttgccaatcatgaagaaggaccaagaggatacccgtgaaaatatttcattctactatcaacagaagctcttgagagggtttttttagggctagaaactgtatcatcatctaagctaagttttgtttttaagtcatctggcaaagcctgtaacatgaccagggaacatatcaaattaccatcatgacaaaatcaaccggatctgtgtgtattaaaaagttaaaaacaactcataccaaaacatcattcacaagcctctccagctgtatctgttcaatatatgtatgtggaacatatgaaccttccagtccaagttggtctgccacatttttgacaaaggtacggtctttaccttgtaccttcaaaatagagttggacaaacttgatcattaatgtcaaaataccactctaaagacagtatatacgttttgagagacataagagaagcagatcttacctgtacatatgtccgattcagttgttccaaccaatcagttttcacaattaccttgtcatcatcaaagatatgactctttcttttcaggattgttgcaatggtataacccagtgccattaatcctccgagaagacgaacactaacttcaaaagttattctgggtgatataataaatggacgatctgtaacccactcctaagaacacatagaacggtaatcattcatcaaattaataaaccattcgttcagctttgatatgatatggtgtttacagaagaaaaactagtctggacaggtattggccaaacctcaaacatgagattgtattttccatctcggttcctcattctgaggtatgattggcatgcttcaggatcctcgcctggtggtaacagatagatgtcataagtttcctctgtacgttccttgaaatcttcagatagagctgccttcatttgttcgggtgttacagcctttgatgactacagtaagataacaaaaatcactccaaccgggaaagtattgctgctatagctagttgcagattatataatatgctacgatactacacttatgaacaatataaattctgtaacctttaaaatatatgttgggttctgaaagccactgaatgggttgaacttattaaggatcttaatctgagctgtcttcagatcaggttcaataaacgccttgtacataggataaacctggttggagaaaaaaacataagcaaaattttactgtaaaaaaaactcaaaacatccagtaggagtaggagacatcgtttcatgttttttccatatttgaagcaactccaaacagcaggcatgacagcaagggtgattaatctgggctaaaaaataaaagatagcaaagactagcatgaaaaccgtctcagatatctgatggatnnnnnnnnnnnnnnnnnnnnnnnnnnnnngaatgtcccgcaaaacacgcttaacaagatcaaaatgcactccaccagtgacagagacacgaagatctagcaaaggccgtagcttctcactcaaagcatatatgccttctagaataacaatgcgagagctaggcacctcaagcgttctatacaaagcacgaagaaactgataagtcattgcagctgtgtagctcttatcaactaacaagtggttcccaggaattcaagtataacgccgtctgtccacaagtttgaaatagtagtaaatgcaccaacgaagaatatatatacctgtaacctattcgagaactcgacttgaagtcatatattggaacctgaacaggttttccatcccttagaccatgtatattgtcaagaagtgtatcatagtcagtcaaccttggatctgtaacaaaatataacagaatcgcaaatgttctttatattcagattatatatacataagaaaggaatgattgaataaatccataaccagaatccagaagggtgaaacatagaggtgcataccatcaaagtttccatcgataacacgagtaccatcattatagttgtccatgttaatgatagcaatactaggcataaaattgagaatcttctcagtgaaaatggttttgccagctccagaaggaccagctaacccaaccaaaatgagcccatcgttcttctgagccaataattgacaagcacgaataacagcgtagaaacctttttcaaaagacaatggatcctctattggaactatctcatatcttccagagtcctttctttttataagctgaacctgatctcgcaacaagccatgccgccggcgaggtgacagagcaacagaactatcgagcgccattgcctcaaagttgcaaatgaagaagaatatctggaagctacaaatttcagacaaagacaagaatttgagatttttaatttcatacgagtgagcaaaaaatgttttttttagatcaatacgaacagttacctatcaatccacgatataagtctaatcaaatcaaagcatgagcagaaatttcattcaatttaacaagatcgatcaatattcatcagaagctgtggaaataattgacatgcacacactccaaatgtaagatttgagctttaatattactgcaacacgacttttaaaacacttggctaccacgatcaatacgaaaaatcaaacaaatactcaacagataacatttcgaatctgatcgtaaacaaattagagacgaaaaagcgagaatctttaaacaaacttcacctaacggaagaagagtcaaattggggaaaaacgtcgccggagattattccatattttcgggaaacccagaagcgatagtaagaatatagttggagagatattttcgtagcagtcaatgagagtaagaagatgatggaaggaggaagacggaagctttaccagaaatcactagagagatcaatcagtaaaccactcataccagattcatttgaaaattgaattttcttcggttattgattgagtcacctggtttatccatctttgtaccgaaccgagacatatacgatataaattaaaccaaatttggtttatactttggttcatattgctcttatttacgatgaaccgaacgaaaccgaaattggattagtgaaccattgcgagccgttagtccacgtaatgactttgaccgtcacacgtcactcacggtgaagcagtgacgacgtggaagaaactcaatctctttcttcttcaccttttttctttttcttcgcactggaaaattccgcaggtgagagagagaaacaatggcgaagctacttcttcttcacgcgcctcatgtaatacctaggtttagcagcagtagtagtagatcactggtctccgcagcggctttatacagaagacctctcctcgtgaatccccaattttcccatatcggacctcgtcttcattctccgtacaatcggagattctcggctcgagccttcgacgattcacctgcttcctcggcggagatggagaaagagaaacaggaacagctgctggatggagtttctgggaaaaaagatgaggactatccgaccggagaaatggagtatgagaataggaacgcgtgggagatttttgttgtgaagtttcggatgttatttgcttatccatggcagcgtgttcgtaagggaagcgtcttgaccatgacattgcgcggccaggtttcgttcttagacgctgattttagtagtaggactgtaaatttgtggttccggtagcatttatagtgaacttagttgactcggaaggct

SEQ ID NO: 30137 - DNA, 1968 bp, Arabidopsis thaliana landsberg
gatactgatgaagtcatcgaggcatatgaaatctttttggcttttggttgcaatcgtgaaaagttgtcctgattgatttttagactagaatgcctgggattattacagatttcagttaacgtagataagtatctctattacattctgcacatgacatgtccatgtctgtttaaacatattctattcatgttccactcttcctcttttttaaattactcaagaatggttcattttgggcctccagccgagaaattttcactggagacgcccgaagtgtggtccacagataataaaaactttgatagatggatttgtcagcttgtgtactgtatgatcgctttatgtgaggatgtcccaataaggtatctatttagttccagtttaccatagttatctatttaaagtatacaagtaaaatcttgcactgagtggatcattgttgctgctttgtttgacaggttatgccagaacatagcattgctgaaagctgaaatctctgagcttctattccctagtgttgttgttagtcttgcgggacggatagggatggatatcaatttacatgacttaattacgtcacaggtatctcatgaattttttggatataccaataatgcttcttttttctacttgcttgcattgtttcttctctggatatctctgtttttcgagtcaaatcctcttctcttgtgttccctatttctcggttctgtctttattagagatttacttactttaatgttgccatcttgacctcttctcgacttttgtttacaactgaaataattttctttatagaactatggttgttgtttttgttgatgagttaagcattatactcgtgatttgctcattctagttgtatactgtaaggtaaatcctctagcctggtggctgcgtcatgtttttccattagggtcgtgtatgttgcagaaacagataatttagtggtcactttggctaaagcttgtgatccccattggcaggtgaaagagcatatcttcactgattcaaacaagctaacaaaatcgaagcaagttatgttaaatactctgaatgaactgcggatgtgttatgtcctcgaaagatcgattttttctgggcaaacaaagagagaaaaggttagggtattgatttcatgactgacctgtttgctgtaatgtttttaagttcttgagaaaaatggttatcctgcatatcaataacagagaaaattatgctatccatgggagtgcttaaagacattctgctattctattttttctttacagtgaaatctgtatcatatgggattttcttctataaaagatccggataatatatgagagatgaccaaaactaacgtttggaatgctcttacagaattcaagatcttgttccacagctgctaagattagagatgtggaaagtggatcaaatggaatggcagcgtccataactactaattgggagaaggtgcatattagcttcaattaccatatgcattgttaggacgatcagcatttctgatccatgcaatgtctcatgtgtctggtgttgtcataaatcttcttctcaaagtgtttttggcttcctgctaaaattgcaactatgttttataggtgtgatatgtgataggtgtcacaacctttagttttgttgattattagatgccttgttatattttgtatttatgtcatatatgaagaattgattactttcaaatgatcaacatgaggtttagtaacttagttttatagtaaaaccatgcaaaaagaatttcaccctgtcaggttttgctacttctatgaatgtcattttatgttgatgttttaattcatttttctattgaagtatttttgtatcatttctatggcactagttctctaatcagttatacctcttgtttcttttaaaatcttcataatacagaatgacttttgttgatcaggtttattggctttccattgattatcttgttgttgccgg

SEQ ID NO: 30138 - DNA, 3965 bp, Arabidopsis thaliana landsberg
  unsure (1)..(3965): unsure at all n locations
tatacttcttttttgttgattttttcctcataaattatgttgatatatatttgatgctcatgatgaggagggagttcatattgattagagagatgtatgtaataattaaaggcacatattctatcaggttcagagtcaagttttagggtaggttttgtcaccttcctaggaacctaagaccttttgttttgtagcacttttgagaacttttaatagatgacttaaatgtgtcctgactcctgaggcttcctatttggcgttgttctgctatgatctttgttttcagaggagaaagggaagtttgatgaggtggtcgaggagaaaggtgtaaannnnnnnnnnnnnnnnnnnncggtgatgcatgtgattgggacagagatggatttcgtggacgataagcttaggtttgtgccctttcacgtgccaatcttgacactctctttattcatggtaaacatgtttgcattgtattggcacaggtctgagtttgtgttcgtcaatccaaacgcgacaaagtgtggatgtggtgagtcattcacgacaacatgaaaggcaaaattacacatataacataataagacatatataactctattactctaccacagtagtcgatgaaatttgctttgtaaatacaactatcttaaggctgtcttccgtgtaggttcgcaatttgcgacgtttgagatgatttaatgtaatgtgaataagtgtgtgtggaaatgggtttcgtttctacgtattactctggatttcttacgacttcaacaaaccaatgaaattttgacatcaaaaataactccgacataaaaattggccaagtcggaaacattttacgataaataaaaaccccacactgaagcctggtaaaaaaaagtgggtagaaatgtgagtgtggttgattactctagcccggttaaagtcagccactttaaaacacaaacatcttcctctacaagattctcacactctctctctcactcacacaaaagaagaagaagaaaagattctggcaaaaagattcatcctccattcctcctcctctgacgatatcaccgatcaacagctcggagattccacttccgacggctgctacgtcatcaagaaggttgagagaactgtgtgcaagaagaaacagggctggcgtggtaaatccatcaagacatgccaaacatccattgagatccatatccattgtcaagccaagtaagcatttctgttctctcggaattgagagttttctagggtttagagtttacttgattcgtacgggttattagtgattttagagtgtttgattttgtaagttacatgattacagagtcttccaaaccaacacggttgacactgatcaagacgatctcagtgctcttccgaaacggttctaattaattcttcgacttaatcttaagaaaatttaccctactttcaatcactaactaacttgtttctcttgttcttgattgttgttgttgcagctagaagaggaagtggagaaggtatatgactcgagaagagtgtgttccacagagaatgcaatagacaaatcaacatgaagaagacaacactctctctctctcacgtttactttgttccttgctctttctctccttgtattactgaatgttaagcagtactctaatgtaatttgcatcttgatctatctaggttactaggtttaactatctgacttgtgtcccgagtatcttttgtcttgcgcattgtgtcattccaaattaagactcttcatggtagtgcacagaaacagagtgtacctaaatctacaagtgagcataacactcgttatattttccaaagattgatgatgttgaaacacagaatcactttctttgttcacagggaacactagtaaagcagatcagatggtgttcctcctaccaacacagaaaacatcaaagtataaagattctataacctcattcctcaaagacaaaacaacaacgtagaaaatcatcagtttttccctcgttctgtctccgacttcttctccatcttcctattgtttgtttagagtggacaactcgggttcctcatcaatgtccgcaatctcccgttcgatttcggcaatttcggttgtgcccttgacttcaaactctcaaaatactgcaaccataaaccaacaattccattttgtagttttcttctgaccaaaatactgcaaccatcttagtaatgcaaactcaataggtgtctttacctgttgcttactcttcctctccaactccgccttgatgaaaacataacaaaggctaaattgttacaaactcactttcacaaaaagaataaactctttaacgagatgagtaaatatataccaatgcatgttttagctgcgcattctcttctttcaactggttaagttcagcttccaattccactgtatatgccttcccaaaacaacaacaacaaacattagatttttttcaacaagaaacatcataaaaggaatgaagaaggtctctatttacttgttttcttgctctagatctagcagcagactcgcggttcttgatcatcctcctctgtcttctctccactactttctccactggaccatccactactcttttccttccccttagccctcccatatctactccatactgacctcctatgttatccacttgtccatgtcctaatccatctgaagacaccgggcttaacggtccaaccattcccatttgctgtccacccgctccaaacccaacgccacctccatagcaaacacctgcctgaactggtggcgcctgctgataccctcctcctcctgtccttttagcataacctgatgggtcacccacacccatagcttgacccgggaatgaaggatcaccggttccttgaaacacaccataaagctgttgctgtgcagctgcgggtattacactagacgggttttggttttggttcgggtttggattaggtttaggattagtgggatgttctctaaccacaccagccttcaccaagaaatcctcaagtgtcatctctccaaaagtcggttgtctagccgcagtctcaccgccgttctgagcattgttctgtccattactactactactacgtccattgctgtctcctccattaccgctaccaccacctctatgtatctcagaccaaacctcatcaacagtcttcctacaaagcggagctggaagtgtcaaagagccttgtcgaggaagactagactcgttcgctatccctctcttattgttagcatcttcgttgcctctagaaccaccactaaagacaccaacaccaccctcgcctccattgttattgttgttgttgaaaccattgtgattagccggaacagaatgtgaacctgcagctgctgctgcttgttgttgattgttattattctcctctgcgttccaaatagagacaagaaactcgtccatgttcatggacccaaagttcttgccgttctcacataaagcatgttggaactcgtcaagggtcaatgagtagatagaggattgtcttcccaaagaagtaaacggatgattctcaccaccacctcctccattatgtctcgcttgcgccatggacgactctacttctcgctctgacgtcaacttcgtttctctagttaccatttaacaactgcatcatatacacaacaataaccatttttatatctgtattcacacaaactatattgaaatatggataccacctaaacgacaataacaattttgtctcttatatattaaattcatcgtattattttgaccaaacttcagttacttgtccctgttcagctattcacgaaactcacttaatagttgtcccttattcaactatcacgaaaaaagacaattgaattatttgataattgatgctctcaaagaatgaaataaattattttggtaaagtggagtttaaatgacgtaaaaaatattgaaataacaagaatgaaagaaggtaattaagtcggtcca

SEQ ID NO: 30139 - DNA, 2189 bp, Arabidopsis thaliana landsberg
  unsure (1)..(2189): unsure at all n locations
agatgaatgttccacactaggggtggctaaataatttttctatcgtaatgttaagatgataggcactactgcatttttggtagatgaagggtaaattatataagattaaaagtttgaggattcttttgcaattttcccatattagaaacgaaacatgttctcttctcaggcccaataacattttttgttaaatctttgattattaaagttaacccatcttggaatcaaacacgaccgttaaaatcagaaaccttggttttggatatagccagccatggtgatcttatctctcgtctcttgttccttctccgttttctcaccgccgattagtctccggcttcatctcccgccggtaacttctctctgctcccatggaaccttccctgcttcttctacatttcggtctcagctacaaccattgcttatcagctgcttaaatcatcgagaacctgctttaactttccgatgtagctgccttagctctccgattgaatccggaagtcaaattggtaggtgaatctgactatctgacatttctctgcattcatttgttctctgaagcatatttgcaaacacttggtgtgcgttaatgcaaacacttgtgtgcgttaatgcaaacactaagtatctctcttttgctttgcagaatctctgttttcgttattccgagatattgggtttatagaagaagaaactgagatgattttagcgaagaacccagatataaagtcgacatctttggataaaatcggtgctcgtgttgcttctcttcagtctctgaaaatcaatggcttcccgcttcagggtttgatagctaagtgccctaatttattgacttcagaagaatttgatctcgttattagtttcttagttgatgaacttgaaggaaggcttgatcctgaattagttgagcgcttactctctgttgtagacacatctatcttgcttagttttaatcagaaggtgagattgcttctcctccatgggatacctaaagaaaagatctctcatgtattgaacaaagtgtacctaaataaattgctgtatcagaaatcagttgaagatattgagagattgattagtttcttggaaccttttggtggaattggtataattgctaggcggccagtgattctcaatagtgacttggatagtcagttgattcctagggttgatttcattaggaatctaagcggggaagacgatttcgctactggaacggtgctacgtagacttcctgccatattgagttatagtgttgagcatatgaacggccaagtagagtttctcaagtcttttgctggcttgacgagtgagcaagtgtttaagattgttcatgtgttccctaatgttatcagcactagtaaagagaggaaactgcgcccgaggatagagtttctgaaggaatgcggctttgattcccccggcatgttcaaattcttgagtaaagcaccattgattttagctctatccgaaaataannnnnnnnnnnnnnnnnnnnnnnnnnnnnnnattggatataagcatagaacaaaggaactggcctttgcgatgggagctgtgaccagaacaagctctgacaatatgcagagggttattggactgtacttgagttatggtctttcattcgaagacattctagcaatgagcacaaaacatcctcaagtcctgcagtataattatacttctttagaggaaaaactggagtatttgatcgagtacatgggtcgtgaagtcgaagaacttcttgcattccctgcatttcttggatacaagcttgatagcaggatcaagcatcggtatgaagaaaagttgaagagcagaggtgagaacatgtctcttaacaagcttttgacagtatcagctgaaagattctctaaggcggctgataatatcgaaatgatttgtttatgaccaagtttgagttcattgagaacttacatcaatagtttttatcacaaattctcacttcgatatcaacagtaatactctaactgtcttgattttatagagttaagcttttcattatgtaaaacccttacaaactaagtagagaacatgtcggtcagaaaaacgagaatattgcaaaactggagcactaaaaaggatccgagtaggaaaatattcaaagcaaactctaccctgcctggattttattggagcaaataaataagttgggcttttcctga

SEQ ID NO: 30140 - DNA, 2268 bp, Arabidopsis thaliana landsberg
gtttgtggtggtcaaataacacacagcacataactccaaatgcaatcgtttcatctcctgatagaaatgttgttatcgcaaagaaatgctcggtttttcccatagagtttgtgggttagtgtgtattggatcttgatacagagtaccttgtcagacgcttccctatgcagtctctatatgctttagttctaagctggtctcttatgtttgttatttgtagttagaggatatgtgactggaagtactgacacatctttatggacggtgtacaataaaggtgttcggaactactgtgggaatgagctctcagatggtacagtttctttattgccatttattagttgtcttcttctttaagtgcatcttagaagatcactgatatgctgattactaaattatgcaggattagttaaaaaccagaagcttccagctaatatacttacaccaacaactaaggctgcggatcatgatgtgcccatctctccaaatgaggtctaataaccctgagacagtaaataaatgtagaaactatagaaaagtttttgagtcatttgtttgctcttcttgtgatcttagctgtaagacaagaatatctaagccacaattgtgtagttctgtgtttcttctaattctccagatgattcatgcagatagttgaaggtggattcatgactcaagctgaatttgatgaagcaagtatgaaagctttgagcttgtttgagtttgggcaggttagttacaactcctccgtctaaagccatagacttttgcgattttcataatctttaaattgcagaccacaagaaatcagttttttgatatatttttgctggtttctatattcaaatgttgtgctttgttggaaggtctaatagattttaatatatcatgcttgcttcagggggtggccaagaaacatggactgatattggtggacacaaagtatgagtttggaagaagtagtgatggctcaatcttattgattgatgaggtctgttatcttttctcttcgtttccatgtctgtctctctttgaatgcaaagttgaacacatatctgcactactgccaaaatcactgattagaatcatcatccacttgttcacattgttcatagattcatacacccgattccagcagatactggcttgcgggttcatatgaagagcgcttccaaaaaggcctggagcctgaaaatgttgataaggttagtgattttgcctgttttttctctcagtcaggtttcattggtttgcagtactttgttcactcacatgttctcgtttttttaatccaaataggagttcctaagattgtggttcaaagagaactgcaatccgtatgaggacgaggtatgcttacatcttcacaatgtaatttccatttttcctgctctatctgagaacccctgctaaaattcgtggtgtctcgaacgtcggtaattgtcaggtcctgcctgctgctccagcagaactcgtgactgaattagcttggcggtaatgtattttgatctgtaaactttataataggattgttctagttcatgttttcgatatggaaagaaacattgtgtgtacatgctttaaggctctgtgagatcagagattcgctggtctacgttagttttcgctatagtcttggtattgaaaactgatgcaagaaaccgtgatggcaggtacattttcttgtatgaaactatcactggatcaagaattgacattattccgactcaggtatgatcctgatcaagcccaaaatatctactttatcaccctcagtttatcggagtttcaagtgtattgaactctagctttgttgacaggaaccaatacatgaccgaatctcaaggaacacaagccaagcactttcatctctccgtcaactttgatctttaatgtaacctttagccaaggatgcagagagcataagtctgtttctttttgcattcatatgtgttctattgttgtcttcatggattatgaatcaaagacaacttaagttctaattgagcaacaaacgaataaacatgaaaaaaactaattgacacaggcttggtgaattagaatatatagttgatcagatgagaaaggatcagttttgcttttgatctcccatgtctataaacaagatagtctcactgaagacgagccaaaaaaaaaagacattcatctatattgacaactgaagtagccttggcccaaaccagggcttgggacccggttaaaaggtaaaacaatcatccgatgaacagaccaaaaaatttaacactt

SEQ ID NO: 30141 - DNA, 2530 bp, Arabidopsis thaliana landsberg
aaaacccgtttccgtactgagaacttcaggaatcggaagctggggcttagggtcttcgagaggatcctttggaggaagcttcttgctctctctgactcgttcagtaccactggcggagcacttaacccttgatttgataagaggattgtggtggtggtgggggaagatggtgtatacggagaggaaaggttgtttatgtgagaagataggagaggagacgaattgattgtggggtctcaaggtaagtctcgccattgttggtgtcagagagaggagaaggaggaagaagaagcaaaattgagaatgaagaatgattccctgaattgaagaagaagagggagagaggaggacacggtggaggaagaagagagcttgtggctctcactgtggggctgtgggcagtattgtcttcattgtgggtcccttttccttctgtatcaaaagcttcctttgcgtgattctcttgcttacactttttttttttttaatgactactatataaaaattgcaaaaaacattattagagcattttaatttttaagataatgatttaggatagtataaatatatttatatagcagccactgttagtaatttgtcaaaaacaataattagtaatatttgttgtagactaccaaattgtgccaatttaaaaaaaaaatgaaaaaattgtgccaatttacttgtccatagctaataagatgttatcttttctggtgctagagttttgcttcttaagtttttttatttaagaagatcatacaacatataaaatgaatgttgttgtagatcttgattttatcccgctctattacaactattagagcatcattaatttactaatgatttgggatagtctataaaatcaagaatctaaaaatcaaaacatcttgtagatgggcttcatatctgttggattatataacccaaaattttgttcggttcccgctggcttttgattctcattgaacgtcgcaaatagaaatccactaatgccactctttggtctctttggcgtccctttaccgctttccacatgtttaacaaaattggtattgtatatagatgcgatatctggagtcgttaagtttccgttaccagcagatggccatccagtttctgttaccaccattggtaaatccttcacaccttctttctccattgcccatacgaacgcatcaaatatcacatcgaacatgtttgtataaccaagtggcccgtcttggaccacgaccttgttggtgttgaagatggcatagtcgagctgaatgttgataggatcagcagcatatgcgaagtaggggtagatgttgacgaggataggcgtatttgtttgagacaaaaacttcagcaccggggtaagttgttcacgtgcttgaggcatgaaatctccggccgaaggtggatatgactggccaaggttggtcatagccaccgtggtgctgatcaagatcgggagactcctcgacttgacaatgttggtgagagatttcatgacgggtagcacataagagccgatttcccctgggatgacttcgttcccgacagcaatgaacgtgatgttgacatcagctaagtaaggcttaatgttggtcacgaaccaggtgttaacagcttcttcgctgaccgaaagagcctctaagtcttggttcttcacgcctaccataactccgatattgcgattccctcgaaaggcgttaaggacatccgtagttgtgtcgaagatccgaatattggtaacacttaaggacttgtagaggttgataacttcagatggaggcgggaggttgtctccaaggaggccgtagttcaagccaatgtttgttgctgcgtctacaaagccaacattgctgtagtttaacagaaatgccacgcacaaaaacttcaacaagaacgtctttctatgacaatccataattaaaggcgtgcctgcaaaatagaggataaatttaatattttagtttcaaatcttatacaagttttttttgtatgtatgtctatatagagacagcagatgatcatacttgtatgaagaacgggtacgagctagggaagcaaaccaaagatgtttgatgtttctcttcttttcttattcgttgcaaaacaaaagattgtagatgcatgcaatttatatccatagttgagatatgctttctattttattagtaccactaaaatagtaattttttttgttatagttaaacttttcgtgtctatctttttttgggggcatagtttaattgtctattatgcctattttcaaatttgctttccactatttttgctctatacttttcaaaaataaactacattttatctagacgtatgtagccccctgacattttaaaattataagaattacaccacaaaattaataatattctttacacttgaatttttatgtaaagctttgattttgaaaatagttaccatatacatatgtcatttatttacatttcagtgaaaatattttgcttcatttataaattagtcatttctataatctattttaatgagataaaaaaatata

SEQ ID NO: 30142 - DNA, 1026 bp, Arabidopsis thaliana landsberg
aaatagttatataagtttaaaaaatgatgtatttaacaaaatggggtgtgtttaattaagtcttaataaattcgttaaagaaaccactgggagaaaatgcaataacgttactaaattgagaagaaattaattcttgaaatcaccaaacaacaccacaaacctcaacttgcaatttttataattttatcttatcaagtatcaacgtccttgaaagaagaccaacctcattggtaatactctaatagtctaatggatgtcttaagcataatttggttaactaatactaatcgtcgtagattggttaataaacttaaggtcaagcttccgttaaagattgaccatcaaatttcttgatttcaaatcctaacaccatttagaaagaaagaaagaaaaagtaaatgtgtttttctttttgtcaataagtagtactccttaaaatttaaatattggtaaatgatacactgatatgggagtaattaacctaaagattctgtaaaatctcgtagtaaccaaaaccaaagtcatgcgataatattgattttcccaagttaataaatattttgttactaaatttcgtttttagcagcccaacgagaaaaatatcaaatatccgctttcatcacgtgcattaattaccccaaaaattcaagactaaggaaaacaaatatcacaattaaaaataataaaaacttgatagtatataatgaagaagttccaccataaggcacaattaaccgtcacgagctacatgctctgtatcttcagatttcctaaatacttacaattcccattccaattctgatttggttaatccaaaacaaaaaaaaagggaaactttcttttaccctaaatctataaaaaccaaacccttcttcacaaatctttggggtgggggagctctcttaaaagcttttgtttcaatttcaagggagtgggttcgaggagaaacaattgggttccgaaccttttctactgtcagtacagcgacaaagtctagaaactcccgcgactttcctgcccttatcc

SEQ ID NO: 30143 - DNA, 3079 bp, Arabidopsis thaliana landsberg
  unsure (1)..(3079): unsure at all n locations
gtactctaacttggctagagtgagtgacctgtaacctacaaatctaatgttccaagcttaatggtgcttaaatttctgcaattctgacctaaacagagctaaagagtctgactttcagtaaacaattaccaatcaatcttttgcattcgtttcattgtttcgaaatgaaagcaaaacaagaggaaatcaaaacattttacaaacctcaacaccaagaatctcggaatcctctgcgagaaacagagtcatatggctagtgagattaaacggcgccgtaagccaccgtccaggcggcacattcagctgacctccgccgctacttcccccaagcttagagattgaaatcacagctctctcgaatgcttcagtgttaagcgtaaacccatctccaacacctccaaaatccttcaaatcaaacaccacaggtctcaatcggggaattggctgaatcggtttgatcttaccgaaaattgtgaactttcctccgacaggaccagttccagagccgccttcgatgtaagccgttcgctgccatagaaagacggaaccaaaggcagtgatccagagaaatgtgaagagtgttttgtgagaagcatggagagaagtaagacgacgcttcgggtcaagtctctgaagatgaaattgaaatcgagaaggaaacaaattctccaccatgattcgatttacgaggaactagaaacattgaggttctggttttgccacagatctagccgagaaatagtgaattagaagcaaagatccgtcatgagagttgcaaagtctgtgtcagaagctggtgaagagagtttggtgtgtgcacgatccgattcgattgagtaatcgaaccaaaccggtaagttaaacaaccggtttagtttggttcaaccatttagccaatcatccttttcgacgttttcgtctttagtgatatgataaatcgataagtataatacattaaaagtcgttattaggtttttacattatagtttcttctgttgtccaacgttcacgtcaaatctatatatacatttttgcagccactttgtgaaataaatcctggagttgggatttatttacagtagctgccactgacatttaataattgtttttgataattagaaaaaaaaattttgaattaaatatttgacaatcttcccaaaatctctccacattaactacacgattagttactaaaataaaacttccgaaatagttaatataatttgtatattcatttatattgaatctagatgtattacattaagaattgactcaattagccacatctatatttgaaatcaattaatatacaaaaatagttataggtaaggttctaaaaatagtacaaaatggtcagttagaggagccactgcgattttactatacgcaataaataaatcgaccggaaaaaaaactatttaaaactatttttgattaaaagtctatagattaatgatatatgtgataattttgaactgtttttacatagaaaaatagtgagaaaaaaaggttcaactattaaggttttgttcaccttaaaaatgtagctttaaagactcaaaagcaaataaagataatgtgctactagaacttttgactatcatgtttgcctatgtctttatatatcctatttatggatataaagttatatttcttttcttattttttttccaacgcatagtatttgagtcattctgcctcaatcgtctaagcgctaggcatcagtccaccgtccagatagcgcctagcgatttttggtaacattgattatatgctttaaaaaagttgactgaacaggctggattaaaaattaaattactgtatacagaatatatttagtcgtagttcttgtatgaattgccttaattatttggatacgatattaattaataatacattttttcattttataaaatagtctagtcaatcttacattaatgactaaacaaatttcttcccattgtatacatctatatatttagataaaatcctacaacaatctatatagatgagaaagatgtataacacttttatcaaaaaccaaaaaaaaagtactatagctttttcttaagttaattatgattcctgaagaccctttggtcgaaattctcctaagattgcctgtgaaatcactagcgagatgtctatgcgtatccaagcgttgctactcaatcatccgcagtcgacatttcatcaacttataccaatctcgagcctctactcgtgagtcacgtgtcatgtttgctttccgtgatacaaacacattttttcgctggaatttcttctcgttatctcaaccaccttcttcagttaccaatatcgatagtacttcttattgtatgcctgtttgcgtcaatggcttgatatgtgtcgaacacatgtttcgactgtggatatgcaatcctgtcacgaaaaagatcacactttttcccgattgcggtccccgtaaacaattcacgacatggtatatgggatatgatccaatcaattatcaatacaaggtcttgtatttgtcaagagaacatttaatagctccttatatagtggaagtgttcacatttggagatgaaggttcgtggagaatgatcgaggccgatgagaatttccactctccagaaaccagaggagtatgcacccacggggttctgtattatggtgcttatacgggggatggagcgaaaattgtgaggttcgatgtgaggacggaaaagtttggtaagttcattgaaatgccggccgaggcttgtagtattcatggtgtctatttgggtctctatacccttttggactaccaagggaagttaggtttacttgctacacaagctacaagcacatatgatttatgggttttggaagatgcggagaaacatgagtggtctaaggtttctatcttcataactcgagagatgtgtccgtatgatcttatttggccaggtgtggtgggttttgttgctggtagnnnnnnnnnnnnnnnnnntgctcgtgatgagcttggtcagtttcatattctctatgttgatctcaagaagaatcggtcgagggaagtttggttcgaagaaatcacaccctcgtttggatc

SEQ ID NO: 30144 - DNA, 1773 bp, Arabidopsis thaliana landsberg
atttgctatttctgcaagaaatcactcactaactacatatcgttaactagtcatagtagtttaaacttatataacccctttaatataatgaaatagtttgacgaaaaaataaccaaataaatctctagctaatagtaacaaaggaagtaagaaaaaattcatcagcaataattgttggtaatcaaacttatgtaacatctttaatattatagtgaaatgacttgtcgacgcaacttatatattaaggttcattatataataagataaaactttagtgttttattacattctttgacattcgtcattgactaaattttttaaaaccacacttgacatgaatgttacataacaaatgaagccagagtactgacaaataaatattcaatcacaagataatgtcaactatcaagttgttttgacattctcatggccgtgtttgaaagtcgccgcatgaagcgctgaccaaacccaaagaagaactaaatccaaaagcagatcttccaacgtcaaactccaccaaagtattttccatctgatgtattcctatcatcaccgcctgcgccgccgcatctcctccgttgacgaaagccaagcaagccacgtcatcgctgaccttcttcatcgcgtttgcgggagacaatttccaaatcacaccatcagctagctcaagatcgatcctaggcacttggaaatttgtcgtcgtcgaaagacaaaactcaaagggtgtcgtgctactgacacgtggaatacccgatgtggcttgtgagaatgcttcggtaaagactctgtatatgtcgcttcgtaacatagtgaaagggaatatggtgcttagagtcacgcctccatcaccgttgcggtcaaaagcaaaagcgtttggggcaaacaagatcctattcccgttaacggaaatacccttgagtcccaagaaatagttgttgagttttctagggtttgtaatcaatcgagtgtaagagagcatagatcttgcatcaatgtttctgagcttgtacggacctccaccaaagtaaatagcaccttttttcaaagggttttcatcagaaggaagacacaacgcaaacttcttctcgagtccgagtctaggtcgagtcagctggttccaagtggcgagagccgtaggtgcaagccccgcaaggccgaaaacaccgggagggaagtctacaaggaacggttgggggatgcataggtaataaacgttgttgatcgtgaccgaaggagatatagggtttagagaagagatggataaatctccataggtgaattggtcagagttacatatacgttggaatggctcaaaagcggttgcttggcaagcacatactccattgatgattttgttgctgggaagagagcattggtgaggagtgactctacgagttagagcacatacgggggagccacaagggacgatgggacgagggagaccatcgttgcatttacggacaagatagggaccgccgatgtgaatgaaaaactcttggtttgtgttgagtgtgaaggtgaagataggcaagattgtgttcttagagacggttgatactaaggctttaggtggatagtaattagccgagacgtaactataagtaaaaaacaaaatgagacagaggacaagaagactcttttccatcttttgcgtgtttgtgtttaagattgttggaaagttttaagatatggatataattactaggagaattaagaacgtatatatagctaattagagttgacattttaacgtatagacatcacacacgttaa

SEQ ID NO: 30145 - DNA, 4316 bp, Arabidopsis thaliana landsberg
  unsure (1)..(4316): unsure at all n locations
ttggttgagtactttaatctcaatgtcagctttgcaagcacgttcatcaaatcctttaacatccttttgagcatcgttgagttccttttcaaatctggatactttgctcaagattaactgatattggagattcaaagcttccttttcagtctgaagctcaagcaatgttctctttaaggtttcaacttcagaatctgcttcgtgagaatcagaagttccatctaatttattcgtctgactaaaactccttttacttttagtaccatccttttgtagagcttctgtatctgcttctgtacgaggctcagaagaagatgatgcagaatcctcaatcatgtcaaaagacatctggttaggaaacgcctcaaccatgactttatgcgcacgccgaagctccacagttgtatgatcatacctctcagctaaagcacgataagctctgtatagctcttccaccagtttcattagctctggacgtttcttgaagtacatgtctgcccttcttgcaaacgaatctgcatcagcttcgatgagctttatcattgtcttgactttggaatccatgtctgtttcaacacaaacaaatatttcctttaaattgacttccaaaagaaacaaaatatctttaaacatacaaatcaaaagcattataatgccacaattttcaagactcataaaaaacaccaaggagaagtcaagaaagattatagaatacctgcaaggttatcctgaatccattttgagtttttaggaatgtgactatcccaccaccacgagtacaacctcccagattctgactgcgacagactggccataacagttgctgcaaaaagctcaacgagcgggttctacgccaaagtaaacaacttgattcctttgatcctctactagtatgctagaaactaagaattctacaaaactgaaacaaaatgaccttataatcaagctaaacaacgaaggaagttacattagatttaaattgctttcccaatgcaaacaaacctttgcactgtggatttgtacttaatgctaaatatcaatttggtgtccttaagaatgataaacactggatcgtcctgaacaagaaaaaaaaaacagcaatcttcagagagataacacacaaaactatcttcaaacaaggcatagacaaagatacaaacatgagtaagctttttaatgtataacaaaacacaatcaagaagagggagaaaagggaaaagctagtctttatgtttcataagaattgagttggtagaaactgaaaactgcagacttcaggaaaatgtatcatagagagacagacacttcatcaaccaccaataatagagacagcaaataacaattcttcgtcaaactttgggaacaaaactaatcaaacttatatacacaaacaaagctaaacaaatcttacttgtagatgaaattaaccagaaatatgaaaatgggtagcaacaaaattgccaaaggaagtaactttatcgaaattcaggagaaaaacttgtgatgaatgcaagcaacagcgacacaaagatgacaactttcgattgaaaactgaaacatcaagcgaaaacgatttatctcagagaatttctaaaggatcaaaagcacttacttacccaaaaagaaatatatacaaagggtaaaaaacaagaacacaaattcaatcacttgactcttcagtttcagacatcaatggaggagaaccacagagacacacaacattctcttctctctctccttcgtctacactgcgtgacaagagaataattagtatgattggcgcatatagtaaatattcgatttttaataatttttcttaccttttttttgtaaaaataatttttcttaccttttttttgtctatatcttttggactcttttttatcttggtgtcattttgtaattaaatagtagaaaaaataccagaacctgtttaacgaaatttatggaaatttttgtatctttataggaatatggtttagtgaaagaaaaaaaaaaggattttaagtgtcggcaatatgataggatttaaatatgaaagactttgatatgcagagaggcacaaatgtgacatatcaaaaatttcaacatacgacaaatgtgtccacattaaatacagtaatttcaataatgaataatgtcttagaaaactttgaataatttaatttcgacaatgatttattttagattatgtaatctgatttttagtctaaaatgatcaactgtataaagaaaaaattattttagcattttacatgtatttagtagtttaagcttctctcatatattatatatagtgtgtgtatcacaccatctcatttattagtctgaagttagcaataagttgggcatgttatgttttaagaaatgttaggcatgcatgtattcaattgttgttctatatacaaacttatcacctgtaactactttttcaagaaaataaatatttacacttctcactttataaaaagggacatgttnnnnnnnnnnnnnnnnnnnnnnnnnntgcatattagctttttgtgttcttaattaatcatatgtattaacaaaggagtaagcaaatattgtttaatgtctcttcttaactaataaaaaaaattgttgcaaagtgaaagatctcactgatattcaatactatgtctgaacgattatagccgttgacaaatgaactattaacgggaggatcggtgagatagatattgttttggccctggataagatgtgatcatcgatattaatgatgtttagtgaaattattaaagatttcagcaatagaaaattaggggtttcaagaggacgattgatcttttccggaagatgactgcatttatttattaaaaaaaacaaattttaatcacaaaatttagtaagagatattgcctccaatgtaaagtcgcctatttaaataacaatttttttttaattacaaaaatcgtcaaaattgaaatatcaatattgaaaatagatagtttaaaaagatatataaactaaaacaaatgcctacaaacacagttaaatgtataaaaagttataattcaaattgttatatcatttgattacatgtattagtgaggataaagtgcttgtcaaattacaatcttagagtctcaaaaaccgcaagatgttcaaatatttttctttttgttttgcacgcaagccacatttccaccaacaaacatcaataagtgtacgttcaagatctaaaaaatggataatgatcaagaagaggggtcatcaagatctccacagaaaaaaatgtgagtagaagagacataaaaaaaggtgggatgtcacaaaaagagttatatgtgagaacaagtttataacctgtcttgttttggtcactaatgaagctaacaatagaaactcaattaatctgtaaagtcctcatcaaaagccaaaaatgataaaagattttttctttgtaaaatttgattccatcgtgtgataatataatggtaattaccaagcaatacatgtttctcagaagatttgtgtttgtgtattttattatattcatggacaaatgtagccaatttggacgtatatgtaagataaagtgtagggtcttcatatcatattcattttgccatatagtaagtgaattgtcaatgttaggtatggagaaatgtcgttgttataagggtggcattattgtgtccttctcatcccggtgaatattataacaacactgaactataatttgacaaaaatgtacaattgtgaggatggtataatcaatccatgtttaaaacaatgtgtatcatagcattacttagctaggtgaaataaatcgatatggttacattattaatttttcggtatgaaatatggttacattatttacgaaggtgatgcttaccaatggtgtaagatatcattcaattacttctaatctaaaaattaaggcgagtagagtccccaataacaaacgtgtgtttcatatacgcaacgcgaatgtcactcttctgcgtttgtatggatacaagaaaaagaaaagaaaacaagaagcaggggagaagttatattattgagctgaagaaacttttcataccgtaacttaaaaataaataaaaaagaattacgtgggctttatgatatgaacagtttatgggcctatcacgcttattgggctatgcccactggaactgtccaactttaacttcattaatgagtgttcgtttcggtctgaccataccaaaccagaactgtaccgaatttttgtcttgaaaaccaaattaaaattggttagagtcattcaggtactttgatactagttatttgtatataatcgccagtaaaattcatttttt

SEQ ID NO: 30146 - DNA, 704 bp, Arabidopsis thaliana landsberg
tgatttttcaagaaatatgaattttttaaaagatgggtgagtgacataattgatgttgacatttttgaacggatgatactttttggggtttatgttatgctttgttgctggggtctggggtttattaatttaccaaattgcgtaagcacgacaaaaagaattttagggtatacgctgcaattaattcaatgttggcataaatatcacacaaacaaaaatattatgttattcgaggtctgaaaggaacacgaaaggcacggagactatgcctaacagctccaaacagttcaatggacatagcttcaagctttatctaactattttttagattgtgtaaccaatatgccataataatctaataatatctacaacccaaatatcgtggaacaagcaagaacaagaaaaaggctgtgcaaagtaaaaaataccagtggaagattcataagaacaacaagagaacacatacatgagtaaaaaacacttatatctcccatctccaactaacatcttcccgtttaacaacacacttgagagattcctaaatctaagacttttgttactgttaatggtggattctacatcatttgactcactatttaggtcctccacttatatttgcagaaggtaccttgctagggtagctcgatatatcaatgtcaatgagcgacatgtcatacattgtggaaacagagtccgaggcatct

SEQ ID NO: 30147 - DNA, 823 bp, Arabidopsis thaliana landsberg
caacatctggttagattttgatgctagatgaagacaaaagcttgaatcttttacaagctatgtgtaatgtagacttttggttgttgtttcttgcaatgatatgtggaatgggatccggtatttcgacgattaacaacattagacaaataggtgagtctcttcgctacactaacgtagagataaactcattgttggctttgtggaatatatggaactttattggtcggtttggaggtggttatgtctcggattggttgctgcacagaaaaggatggccacgtccgttgctaatggctacaactcttggaactatgaccataggtcatctaatcatagcctctggttttcaaggaaatctttaccccggttcgattatcgtaggcatttgttatggctcacaatggtcgttaatgccaacaattacatcagaactatttggagttaagcacatgggaacaatctacaacaccatttcgattgctagtcctatgggttcatatatcttctctgtaagattgattggatatatctatgatcataccattatcggagaaggtaacacgtgttacggtcctcattgtttccgattggcatatgtgatcattgcatctgtggctttccttggatttcttgtctcatgtgtgttggtttttcggacaaagacgctatatcgacagatctttgagaagatgttgcatcgtcgataagagttgtgacttgcgaatatcatgtacacaatgttgtacagtgccacttgtgttttgtatatacatgcgattgttcaaatttattattgattgaaaaatctaaactgcgtaataaa

SEQ ID NO: 30148 - DNA, 1969 bp, Arabidopsis thaliana landsberg
cactttcactctgataaaggctatctgagtagaggtctcttcatcaaaatcaagccccgtgactggccccagagtactagcaataaacctgacagtcatagtagacacatagagaggtatgcctctaacttgaacccaaagatcaatataggtaagaaagtcagcacggggaaagtcttcccatctctgcagaggtacaaaccattggttgaataaccatgggcctctcagcatgaccgaagccaagtcaataccagagcgaaaacgaaactggatgcacctatcatcaatgatgcggccatgtacacgagaagccataccccagctgcgaggcaaggccctaagtactcttctgaggtgttgagcatggatgttaagcggtcttgcaataagactcagtctgttgccagcaacaacaacaccataagctgcctgaggtacaaaaagttctggatcatcgcgacccaaaaccatgtactgtatatcatgccaaatctcatcagccatcaggaaacaagaagaagtaaagaaaagaagacactataagaagtgaaaaagggagcgatatcccctctttcaaacactcatattaaactagtaataaaattaattctacaaaatgttttaaacactcatattgggtatcaccaattaatatggtctacttgctgaaaattaaaatttcctgtcaattaagccaaaacatagaaatggtaacatttcagctctaattttattataggtttttgcaaaaccacaagatacagaccacaaaagacagctacgtaggttaataaaaaaaaaaacatatagatgccttcactcttatatggaaaccacgcattactatatgtatatgtatgtatattcataaccaaaacatcccaaaagatagattatctgaaacgtaattatacataacccacaataagatagaaaacagatctatctagtagctgaaccacacaacatgagtctccgggaggaagtggcagaccggaacggtccctggcttcacctttaagactttgaaggccaagtggtttgggttccaagctgaggtgttcttgtggcataccgcaactgctttagctcgcatcccgttctctccctcgagcggaaccgcgtagacggtcgtcatcatcgccttgtggcagtagaacaccgcgaatgggtacttctgtttgtgacacaccacagatttatcgtcagacaacttctttaccccagccgccgcgattttgtacttctgcatcggtgcgttcttcttagccacctgtagtaaccaaagttacattggtttatagccaaaatattagccacaatatatatggtgtggacatacaaatcaactgcaactaaaccgaaccatgtgttttcatgaatggttagattggtttatatatgtaaatccaaagaaaccgaagctaaagccaaacgtaaaccaattaatttgagtataaacgaaccacacgaacttaaattaagaaataatttctatgttaaactatctaagaaaaattagatcgaaccatgtttaatatttcttaaaaataattatagctaagtacatagtagctatttgtatatgttttttacatcaacctgacccaaatctatcatagttatttatgtcttatatttattttttattcataaaagaagaaaagtaaatttgacagaaactacatcaacctttccaaaaaattatccaaagaaaaccgaattgattatatacaaattatcttatatttagtattaatcttatatgttttcagtcaaaactaaaccggtaattaaaaaacagtagttagtatttttacctcagtggaaacagccctgacgtgatatttaccaagtttcgaaacactaaagtcgaccatcgactccaaagacgtcgcacaatacttctcctctccactaacttttcgggcttcacactcctacgagtgttttcttcatccttaga

SEQ ID NO: 30149 - DNA, 1337 bp, Arabidopsis thaliana landsberg
gaccaaaataaacgaaaccggaaaaaccaaacttaaattgttccaatttttggattctgttctgattaaccgataaaactaaaaactaacctaaaccggattaactaaccctatgaaattccaaaagccaagagagacaaacttaagtttcacaaattttacatatttcataactttgaaagattcagaacttgggattatattataagttccactgacctgacgaacaacagcagaagaaacatcatcaaagctgacatcaggataaggcatatcacaacaataaatctcccacaagcatatcccaaagctgtaaacatcacatcttctgttgtatggcttgccatcaagaacctatgcaacaaaagctaacattctcatctttcctattacgaaacacaaggattttgactctacaggaacaacattacatacctctggtgccatgtatccaagtgttccagtttcacccgtcatgtcttgagggttctgagcttcaactctagctaccccgaaatcagcgatcttcagcgtcttgttaggctgtaacagcatgttctctgacttcacgtccctatgtacaatcgccttggagtggaggtaactaagcctgacataaagaaaagaggtaggaagagttttgttgataaaggaagcatctttgtctgaatagtttcagaaatgaatggcaaatcaggaaacataaagtaaaggagagattaccctctagcgagatccaaagcgagctgaatgacatccttgatgggtagtttggccctatatttcttgatgaggaacttcttaagcgtgcctccggcaacatattcaaccacaacacaacaggccctcgcaggatgtgcaccgttaccacgtccgccagtatcaccagcaggagggatccgcagatcagaggttcccatggatgctcctatgaactgccacagagagagattgagagagagagagagttcaaacgaataagtcctttgatcaaaacgttcttcttctaccttaatcggtgaatgtaaaaagaataccttggtaacgttgggatgatcgagcttctgccagacggcgacctcttgctcgaaggaagcacggagagctgtagtttcagctggtgtggcgtaaccatcttctccccaatctaacactttcactgcagcaaaccataacatccatcagatgggagatccccaaaaaagaccaccagtatctattctaatgaatcatatatatcttagtctaggagaaaagacggacctgcgacttcttggccggcgtagacaccgcggtagacagtgccctaagtaccgtgagcgaggacgtgctttata

SEQ ID NO: 30150 - DNA, 1370 bp, Arabidopsis thaliana landsberg
cactcaacaaccttgcattcgaaccacgatatgccccattcactatcttcaccatccctccaatttgtggaagcacagtctctagctccttttgatcaactctcaacacatgtttagaatcaagcattttgatctccccaacataattatcaatcactttcttcacaacacccttttgcttataataccctttctctgccaaagccttactcatcaccttcacaattatcccttcgaacaaccagtaatctttccgattcatcctctccttcttcttctcttcctccttcatcaactcatccaaagctgatctcctctccttctcgctcctcccggagtccccacttctcttcctcttctcccctctctcaaccttgtcattctcttcatccccaaacaaaagtttcgagctttcccctctctctttacccgtagcaacctgtttaacacctacaccaagagcaaatccaaccttgaccccactcttcaacctcaagtcttcatctttcttcctctcatcatcaccatcatgcacaacttcatgattaccactggtttgaccttcaccaccaccaccattcaatttctcagcagctctctcaatctgtctctgaatctccctctcttgcttctcctcctcagctaaatcactcttaactctcttattcttcaacctctccttaaacaaagtctcagaatctctatctatataagtaataaaccaacctttaggagtttcttcaaccttacacttaccagttttcccaagatgcttaataaactccgtcaacgtcgcccactccgtagaattcatatgaacatgatgtctatcgttaatatactcattgtagacaacagtggcagcgatacgagagaaacggtggctccgccgcatcagatcgagaaacgtctgctcgaattcttcagagtaaccatcgacaacacgagtcggattctgcccaaaaacttgcatctgccgctggtgagattcgctcatacaatgacacttgaatccattctcgtctcggcattgtttctgacacatctgacaataccatcgaagcttttgaagacctttggctttgattcgattcgcaatcgcctttggggttagaaaatcgttcttacccatcgattcttcttgggtttgtcgaacaaaattaaggtgttgggaattgaaatctagggtttctcaggtaacaaccactgatcgaggatgatgaagattcaatcggcgaagattagcgaagagattgattgatgtaaattgtggaaactcataccaaatataatactgaatacgacccatcaattaaagcccatacaatactgggcctattagaaaagaaatgtaatttgtggggaaaaaa

SEQ ID NO: 30151 - DNA, 1577 bp, Arabidopsis thaliana landsberg
  unsure (1)..(1577): unsure at all n locations
tttttaaatttgtatgttttgatattcaatggatccctgtcattagggcttcttgatctttggtcgtcatgggatctttgattctatattttatgttttttgggcgtatgtaaagcctggaatggtggtcgtttgagcttcttatactaatgtcaggactcttaccaaactcaaagctcgaaacatcggtcctatccatttggtattgtacagatatcactttctacaaattttagtataacattttttcattcaaacaagcttttgacctctcagtctttattctttgaacagcctaacaatgtcgtctctgcattacgttatcgtgaatgccataggagcagcagcgaggttttatagtttcccaactgttcataacaatctatcatatctatttgttcttgaaacatttctctgaaccattgtttttgtcatataatagcacacatgtctcaaacaagctaggagctggaaatccaaaggcagctcgatccgcggctaattctgcgatttttcttggcatgattgatgcagccatagtaagcatcagtctctacagctacagaagaaattgggcttatatattcagtaatgagagtgaagtcgctgactatgtcactcaaatcacaccctttctctgtctatcaattggtgttgacagctttctcgccgtactctcaggtaaacagttcacatcaaaatcgaaagtctgtatacattagaatgtacagatcgaagcctttgcagctgttacttgaccaccaagaaagctaaatgttcttgttcttagaaaccctaaaattcttgcttcttcaggagttgctagaggaacagggtggcaacatataggagcttatgcaaacataggatcgtattatctagtcgggatcccggtaggttcaatcttgtgttttgtagtgaaattgagagggaaaggactttggatcggtatattggtaggttccactctacaaacgattgttcttgatcttgtcactttcttcaccaattgggaacaagaggtatatatacctttgccttttttatattgtatttttcctcttctgttttgctagagttttgaatcttgttctgatttgggttttaggtagcgaaggctagagacagagtaatcgagatgataccacaagaaatcatatgaaaagaagatgtacaacttttattcaaggatatttcagaaaatgtgtaaaatactaaactttaagtaaagtatggtccggtttcttttatttgtcaaatttaacggatgttgattagcaactgaaactactggattcgttgaatgcacacaagttgagaaattgagagccaaacacacatcttgaattttgattatagggagttcttcacaaagttttggtgaattaattattttctatttatggaaataatttttcttttttacactttcttaaattttctttctgtaaatacgttgactattttaaccttctgtacaacgaagggaaacacaaaatcacatgcacaagttgtttaataagatgaagattcgtgtggacatatataaattcacattcgtgtatgnccatatttgt

SEQ ID NO: 30152 - DNA, 2416 bp, Arabidopsis thaliana landsberg
agaactttggttgacagagtgaaaaacagccttattggtctgattatgaaggtgataggaaaccctgcagcaaacattgttacctccaggtctatctctctctctgtctctttacattctcagagtgatttgtatattcgtagttaataaactatattcaacagtgagatcatggaatatatgctctgacctagattgaggtttagcatgtatgcgtttgctagaggagtgatctttcattgtagttgtactagtgcatagtcttgtttatgcagtaatttttcttggttccagagtttgaatcaccattattcttatgttaatgattttagctcaaggcggtcagagaagtaccagaaacatgcagtaattttgcatctaaagcagaagagaaagcttcagaagaggaatgcagcaaggctgtctcctctgatgttccccatgctgctgctagtggtgtcagtctgcaagttgagaagactgatatcggtatcaagaatgtagattcatcctctggtgtagaacaagagcatggaattagaggaaagcgtgaggtcccaattctaaaagactccaatgatctgcctaatttatcgaacaagaaacagaagaccgcagcctcagatacaaaaatgtcatttgttaattctgtccctagcttagatcaggcattggatagcacaaagggtgatcaaggtggaacaactgacaataaagtaaacagagactcagaagctgatgcaaaagaagtaggtgagcctattccagacaattcggtccatgatggtggttcctcaatttgtcagccacaccatggtagtggaaacggagcaataatcattgcagaaatgtctgagacaagtcgaccatctacagagtggaatcctatcgagaaggatctttacttgaagggagtcgaaatctttggaagaaacaggtaaactggatcttggtaaattattatctttaaacacagaacacctataacgtatttacatctagtatgttttgtccgtgctatctcagctgtcttattgcaagaaacctgctttctggcttgaagacatgcctagatgtgtccaattacatgcgtgaaaacgaagtttcagtttttcgaagatctagtaccccgaatttgctgttggatgatggcaggactgacccagggaatgatgtaagctcttgatcttcctagggtcttttgtcttttcaaattttctgcagtatctgcgactttgggcattgttgtattgaaagttagcttgtcagactgatagggttagagatctattccagaagaaaaaagttctgatccggaaaagccaatttccttgcttaatttttccctgatacctgcattggacaagagaaaacgatagttgaccataagttggcttagacaagtgattattttatttgagattttattgatattagcatgccatgtctgtcagaatcatattttggtttaccgctctcttactttacttgacagaatgatgaggtgcctccaaggacaagattgttccgtagaaaaggcaaaacccggaagctaaaatactctacaaagtctgctggtcatccgtctgtctggaaaagaatagctggtggcaaaaaccagtcctgtaaacaatacacgccgtgtggatgcctgtcaatgtgcggaaaggattgcccttgtctaactaatgaaacttgctgcgagaaatattgcgggtatgcaaacaaattaacgtcaattgaagtaacagaggatcttcttataaccatccattgatttaattcaggtgctcaaaaagctgtaaaaatcgtttccgaggatgtcattgtgcaaagagtcaatgcagaagtaggcagtgtccctgctttgctgctggcagagaatgtgatccagatgtttgcagaaattgctgggttaggtagtcattttaaatctagatctcttgatgtgccatgtacaatcaaatctactatttgatgagtaacttaagatgccttgcttattcactcagttgtggagatggttctctcggtgaagcaccaagacgcggagaagggcaatgcggaaacatgagacttctcctgaggcaacaacagagggtataatactgtcatcaaatcatgtatttactaaaaataaaatgcattcattgttgataaatctagtttctcatgtgctatatttaccagatcctattgggaaagtctgatgttgctggatggggtgcttttctaaaggtaaagcatgtgaatatcttcctcattaacttctgtttcatacctcttgtatgtaatctgaacctcatctgatcatcagaactcggtcagcaaaaatgaataccttggagaatacaccggtgaattgatctcacaccatgaggcggataagcgtgggagaatatatgaccggaaaaat

SEQ ID NO: 30153 - DNA, 1071 bp, Arabidopsis thaliana landsberg
tctgatgcactgtggcatcacgaaagatatcatcgagatgtttggtttgatgattgatgaaggaactggaatcgacgaagttactctttctactgtcctcaaggctttatcactctctttaccagaaagtttacatagctgcacgcttgtacattgctgtgccatcaaatctggttatgcagctgatgttgcagtctcgtgctctcttattgatgcgtatacaaagagtggtcagaatgaagtatctcggaaggtgtttgatgagcttgatacacctaacatcttctgcttgacttcgatcatcaatggctatgctagaaatggcatgggaacagactgtgttaaaatgctgagagagatggatcgaatgaatctcataccagacgaagttacaatattgtttgtactatcagggtgcagtcattctgggcttgttgaagaaggcgagctgatttttgactcattggaatagaagtacggagtttctccaggaaggaaacatctatgcatgcatggtggatgtgatagggcgtgctggtttggtggatatagctaaatggctgcttcttcaggcacgaggagatgcagactgcgttgcatggagctcattactgtagagctgcaggatccatagaaacgaaacaataggaagaagagcagcggaagtcttgatgaatcttgaacctgagaatttcgctgtttacattcaggtttcaaaattttactttgagatcggtgattttgaaatctccagacaaatcagagagatcgctgcttcacgagagctcatgagggagattggttacagttcagtcgttgtgaaaaactaagaaggcaacatttgcaggacagtgtttttgcttcagcttcatgaaaaagaaaagcgaatccaattgcaaagttcacaccttttttctacatagctgaaatgggttctttcgcttgaagccagaccacatgattgacactctacagagacaacacaagaggaatatgagattctttatttgtcaggttggtgcaacaaactcattgacctcttctatttatggcttttaatatactaataga

SEQ ID NO: 30154 - DNA, 1129 bp, Arabidopsis thaliana landsberg
gtgttatataattttcgtttttttatcgtcggataaaatgtaaagatccatcgtggaccgcacgggtaaacggttagtaaaccgtggacgatcgtagtgttaaacgacctgttcaaaaacattgatggttcgataagccgagggtcaatcgtccaccatgaaaacgaaggggcgtacgtttggaggacggatggaccaataagccaagagcttgattcggccatcgtgaaccaagggatttagaccataggagttggttggttatatggctaagtaacgatagagattggtccatcaatacacggttgatgaagaatcgttgaacgattggaataagatgacaaacgggaaagggaaggattaatggacagatcaaagaggaatcgaatacgcatattggccaaggtatgtaacgatctaacttattagttaagatagacgtttgggaattgaccttgaaaataggataaaggaatatgcgattgttaggcttagagtggttagcaaacaatatgcatgtcttgaccgagtaaaggatcgatctaactctaagggacaaagacaataaaactggtacaagggtttgttggaattaaaccaaagttagaaagacttccgctgtgtaataagaaattgattatagaattaagcctcataaaggcaattctatgttgaatcgcaaaaaattaagaggttcggccgggaagaggcgcaaacttgagtacacggtcgccggacgccgagacgtccgggactgggtctcacagcccttggttctagttcttacactcaatcatacccattacatctagctataattgtctcctaaatattaaccaagcttcttcttgcttctcaaacctttgatggtgaagccaaaggttgtatgagtttttggctttgtattttctaacaaggaaacactactttagcatttgggatcatattgcggttcttgttcttatactcaatcatacacatgaaatctagtcatttttgactccaaagcactacccaagcttcttcttgcttcactaagctttgatggtgtagccgaagtccgtatgtgtgttccgctttgtattttcttaacataggaaacacttcttggggttttatgatccggttg

SEQ ID NO: 30155 - DNA, 2548 bp, Arabidopsis thaliana landsberg
aaatataggaatgcagattcagccacaagaattcagaaaaatctaggtgctccagaaaggagcaaatgaaaaataaaaggttataccacaagtattcaaggaaatccaccacacagcacaccaccacttattgtcttttaaatgtgtagtaagcactaaacatatatgtatacggggaacagaaactaacagacatataatgattcaagacttgcataccattgggttaatgcgagtcagaataatattcttctcttgcaaccttatcagagggcgaacaagaggctgatggttgtcagacaaggcaggaacaatttcagattgcacctttatcacctccccgttttcaacaacctggtcactttcaatatattgcttcaatagattttagtcatcttgataacgcttcatctcagccactataacggcaaggcgttgagggtccatctcgttgtttattctccgctgaaacccgtcaatcttatcctcaaatgagcgcatggtattcgccactacaagggtttcatcaagatcaaagacaatacccagacatctaagattcaacataacaagacaggaatcgtaaattccaggagcaacactaaatgcccagaaacaaggacggtcattcttgatattttccgagtacatagcaaccaaatggagctcttctccacccaagagcattactgctgtctgcaagaagcaaaaatccaaaactcacaaatatgaggacaatttgtaacataacaaacaacacaagattcaaacccccactctactaaaagtttctaaagccccaaacttgatgcagctctgacattaaggaagttaaataatgacacaaaatcctatttatcattaagtgtttttgagttttagttgataaaatctaagtctgagtaaggcttaaaggttcgtaaggtttagataccttgttgtccctgagacaggacgagtagaataaactgagtgactcctgagctggagaaggtgaagcttctaatttgaaacaaaggccacaagatgaaattgtagtaagtattgcaagaggaggacacctctcgccagattgagaaaagtggcttattctgattcccatcttggctagctccattacttccctctgtttcttcttcctctgcttcatcacatcatcttcttgctgattcaattcccttgaagggtatatctccaattctccaagtcttccatcaccatgaaacacttctactctattattactatacatactttcttttctccttctccttcttaaagtttacagatcaatggatgtccattgtctcatctcaaaattggttcatcaaaatctaaactttttgttgtcccttggccagaattgatagattgatcaccagtccacactagtttatgaattggatccgagtttttttctttagcaagaatcaggaaaacaaaaggaagatttttgataaatgggtaaataagagaaagaatgaaaatttagtgtttgttccttaagattttgttccctttgaatatagatctgtaaaataccgatgatgaatccccaaaaaaaaaccctagtttctttcttcttccttggttgatgatgagtttgtttgtgtatctgggaaaagtttattaggttttgtggcgttctaaaaatcgagagaaaccctagatccagataacgaagagtcaagattgtgaatacggcattatgcctttgtccttggtttttttaagggaaaacaaaacacgaagggccccttcattttctttaaccgttctttttttatttatgtcttattttaaaaacaattaatactatttttaaaaattaataaaagcctgaaatagtttttatcagctcaaaacctgtcaaattctgtttttttttcgattcataccgtacttgtaatgtacttttatacttgtgtttctgatctcatgttttgatttttacagtgtcaaggattcatataccacaagatatttatagttcatctaattctttttttttagaagattatttattcaaaagacatgatatttttgacatatacttgtttctttatttgtgaaatattttttatctaccaagcatgaatattttttcacatatatctttcccctactcttttcaattttttccttataaaataatagtttagtaaataaaaaatgatttattttgttttctaagatacacaactacgtaaaggtaatttttttttatagatagtatttttttccttgtttaaaaataaccgttacgtacaaaagccgttacaaaattctttcctaatgttttttttttccgtgttctttcctaatgtcttatgaaaacaattttgaaactaaaaaggcacaatgtatattgttccaattatgatgaataataaacaaccgataacatacaccgggagtcgtgctcacattaataaaatctcaaagtgaataaaaattacgtcaattcatgtaaaaaataaatccttcccaataataaactaaacatttaaaaaatatataagttttgttgttagtcagagcatttatt

SEQ ID NO: 30156 - DNA, 2484 bp, Arabidopsis thaliana landsberg
tggaaatattttctcatataatatctaattagcgaattatctattaatttgataaaaattaacaattatcactaatcattgttataattaattacagtacgtttacaacttaaaataattgttagttcagattttggtattcattacagattacaactaggctactactcacctagtatcttcacaaactaacaaaaatttgtttggcttaagggtctttttttggtttaggttttaattaatcaaataacgatttaaaagattaatgaagaagacttcaatcatagaaattttagaaaacattcatcattaaaaaatattattttttttaaacacagatacacccaaccgcatcgacgcgcttcttatataaagtctccgcggaaatcgttgaatatatttgggcgcgtggcgattttgtgaaggttgtcaagtttgtgtgcgaccgagtcatcgtcgtcgtgctctccttcttcttcatcgtcgagacctaagaaagacgagactctgattcttctgatctttgaatcacactttttctttttttccttcttcttccaacggaacggaacatatggcttcggtttcacctttggcaaagtttaaactggtgttcttaggagaccaatctgtcggaaaaaccagcatcatcactcgtttcatgtatgacaaattcgacaccacgtaccaggtatttacacagattcctttcacttgttttgtttattcatttaaattcttctctgcgacaacaagtttcttttgttttcgtttttttattgtttgatctgattcattatttcctatattacgattgttcagacgatttcatctcatattggtcctagattacgtcgctgatatcactctggtttttcttcaatgcatttgtttgatcactctgctctctgtttttttggttgatttatcaatctcttcttcttattatgatcaagatcgatgatgctaagcactgttgcttctttgctttcttagttagtcattaagcctttatttgtgttctctctgactctctgcagcctaccattggaatcgattttctatcgaaaacaatgtacctcgaagatcgaacagttcgtttgcagctatggtgagaacaatgttacttttgctctttacctaaaaactaacatgttaatttcaaaagcaataacaaaacaagttttgattgaaagggatactgctggacaagaaagattcaggagtctaatcccaagttacatcagagattcttctgttgccattgttgtatacgatgtatccagtaagtccacctttgtttctctctttgattcaccttcttttttgtgttcttatgtgttcaatcaatactttgtgttgcagataggcaaacgtttctgaatacctcgaaatggattgaggatgttcacagagaaagaggtcaaagcaatgttatcatcgttcttgttggaaacaaaactgatcttgttgaaaaacggtaaatacaaacattaagcaaagaattggatgggatggactatataattctctcttgtcttatatatgtcaatcttgatataatgaaaaacaggcaagtatcaatcagtgaaggagaagacaagggtaaagagtatggagtgatgttcattgagaccagtgccaaagaaaacttcaacattaaggtatgacaaaacttcaacaaagagtatggagtgatgttcatttgagtgtttcttgttgtctgatttctaaacacaccaaatctcttcaatttgcaggctttgttccggaagattgctgcagctttacccggggtagactcatattcattggcaacaaaatcagatgacatggttgatgtgaatctaaagaccacttcaaattcatcacaaggtgagcaacaaggaggagcaggtggtggtggaggctgttcttgttgattcaaaaatacataattccaaaacttgtgaagcaaacaaaagggatcacgttagttttgtggttttcatcttattaactgacacagaatataaaacatcaaagagaaaaggattactatttttacacaagtgaatcttttgccttgttctgtatttgatctgttttagacattgacggtagcagaatacaaaaccttattctgatcaccaccaaatgaaccaaagggagaaggatcaactgtggtgacagcttccttccactcaattgtaccccaaatctcacctttcgaacgaaatctcggcacaccaaacatccaatctctcatcatcatcattacgctcaagccagaagagaacaatgttcacaccaaaactgttcacttgactgatattcttagagcctccaaacctttaactatcttccattctgattcctcagactcttgccaatacactcaccggaagctcatatcggtaccgtataacaacaattcctcaactacacaataactcaaaagatgtggcctattcgttcttccccatttaccatcactgggagagg

SEQ ID NO: 30157 - DNA, 2211 bp, Arabidopsis thaliana landsberg
ggtttatctattttatggcctgcatatactaatggttaaaattctaatttatatagtttcgatacctatatacacaattcagtgaagtttaggtcacttttttaatttgtgtggtaatttgtatgaaaagaagcttaggttacttgttaatacatttccaggagaaaagaaaaatattttcctaagtatctaatggaggatcccctttttactaggttattattgtttcaacttttcaagtcatacgaatcttaataaattgtactgttgattagtatgtttttactgaaaatgaactggttcagtaacaaattggagttgtgaagatcggtaagattttgagtgatatagactcctctttaagtatggaagaagaaatatacaatgaaaagaaaagaaaataaaaccgaactatcacgtgcctctcatgtgtctttgatttaagcttccgtcagagtaaccctctatttcacgcggagtcttacactctctttttcgtcacacacaaaaataaaaaatttgatcacattcaaaacttttgtgaagataccatgtatgtaatcttaaccacccaaataaatccatcacttatcatgcatatctctgaataaaatgtaacatgacatcaaatctgctttgttttctcctgaactaaattcttgaaaaaagtaatatatgaaaatcacagagattttccaaatgttttgggagaaaccaatctcatttgctacactcttgaaccaacctcctttaatgccacatatgtagtttctttactaaaatgatagggtcagccatagttgtattcattttttcgttctttgcgccttgttccacacacaaatccttcgttgaaactctcaagataaatctaatgaactttataaactttgaagatgttgtaagtatgaatccagtaaatgagaaacccttatgttggacacttatttaacaatgctgtaacaagctcaagggaatgtacagaatcacttttttcacaaagataatcatatcatttttccatatatatatatatatatatattacccaatacaatcaaagtatgagacatttctcataagacgagagcatactcttaaaattccccaatacaaacacctatacccaaaaaatttaatcccctgcataatcttattaaggaagactgataatctcagaaacgcacaaaaccggagacttttcatgtattaggatagtatccatatgggtaactaacagaatgagatctgtagtgaagattctgttgagtattattattcatttgatctccagactctataggcttcggcttaggcttagccacacgcttgctgctctgttcttggaccgctccaaagactatctcattagacttttcactgtcctgctcataataagtatgcgggatcgatgagtaatgccttcgatgctgctgctgctgttgttgctgatgctgatgcttctggtgctgcttttgctgctgttgctgctggttagggaactcagcgtcccagctactgtagaatgcacggctctgacgtagctgctgcattttctctgcatctttggacataaaagcataagtctttcttggagttgggttcctgggctcaacaggaggaggtccgtcttcgtctcgaatcacaaagctctcttgaattggccatggagttgatgtgctaaatgcagcagactgctttgttgtcccatagtactgctgaaagctggtgcctgtctgcttttttctaaggatctccataactgactcccaagcatttgaaacgagttttcccagcgataccacaaatgtttcctcttgtttctctagctgctcgtctccagccggaatcagagatggtctggaatgtttcataggcttttgatcaggatcagcttcgaacatttcttgatcctgtgtaagaaatatttgaatagttttagcagaataataataagccagggtagtctttgagacgagcacttacattatgagaagacacgatagagccgactcttcgttgcaacagagctagcatataaccaaagaaacctgcagcaacaagaacagcaatccctgcaatacattgaattcagagttattcaaagaataaaaagagacaaacataaaaaaagggtttggtacttttgtaagtttaccaagaggaaacccgcttccatactgataagcacagtcatcgaaatggagttgaa

SEQ ID NO: 30158 - DNA, 309 bp, Arabidopsis thaliana landsberg
caatatccttaataggactcttcgaaaatctagccatcaatcttgatatgctcgggcatggattggtgggccaagtattggaatgggccgatgtgaattgggttgagtatgtgcggatcgggctccaataccatattagactgtggatttccaacttaaaaccaattagcaatgagtggagagactcatattttatatataccactaatcatactcatcttctgatgtgagacaatatctctaatacatacccattaagtttagtgtatatgtgaatttacttgcttataacgcatgactagatgtgtc

SEQ ID NO: 30159 - DNA, 3834 bp, Arabidopsis thaliana landsberg
aacatatcatggtttgttatacgaaaggtgatatgaaatgagataactcaaggatctgcataatagagtaaaaaccattgcttattatgattgttaatatccactgatgctttcaattccatgtcttgaattttgtaatgttttagaactgccctctcacgttcatcagggaaaaaaaaaacatgttgtataataatttacgagacaaaagaatcttacattgcagataccacaaattgccaatgaagcgtctgactgaatctgcttcttagctaatccaacagaagattcccaggtaaaactgtattcaccattcacgagaagagggtgatcacaagcttggcgaaggcgcaagagcatcaacaagatatttacataattttgcttcactgttccagcttctgcatattcctgaagtaaaagaaaaagaaaaagaaaataaaaaaaaaactaaggccttgggaatgtagataaatacaatggaaaatgcataatctacaaccatttattcatggtatattgcatatttctttgagggtatattgagtccacagccataccctgaattgagtacgagattcagcctctagtttggagtagaaatcacgttcctccacagtgaaatccacttttctcaactcaatggacttcggaggtaaagagattatggggtttcccatcaagaagtgaacctaaatgcgtttaccagttagaaaccataaaaaccctcagatgaacattcaaagaaaattagattcaataccagtagactgacctttagttcggcgaagcatcactgttttaaggatagcctgcagcttctgatatcctttcactgggttcctagttatagggttcttaatcgtgctacagaacaatacgtaggaagaataaggatcatatttgaggaatcgaaagtagctgtaaaggtcatcgattgaattctggattggagtgccagacaaacaccacctccgtttagcacgaaggccccagcatgctcttgcaacttgggttttgtaatttttaatgctctgtgcctcatctagaacaactctaaaccatgatactttcgcaagagggccagacagaaactcaactttcttcttctttgaacccttttttttagaatcgggaggatatttccttttcttgtttgagcaaaagccagtagctgcagttccaccatcatgtacaccatccttctcttcatcctcatcatcaacaagaggctgctttggcacttccatacttacaatagaaaatgtggtaacaacaacatcatatttagccaactcatgaggatcctttgttctgctagacccatggtataccagaacagagagatttgcttcactagtcaccttcttatgtaattcatcagcccactgccgcataacactagtgggacatacaacaagcgttccagcagctggccttcccgtcactttacccacactgtctccaccaactttgttttcattggaaagcaattgagagtgttcaaaatgcttgcttcttccactgggttttaaaggcgcacattctccagtctcgctttctaggtcaaaaatttctttcttcgtactttcttcacatgcttgggcaggtttagacctttccttcagtataagagctatagtggaaactgtcttcccaagaccctgcaaaagataattataccaggaaatttgagaaaatttatgctgaatgtttataattgacatttagattacaacagaagacaaaataacctgatcatcagcaagaattccacccgaacaggggaagccacttgtctccttctgggccatccatgacaatgcgattcgctgttcaagtaagatgcagtcagtcttaacaataataattataactattctcattggccaaaacaatcaaccatcaagctgggaaatgatatcaacagattcaaaatttccatttctcctttcggggccaaatcatcttagttaagcatacaatacatcaatacagtaccacatacctttcatttctacagcttgtgtttaattttaataattacatacatacctgatgtctcagaagcgggactgtcaagacaccatcaggcagaattgcttcagaattaggctgagtgagatcctgtcacatcagaccatgtcattagacctaatgagtctgaattaaaaccacgaacaaaggtaaatatggaactgtcataaattgtagtttagcagcataacgatgcatcatggacagggttataaatcaaatatgtatccacaatcagtaaaaactaaggtgttggactgttggtgtctgggagagaggaaaatggaatcaacaagatataaaatggcaattgggtaaaacgcctactcccttattaggctaacagctgctaacctgcaatgcagcttgaaagatcatattttctttatttgactgaagcttcaggcctccagattgattaaaattatgaccaactgtagaatattctgaagaaactaccggcattttcatagctagaggtcgatgtgggattgcagattgaccaaaaggttctattatgcagacgtcagaatcatcatcactatcggatatacattctgaagaatggctttgaactgattcaaagctggcatttgagaattgagaatcaatgccccttggttgaatatattcccggtctccttgttgaatttgaaagtctttatactcattgttttgtgtcactgggctgggatcttctacaacatattgcaaacatgtatctgaatcgtaaaaatgattggagcttatcttgccactgtcttggctaggtagagctgtttgtggtgccatatatgagtatcctttttcagtatctgtttgataggagactgcagagcttgatgcaccagaccaccaacgattggtttctccagaaagataagcatcatccctgacactatattcccctggaactgaactgtagacaactttctctgattcagcctctggtttaaccttcacatgaacagttttattatcctgaaaactgcatgaataattattaggccggtcaaggtcactatcagctaaatgactgtcaaaactgttgttgggtttgacacaggcaggagaaactgaaggattactttcaaacttgaaactgatccctcttgcactagaaaaatcaataggaggtttcctttctaaagatccattatccactcttccatgtctatcaaaaatcatccggctggcaccatccgactgagactcacttactccactctcaacatcatttacagcttcttctttattaggaaagaactcaaacgcgaaattctgaacagaattgggggtatggtctgacaaggatgtaccacttgtattgtagcaatcttgtgcagaagagacatagttatccgcactgtcactgagagaattggaattattaaaaaaaccagacatggcagacgaattatgattggctcccaaccccactccgtatccagtcacgttgtcaaaatatggagtcaacatagctgcaatttgatgtaacaaaaaatgaggaatatggaccctagcaacagaaagattagtgtcaaacttttaaaaaaaaataacctgacatttagtagataaggtgcatacatttggaatcgattatcttatcatcctgcttggaaacagtgtcaacgtcacaattcacaggattgaagaccatcatattgccatcaggatcagagaaactagacgatatactacaactagtcatctcagattgagatactccacatgtttccacaggctgctcaccctgacttaacgaaaaccaatctttaagacttgcagagcgag

SEQ ID NO: 30160 - DNA, 343 bp, Arabidopsis thaliana landsberg
ggtttcatagagaggcaagaggtgaaacaaatggtggtggctactcttgctgagtccggcatgaacctgtcagacgaaatcatagagagtataatcgacaaggtgtggttccttcctaccctgctcgatactatattcttgttccactgttgtatagccaactcatgatagcagttgagaataaagtaaagagtggtttctaagtttcttctttcacagacatttgaggaagctgatacaaaacatgacgggaggatcgataaggaagagtggagaacccttgttcttaggcatccttcccttctaaagaatatgactctccagtatcttaagtgagtttcta

SEQ ID NO: 30161 - DNA, 3602 bp, Arabidopsis thaliana landsberg
  unsure (1)..(3602): unsure at all n locations
taatcagttgggaaatgtcttctaccatcttttgactggtgatataatgagattaagatgagagaaccaaaaaaaagaaacgaaaaaacgctgagctcgaatttgatgctcgagttttttttggggagggagaaacagatgatgacgtggcatggccaggatctttatccgtagacgtggagctcacaaaattcactcaatcgaacggacttctccatttgtaactgacatccagtcatatcataccacgtatgtacctttctgctgctcgctgtaagattatcatttcccacctcacttatttcaatttttatttttagagaaataataagttagtgtttttagttattctttagttccaagcaatcagtgaatgattcataagataataaagaagaaagagcaagtaggaaactaataaccgaagcttgctcatctcttacacatgcacacaagtaaaatccaagaaacatagcaacagcagtgtccagcaatttgctatcttcgattttgttagtcgcttttcgatgtttcggttgttctagtggcagctattacggctggatcaggcggtcctctagctattggatagccaccaccaccaccaagagactgcttcgcctttgcgtagtccacaaatatcgtccggccgtttaattgctgaaagaaactgtcttttgttatcataaagaaatagttttaagcaagtgaaagcagcaagacaacaacaaacacagtatacctgtccgttgaactccatcaaagctttctgagcttcgtcagcagaagcaaatgtcacgaaaccgaaaccttttgatctgtcagagactctgtccataactatttgtgctgataagaaccagacaaaaatatctcaaaaactctcagatatacaataagcagatcaaacacatgtgggatcgatattcatctgataccttcaacaacttggccacatttggaaaatgcctcagacaatccttgctctgtagtgcaaaacgataatcctgtaaacagaatcgaattattgggaattaagcattattggagattgtaaattcaaaatgttcagaaagtagagaacatcaggttcataatcaatttactacaaaccgaacaacatgtgagcacaaaaagaccaaagtttcacagaaacatggctttgaagagaaacacaaagtaaaaaatcaaagccatgagaagaaatggttactggacaacagtgaatagaatagctcgcagaagaaaataactttcaagacttacaacatcattacagaagagatttaccaattttcaattaaaatgaatcatattcaacaaatttgcatccgctaaaaccttaaaattctacagcctagaaatggattgtattaatcacagattcaaaaaggaaaaatgaatagagagttaccaccaataaagagcttggaagcaacaccacggcgttgtgtgaagaaacatgaggcggaggagtttattaagcagacggatttcaggtgccggccaccgatccttgcgagcgccgccattaaaatttatgcgtcgcgagaggactgttggagagactacgaataagcatgtcatgaatcggccaatatgggcctggcccggtccatttggagagggaacggatttattgtatggatataatccagagatgggacaaaatcaaaactaatctatacgcttaagttaactaacagattttcaaaatttaaacaagaaaaagtgacaattaacttccattcattttgctgtctttccaaaaatcaatacaaaacagaaaacagagtcaccaagagcacacaaatacaaaatataagcttcttccatataaacatttcacacaaatactaattaaacccttggcaatgcttcttcttgcgctcaaagagtctgtattgttgacttagggtcgtttgagagaaacaccggagataacgacaaggatggctaaaaaggtgacagaggcaaaggcagaaaccacagctccgctcgttttctgacannnnnnnnnnnnnnnnnnnnnnnnnnnnnnnnnnnnnnnnnnnntattcccattgtgtgccaaatacactatagccgctgccgcggaagcagctgcagtgtccaaagccagagccgcctgtacacatcaataagaaaacagagaattgtttaatttctgtataaactatagcatcaagagtttgaagtattgaggaagatgagtacagtgtcaagaacaagcaagagaagtctcggagcgacggctagaggacgaacaattgtgacgactgagaggggaagtgacaggacaaggtaacctgcaactattgcaatggcaacgacaaagaacctgaaagaaaaaaacagaaagttagataacttagtacccatggaacacaagatgaaagaagaagaaagaaatattgtgagtcatactggaaagttggaagatcatcgtagctagcttcgaactgcaaaaactgagtgaagaaagggagtgtctcgtcactagttcccattgtggcagcagcagctaaggcagctacaatggcagctaaacggagaaggaaatcgaaaatggaaaggcctctcttgtaacctccagagccagtgtggtctctggctaaaccgaggagaggagctttgcctttgatgactgagctagactctgcagggacatcaacggcgattgagtcactcttcatcttttctcttttaactttctcagtgtgttcaccaatcttcttgaagtacttgtttggggggaatggtactggatgcttttgctgttgtgagtgtatggcttttatagggtttaggttctgatggtggactttgttaatggagtagagaaagagtagttgttgttttgtttttccctaagatatggagttggcaacaaaattatacaagtcaacaagtaactaaaataataaataataattggatcagcagatcatatatccctaagtcaagagactcttatcagttggtggtgcatccaccgtattattattattatcttaccaaaaaaagttgaaaaactttattccaactaatcagtagatcaatataaccaaaagggaaaaacccaaagaactaacaaaacccattcgctaatagttcaaacgatgagctaagtaaatgaccttgagttcgactagagcactacaattcaactgttaaaaactcgctctacttcccaatttgaaagtgcgaagaggaaaaggttgtcgttgtcttaacttaagcatcatacccatgctcagcataaacgggttgtcgttgtcttaatattgggtttgggctactgcatacgttgggcttctggcccaaagtcaactaatcttggaatgatgttttttggggctatataagatgggtagggtacggaacacacaatctacttttgagttctctggagcagctttggtcttttctctcttcaggttttttttgttctctctctctctctcattcattactataaatccagcttgtttagttgtttgattgtgaagattcttcgttttaaacttgatgtatcgcatattatcatccgatttagggatttgagtatttatgtctatgtttcatttcgtatgagtagt

SEQ ID NO: 30162 - DNA, 2016 bp, Arabidopsis thaliana landsberg
  unsure (1)..(2016): unsure at all n locations
gattctaatttttatatagctttttggttgtgatataacataacaaaacagtgaacacattctaaactctaaagtaagagttagtattatgcgagggtaaagtaagcattaagcaacacatctaaaacatacataacacataactttctatattgccaaaacgacttaggctatacgaattaagaaatcaaactaaaacacaaattttctccaacacttgcaccaattctttcatggatggtcgcttctgaggcaaggaagagacacattcaatccctaacctaaagcacgccattgcagcatcctcatggcgagcgacatcactcctaattgcaccgtcgattaacctcaagaaccggccattctcttccgctgcagagtcggataagtttgagaactgatctatatcatgatctaccgagaacactttgcttgtgagaagttctaaaagtatgacgccaaaggagtaaacgtcccatttagggtttggtttcaggcttgtggaccattccggtggctggtacggtgagctcgaagttggtccagtggtgtgagattcacgcgctggtgtcatgaggcggtctagccctaaatcggtgatgatgggctcattctcagcgttcaagagaatgttattgggcttgatgttaccgtgcacttgtggcttctcattgatgtaagatagtcctctagccattcctcttgctatcttgagccgtgcttcaaaagtaagagggttttgtaatgacgacgaagaagatgagcttgagcttgccttagctgtttgtgaaggacaaaaaaacagtgatgcgtattttagagtgctaatgtgtaccaaatgacttgcgtattttagatatgatactgtgttttttttttcgtgcgcttacagaaacagaggaacttactggcggtgaagaaacagaggaggctgccattgggaacataatcggaaatgagaagtttctcgtcgtctccccagcagaacccacgaattctgacgagatttgggtgacgaagcttagcgatggcacgaacctccctctcgaattccttgggtttcgcagccgcacagctctccgtctcgatccgcctcaccgcgaatgccgtgccgttctccagcaccgccttatacacgatcccggttccggtggttcccaatatgtaagcagatgcctttagcagagtgtctagatctagccgagtctcgccgtcgactgtaaccaattgagtttgggagctctgcttcagttgcccaccatctgttcgagtgaatgcctgaacggtttgttgattctctacgtcgctctctgatgtcgatgtctcgtcgtaccttcctccggtcaagataatgcatgaaccgcatgtcgttttggcctctggtgattctgggactgtgacctcagtggtgcttggtttcgatttcttggcttcgtttttctccagacagaacttgaagaagctaaatttgctagattctgggtaccttctgcgtttcctgacttggtatacgtagagcacgagtagaccaatgaaagctagaccaactatatctgcaactgtgattgcggcaatggtgcttggctttagcttgctttttcctgtctgatttggtttttctgtcaaagggtttattggagctgtacttcttggtttaactgctattgctggtgaagtagtttcagagatatttggagggtttgaaagagtggaaggaattgaacaaaggatnnnnnnnnnnnnnnnnnnnagctcttggttaccggaaaaagactcagccttttggttaagtaaagaaagggaacttgggattgggcctgtgaggttgttaaaggagagatcgactgtggcatttgctggaaacttctctgcaaaatttggagaaatctcgccgaggactttgttgtgtgataagttcaagtaatgcaggctttttcctcccaaatccttgggaagagagccgttgagaagatttgaagaaagatcaagaatctgtgctgcttcgaaaccacttgg

SEQ ID NO: 30163 - DNA, 1528 bp, Arabidopsis thaliana landsberg
  unsure (1)..(1528): unsure at all n locations
atcctttcaccgtagattcttcagtaatggcctctttactatattccatatcaatatcattctcatcgctctgaagcaccaaaggaccaccttttcttcttcccatagccatctccacctctgtaacaccacgaccataagctgtccctgcaacagaacacttaatgaactccatgaagttacatgtcaatgttcctgtcttgtctgagagaattgtatccacttgtccaagctcttcattcaggttnnnnnnnnnnnnnnnnnnnnnnnnntcagcttcttcatagtacatgtgaatatcctggttgatgaagatactctgaagaactttaacaatctctatggagacatacaaggatataggaatgaaataactgtacagcataaccgcggttagaaaatgatagatcgcagccacgggagctcttttggggtcaaagaagatactggagctatctggtctcaagtaccatctcttcatcacaccatccttgagatcatctcttgttgtaactccaaagataacagaaccaataaatgccatagtaatcaccatgaagaacattaagtagataatcttatccatcttcttttcaatcatgcttctcttagatggaggatctgttgaattctgaataacctttgtgtcaggacccgtgaagataacagctccaaagatgaaatctgggttcctgagttttgagtctctcagaagaagttgctgcggtgagagagggtatttagctcccttaagctccatggttccaacaaacgaatacaaattagcatttggatcctcgcatttgacaaaagcctcaaaccctttaaagttaaactcatcacgcaaagacgaagttacttcaagtccttgcttaactttcagattagtctccccatcaaggttcattgtctctacatagcaaatagcatcttcatagctagaagatagcaaaacaagatccgccgggaaaaactcattcttctctaccttcactatatctccaatactcaaagtcttccactccttcgcatcgaaacttccatcacctctatgcactttaactttcctattattcacctcattatcctaaacaccacatacacaaaagcttctattattcacctcattagctaacaacacataatctaatccatctctaatcacaatcagaaccaaaagttacctgtttttggcggcgccaatcttcaacaccttctttaaccatagtagcaccaataacaaaaagaagaggaacaatagcactagaagcagtataaggagcaagaggagtaaaagccaagaccccagtaaccaaaaagtagaaatttgcaactctcctaaactgctcaaagagtgatttaggtaaaaaagtagcaagagtatacttagtagtcctaacgtagttatcagagtagtttctagaatcagcttcaggtgaatcaggttcattacaataaacaacacgagagataccaggtcctncgatttgagaatggtcttgcttaaaacatgcttgagcacatgtta

SEQ ID NO: 30164 - DNA, 4092 bp, Arabidopsis thaliana landsberg
aaattatatggacttagttgaagctaatcctaaatttctcaatttctaaatagctgttttttccaactattcgaggatattaagatgtgtttctttacataatccacaaactcctattgaggctataaacagtacaatataggaagcacaacacgtgttttctttcttatttttgcaatttagccgaactcacatgtatgctctgtctggtatgggttgatgatgaatcgcagtacaatggatatgataagtatgggattcgaactggaaaataaaatgatattaccaaatcacacaaaaccttttttggctttatataacagatctaaaacacaagtgttaaatgcagacaaggcagaacaacttgataccataccaatacaaatgttacttctcagaatcccacaaccgaacattacagtacgcgaaagtcgcatttagaaattttacatacacagacctcaaagttctcaattgagaccagatgatattactgattcgattcttcattttttttttggactacatatatatacttattacatagtagatgtgatatttgataaagtggtgaagtgttcttacaaggtcaccccccaattcttcattttcaggttttgccaattttttcaggtgcagttagtgtcgtagcttgcaagaccgagtaattccggtccctccaacctcgggttgttctcaaagctgcacaattattttgcgttattaggaacaaatgctcatatgcaactttatcagtttattatacgaaacatatgactcaattgatgtctgtatcaaagactacttaaaagaggcaaaatatgtaaattgaagaggaaacattatgaagaagctttgttggctaagtgaagaagaaacttacttctgtaaaggaatgtgagcaaaaggtccgtttgttgggattgttccacacaaatcattgcttgagacatcactgagcaaaaggaagacaaagataatatgtttttttaagcaaaagggtgaagtctggcgattttagagaaaagtagcagagcgttaacagacaaacaatgaaaaagctgaacttacacaactttaaggcttgggattgcagtgagtgctctagggattggccccgtcaatcggttgtcattaagccgtctgtcacattaaacagtttcttagagagacaatgtatgaagaggcatcacaaaaaaagaattaggtattggagaacaacccacataaataatcttgttctcttactcaacatttgataaaccattttgcaatttttaaagaagtgttgagtatattgttcaatgtgtctatgtcagagtttgagagaaacttacaaaaagaccagagacttcaattttcccaaagaagtgggaactatccctgtaagattgttgttgtacagatccaagctgatgagattcttcagatttccaagttcggaaggtatagttccttggatgttgtttttgtagagctctctgcataaatcataagacaatttaagagttagtcttacattgtctataacataaccaatctcaaagttaaacagtttcagtgcattatatggtatacaatgttaattccattataaatttcggataagtaaaagtcaaaagagtgatggcatacagatactgtaaatgttcaagcttcccaagctcaggcgcaagatgtccagagaggtttgaattccccaaatccctgccaaaatatgtagaattagatatgcaatcaatattaccagtattgatattgtagaagaagaagacaataaagcacaaatgaacaagagataagcattaactttttatactccattagctgttctcttgatacatcaaacagttattagagataatcagatgaaatcaagtacaaagaatccacaattcttctaaaaaagtaagaactcacaaagtagggaccaaaaagtaagctagatcagtaacaaagcattgagaaaatcataaggtacaagtaaaaattgaactgcttaatagatggaataactattagggattctttcaaggaatccaatgactagaaaagtctacacagtgcaaaacataggagctttagagtttagatttccccttttcatactagaaagtgtttcttttttcctttgacttgttgtactcaacatttgaagcttcgaaaaggaccatatcataaatagtttcatgaaccttaaagttaccccaaaatgaagtgtttacaagggaaaaggaaagctagaaacaattcaacacacagacaaaatccccattagacttatccatctcaatctctaggaagttatggtcaagtttatctaagatcttccacaacgaccaaaagggtctagatatgactctaataccatcattgttaaagctcagtcataaatcgactgaaacatcaaacgatgctatctaataatagaaacaaacccagaatatctatcctataaatagagcaaaaatgagacagtaaattatgagagactgtatcaatagaatctccacagattcttggcgaatcaacttgttcaaaacaggagataagagaaagagaaaagaggatcttacacacgagtgacgcggttgtcttggttacaggtgacatggaaccaggtacaaggattaacaagagttggatcccagctctggagaacatggtccggatctgttaaactccggcgaagagcgtaaagagcatctccttcggagtttgcttcgaccaggtgaatcaaagctaaggttaggattaacgaagctgcgaagagctcccaccgatagtttcgagacgccatgtgagctatcggaggtcgaagagagagtaatctaataggaatttgagtaattttctgaacaagatgaggaagcaaaattagggtttcgttggaagaaatagattatgcgattggtgtgggaaatgacccagaaatactccttttttagttttacactttttttgtttacttactttttacattaattttttattattaaaattcctgtctttttctcaatttctttaattttttaatgaagcgtttttattccattacacagaatatacagaactcactcaataaaaattaatactaaattatagaatttaaggaggaaaaatgaattgtatatcgagacattgaaaattaaactctgaaacagttaaactttgatttttaagagaaagaaacaagtcaagtcttcgtttgtaacttatgtcatggttttaaaaattgttggtcaaagaagttaagaggttgtttgatttggtcaaaattggagactcttgagagttcacttcacgcggaaacaaacagtggtttttttgtgtgcacacattattcttgtgatatcatgaagattagtatgaataatgtgacatttattcactttttgttagtttggtaaagatttattttatcattgattttgatggaatacgagttgtgtgcactaacgaaaaaaaaggagagtttaagtgcatacataacaaattaatatttaagaaaagtcaatgatattcggggggaataagataagattcttgagatggaatccgatccgacaaacacataacacttaaatgtcggaataataatagcaactccactcttcccttacattataaaggtaccaattagcaaacaaatgacgacaaaaagggtaggaattgtcttttcttaacgacaccgacttttccaaatcgttcgcctggaaatgaaatttaaggaccggtgattacgcttctgaccggtaactcgccattcgtatgggtttctctagaagcctgcaggttttactggttcgggccaaataatgtagacccgcatctctgaaagtttgcccttaaagaataaagactatgggcctaataaataagcccacaatctttttattttaggttttggatattgttgtgatttgatctttcatttaaaaacaccatttcagtatgcttctttataccattctattaaaaaacacacacagactaaagtgtggtattgcagtcaatagaatattgtttcttggagaggaagaaaactacacattttggtttggaggtttgagaatgagagaatgtgattgc

SEQ ID NO: 30165 - DNA, 1403 bp, Arabidopsis thaliana landsberg
  unsure (1)..(1403): unsure at all n locations
atattgttagaactttatctttttatttttgcatattattgttccatctcataacatttgctcttaattgatgcactctctctttaaatgaatcaagaaattgttaactgctatattaccttcaacatttttttctaattcatatataattttgtattattgtgtaaaattttgtctttataatattatttgacatagattttattttatgaaaattttgtcaatacaaataattattattaatgttgaagactatgcaaatgcaaaaaaaaatagaaatagattttagaatatactaaattctattgctttcttcttctctagcttctctctaaaacatccacgaacacatcctctttttttaaattaacattattgtcatagccttataggactatctagtcatgtttagcttatggcgtagataggctagattgcgaaagcgtgtaaaccggttaaatacgaaacgtaattactttacatagtagacccgtaagtaaacaaataactcaagaaagccccaaaattttaccattttagttaattacttcttctcctcctttccctccaaatccttactcatccatgtccttctaaaagaaacctctgttcctgtctcccaaaaccaaacccttctttgtctcgaagtaatcaaactctgacaacaacaactcgaattcaaagtaagcggctaaaatttcattgcatcatcttcaaatttcgttgccacacgctctaatgttcaagccaacgttagaatttagggtttttcattgcgaatctcaaaatnnnnnnnnnnnnnnnnnnnnaaagaacaaagaagaaaaaaccttactttacctttcaatgatcaatggttctcgtaaaaatagttccttttgcttctctgttatacccacaagtgtaaagttcgtacctttgagggaacaattgtttaatgggttttgttgcgttaatctttcagagtacgaaatcgagtttggtagctttaatattaatgccgagaatgcgtattgaaggtagagatttagtcgatctggtgctgtcatggtctcttgaagaagttctcactgttgatctttataaaggacaggttctgtttaactctcttgtgttctctgtcccatttgagtaaagagaagcttcctagagagtatttttgtgtgtttgattgcttatgacaggtgcagatagatacctatgtagtttgattcatccgcagactactgcaagaccatttattcctccgcttatgaagtaacacatgccgctttattgtcgagtatgaggaagttgtggcaagcacctgtggttgaaataagcccccttacgcaacctgcggaatataagcttcctaaagaaatgttctataaagtgcgtttgagtggaataagtaatgaggg

SEQ ID NO: 30166 - DNA, 1628 bp, Arabidopsis thaliana landsberg
tttctttcccttatggtaaactacacatatataagacactaaaaccgggacgaagcaattgcaaacctcaactgcatttcttgggagtctgaacatccgccttcgacctcctttattttccacagagacagaatctctctcactctgttctagcgtttctacaacatcttgatctttcttactgctttcacacatagttacaagtgtgcttcctgcatcagattccctttttctcttccttctgtcattcggaccccagtcttcatcttcactaccttgctcttgcaaaactgcatcctttccaaacatttcctgagacaaaaatatagccgaaaatttcaccaccaaaacaacatcattaacaaattgtagcagatcaacatttcagggattttgaaatccatggatgtggtacgtacatagtacaactgtgtatagtcaacagtccttcgctgtcttggcccacatacagtttcttcattacttgtttcgcactgctccaccatattgctgagtctatggccttcccatgatcccgttgaaagggcaacaccatcagatgataagctcaagctagttgaaatgctttcttcatcgttataaccaccaccatcaccactaacgttgctgctgtttccctcaccgttttccctcatttcagggtcataatcatcatccttggagtcatccgaaggccaatctgcttcattgttaactgtagcttcagatccaataggaagactagcttcttcattgaagatatccttatccatacaaaacaaaagcaagaaaagtttaactagaagagtaaagcagagttcagatagggaagtgtctctatcttgcgttcaaacaaaatgaaacacaatggtacttgccaagggtttacctgccagttgctgtccacagggaaatgagttccaatttgtgcattcattgtgtcgataatttcaattttgcaatcacaaaatttgcaaaaccagccctgatctccgggaggtactgttcagatttttaaaagcaatatgattgaatgaaaaaactcaggtggagaagccacactgtataaactctctaagactatataagtatatgcaacagatggctagagcttactgctttctgtttccaaaggagggtcaaggcatttctggtgaaatgctcgattacacgttccatcacaaagtattatatcattgtctggaaaagcttctcgagaattgcattctgcacaaaatatctgcagaaggtaaaaaccatcaggcaattctccagtgtagtttccagtatgaactataaagacatgaataaataaaaagagttgcttacatgatcatgatgaatagatccatctgaagctatcactttctcttccatgcttcccacagaactaagcagatccagttggcgaatggcgtcgcgtagtccaagcttgcagtttaagatctctttccgggctctctcaagctccttgtctggtcttatcttttcccggctgaagaagacatggaaatacaagagtcaaaccacataatttgtttgcaactaaatatggccaagattgtttcttcgcgttcgcgggtgcatttgattttatattttcactttgaaccttacaaatgataatt

SEQ ID NO: 30167 - DNA, 2739 bp, Arabidopsis thaliana landsberg
attcatgttcgtcgtagtttccttgtaaaacacgttttgttttagaatctaaagcatgtgaaaggcatgcctcgccaacttttagttttcacaccatgcgtgcctttttcttgttctttggtcggtcgtagtcttcttattaatgacgaattctattccatgacgagttccttccacttttctcctttctaatctaaaccttttataaattattgattatatctgagtgagtagctccaatatagctataaataaaaaaagtacctcaaaattatagtactaaggtataggaacgagtggagaattggaagcatgaaacacatgtgcatcagaatgccaacgttgactcacgagttttgaaatcttaatgaattcgataaatcgtttgagtcggattatacttcgttttttcataactctttttcagatacaagaatcggttgtttaagaaaaaaagaaaaatcgctgtttaatgaatcattttaccaaagaacccatgtagactatctatatctatagtattataccatgtggcttggatcgggtccgaagtactataagcctaaggcggaaaatcttttggctgagagaattgagctaagatatcaatccaatatataaaaaacatatacagtatctctattcattataagttggttaaaaccattcccaaactcatgataatcactctctcaccaaaaaacaaaaatcaaataaactcatatatatatatatatatataagaaaaacttgaacatttcctcacattgttactctagattttaaaggtgatagtgatacaatggctgataaatgtgctaaaatttgaaattaatttgtccattatgccgacatccatttataagcttttaacatgatactagaatcaacaaataaatatttttattattttatttggaaactattaatgagtacacgatatttacatttacataaattggttgattggtatacctgaattttggtagaaattgcccacagaatattcggataagtatttcggtttagccaaaagcagtgtcgtcttcttacacaaaaacaacaaaactccaatcgtcctccctcgtcctgaatccatccatcatccactctcctcttaaaaatcctatctttgtggtttgcaatctctcccacgacgcgcttcatcattcatggctatttgaatctctcttctctctctctatcaaatatgcaaaacccttcaacggtaacccaggaatcagccgcaccggtctttgatttcttcccacggctcagaggtttaacctctagaaatcgatccccgtgttcgaattcagatgggtatgctctctcatcgtccaatgccttgtacttcaatggtttccggactttaccctcccgaaggatgggaaaaaccctagcttccttgagcttcaacactaagagcagtgctggttcgagtctccgtaggtttatcagcgatttcaatagctttattaggtttcactgcgataaagtggttccggagagctttgcctccgtcggaggagtcggattatcgagtgatgagaatgggattagggaaaatgggactggtggggttttgggtgaggagggattgccgatgaatggtgttgaagctgatcggccgaagaaagttttgattttgatgagtgatactggtggtggtcacagagcttctgcggaagccattagagctgcttttaataaggagtttggagatgagtaccaggttcgtcttgatatttccatccatctttttgggtagaatcaggattgattgatcattgatggatttcagtttgggacttttacaagttttggtagtaaattgaagtatctgtttggatgttcggagaatctctattctgtcttcttagttttagagttcttcgaagcttcagattcagtttacttataaacttgtaattgtagtcaggtttagagtttcttgaattagagaaaataggatttagatgtttggttcatgtaagtggatagcattgcgttacattcacttgatggcttaggaatgttccagctgaagagtgtgaaactgactttaaattaaatttggttcttggaataattaaccaaatacatttgaaagtctagatctttggtactttaagtagtgtgagccattgttgattttgttccgttctaagagtgcttgcgcaggtgtttattacggatttgtggacagatcatacgccctggccgttcaaccagcttcccaggagctataattttctggtgaaacatggaactctgtggaaaatgacttattatggtacatctccacgcattgttcatcaatctaattttgctgcaacttccacttttattgccaggtgaggattaaggtctatagtttggttactccttcataattcatttgtgtgttccaactataattatgagaagattctaatcaagagtctttaaatgttcctatgagaaaggagcatcatatttagcctatagcttttttgggtctttgcttctcttacggagttctatcatgtctttttcttttctaatctgataccattgttttataacttacagggaaatcgcccaagggttaatgaaatatcaaccagatatcataatcagtgttcatccgttgatgcaacatgtcccacttcgtgtcctacgatcaaaaggcttgcttaagaaaatcgtgaacaacacggttattacagacttaagcacgtgccatcctacatggtt

SEQ ID NO: 30168 - DNA, 3473 bp, Arabidopsis thaliana landsberg
gagttgatgaaaacatagtaagaaacaccacgagaactatctgcaagactttactaacatgttcttgtttgttattttttggcttatgggaaggttatgatcttaatgtaatatttatcatctcataagaattacggtcgaaaataatgggaacgcaacgttctttttttctttttatttttgttattcttcgttagtaataaaaaaaatatgtatttaagcacatgagctagatcaagtcgtaaagcaattatagtgggactggtagagcgtgtcgtcaaaagacagaacttttctacgatcttaatactttgaagtattaaattactaataacaacagtgtgaaaagcataattaaaaagcagcaatccagcaaagctatttttccaacaacctattttgtagaaaaaacaacgtatgtttaacatttttaatttagtgtagattctaacacattctctactggtctgacggcaaaagtgaagttatatgtcactaatttgtcatggtttgatcattatatattcagattaatcctatgtagtgtaacaacatcaaagtagtttagaatgtttttggttatatgtcactgatttggcaattcacgccattttgtgttgacgccattgctcttgaaagttcggtttcttaaacaaatccaacaagaaaactttgaaagcagaaaatacaaaacatattatatgttgagtcctaaaaatttaagatataagaacttggggatgaaacggaaggctttactgattcaagataaagaaaccctaatgtagtgattcatcaaatagacgatacaaaagcttgaatgtaactgttcattcaaactaacttctttaacggtttcagcgtccatgggacaagaaagaatttgttaatgtcattgtaccaactgaatacagattaagaccaagtagtacttcgattgatgtttcaggcattcctctcaagttctcagctcttacgacatcaagaagattatctggaagctgcgaaacgccattcaagatctgcataaccgcactcatgttcggtctaatcagttcagtgtgatgtgcacacaacagacctagcttcaaaagaagctcgatttctcccctgttttgttcttgacggatactttcctcagctgcatcgaaaagtttcccactttcccaaagctctaagatccaatccacaagaacttcttcattttctgctgcacgtctctcaattatccttctaccacacactacttcaagcattaccaacccaaaggcgtaaacatcagtgcttgtggttgctcttcctgttcttagaaactctggtgcgatatatccgaatgttcccgctactttagatgtttcaggatcgaatccctgatcatacagtttcgccagtccgaaatcccctagcctcgcattcatttcattgtcgattaaaacattagctggtttgatatctcgatgaatgatgacttgtacccattcttgatgcaggtgtagtagagcagttgcaacatctttgatgatcctgaaacgttgttcccaagtaagccgttcttgattctcgctacggtttagatacttgtcaaggcttccattaggcatatagtcatacaccaagtagagattctctttatgcctacagtatcctaaaagcctgactaaatttggatgtctgagacgaccaatggtcgatatctcggctagaaactcgctcatcccttgtcttgaatcatgagaagtccgcttcacagcgatctctgcatcagaacccggaagtgttcctttatagacttgaccaaagcctcctttaccaagaagttgtttctccttgaaaccctttgtggcattgaaaagctccttataagcaaacctatgaggtccatattgaatctcccattcttcaagaacctctttaaccttcttatgcctcaaatagaagacgaaaccgatccacgaagcgacaaacgcagcaaacacagataccgttaagcagacggctaaaacagttttcgttctattagatgttttctttggatatggaggaaggactggtatactaagctccaatctcggatactcgattacaccattaacaaaccaacccatcaagtaatgaattgctccaactgaccccgtcgatgcagtgaatccaagatacattttctcaagcaaatacggcgagagatctcggttcaaagacaagagcggttttagtggcggaacagggatctcagcagggaataaagtaacattgagctgttgatcaggttgactataaacgatggaaagcctcattacctctctgctgatcaaagaaagttttttaaagcttccatgtttatcatcatagtaaccagcagaagcagaggcaacagatctcaaaccgttaatgttaatcccaacatgattatcatcaatatctccaaactcttcgtctttatgaatatctaactctatagctatcacgtgattcgaagttttaccgttgtttgttttgttgaataatccgaggtactgatcggaggaagctccgggaaggcctcttgtaggagaaaaagcgaaagtcataccgtgagaaccttgctgcttatgctcagggacaatagcgaagaagaagttgatggagaaagactggtccttcatttcaaatgttgtgttgtcgaaagcttgaccgtaggaatgcttcgtggtgttcgttaaaaccaagtaactattttcgttgaaagctgcagatccatccaggatatatgtgccatgggagttgtaagtaaatgaaaacagagtaagccactgaacaagaactatttgtaagattttgacttcactaaacatgttcttgttcgtttttttttggcttatggaaaggttatgatcgtaatgtgatctttatcagaagaattttgtaagaagatacaacataaaaataagtaaaactgtatgatcaagacaaaataatgtgaacgaaactgttcatgtcatagtcatattcgtcgcgttactaataaacaaacatatgtagtttgtatttaattacccacatggcctagatgatcaaaccgcaacacaataaacaaataatcttctgatcattttcaattaattgcaattattgtgggattgtcagagtgtcgaagcggacccatgttattgttaggtttgcaaacctattttactattgattttttgctatattggttatgagattatgacatcctatttgctatttgtattttctttctttttctttttacaagaacattattgttaattattctcttgaatctcttcttatcgttccattaatgcgtcgaacattacggagcgaagaaatggataaacaatgtaagtttaacaaccaacgtgttgaccatacaatgtaaaaaaaaataagttttttgacatgttttaatgtaaagtttaacagaatttgtattggtctacagaaaaaaaaaagttaattaagttataagtcat

SEQ ID NO: 30169 - DNA, 3634 bp, Arabidopsis thaliana landsberg
  unsure (1)..(3634): unsure at all n locations
aatatccttccttatcaaagtgttttggtggttgccaatatttttttagatgctctttagccgtttctcgtttctctgttcctaaatatctatttcaaaatctggaaattggtttcagcatcttcactaggctgcatattgggatcaatacgtaacttatagcaataaacaatgtataaagtgctattgtatcatatcttatctttgttatgataaatccattgggtgccatctttgtttttttttatcaaaaaatataatgaatagttttctagtttctttatttaccttcaatctacttatgatctattttcaagaacagcatatgaagaatagcatctcataacttatctttgttctgtttatccatcttgataggagtattctatcagtagactcctagctgtcccatcgatgatcagagctattcttcctactttacaacatcgtggacacaacaataagcttcaaagttgcctgaagctggtagttttaagtggcgaaccctttcccgtgagcctgtgggattcacttcacagcctacttcctgaaacatgttttctgaatctatatgggagtacagaggtgcgaaaaatatgataattgtaatttagtcttagaaaatcttcttaagctggtgtaattgaaaagttcatagcggtgtcagctggttgctactggcttggttttatgggttgaaaacatgttgataactacaacctgcttttggtttggaagatgttgataccttgaagacttcttaatttcacttatttgatacttaggcatagtctaacttgctgtagctggtcagagttgtaatatatcctctctatattctcttaacttatgnnnnnnnnnnnnnnnnnnnnnnntgtatcgattagccttttgttttgtttaggtatcaggggactgcacttattttgactgcagtgagttgccaagactcttgaagaccgaagagattggtagtgttcctattggcaagtcaatttccaattgcaaagttgtacttttgggggacgaagataaaccttacgaaggagaaatttgtgttagtggtctctgtctttcacaagggtacatgcattcctcgatagagtctgaaggctacgtgaagctacataataactcactctgtaatcatttaacaaatgattgtggaagccagctttattatagaactggtgattatggaagacaactttctagtggtgatttgatttttattgggagaagggatcgaactgttaaactcaatggaaaacgcatggcccttgaagagattgaaacaactctagaactaaatccagatattgctgaagctgttgttctacttagcagagatgagacggagcttgcttcactcaaggcctttgtagtactgaacaaggaaagcaactccagtgatggtatcatattttctatcagaaattggatgggtggaaaacttcctccggtgatgattcctaaccattttgttttggtggagaaactgccacttacttcaagtggaaaagttgattatgaagcactagcaaggttgaaatgtcctacaaccggtgctcaagatatgatgcagagcaatggaactaatagtttactgcaaaatattaaaaaggtcagacaatttccatgctgtgcttacacacgttttgtttttctccttacgagccctctttggtatctaattgtttctttctccctagaccatatattaggaaatgaaatctttgataaccttttttgggtaacttttggacggttgccattctgggttggagttatagttcgaacgggaaactaaagttgtgcaaagtaatctgataataaaggtgccggtttaggggtgtttaagggtatttttctctcacagaaaataaaagcaaatgctatacttggtgggagacgaatataaaattctttggaaacagattaacttagaaattagaatatcagtatttggttgagtgattatgcttatgaaaaatgttgagaacattgtttgtatagttttaatctgcagaatctaattgactatagaagaggagttatatgatttccttaaattttggtataggctgtctgtgatgcattactggtcaaagaagtttcagacgatgatgatttctttgcgattgggggagactctttagccgcagcgcatctttctcatagtcttggtattgatatgagattgatttaccaatttcgaagtccatctaggcttttgatctatctgtcagagaaagaagggaagttaagagaagatatgcaacacaacaccactcagaaactagaccacaagatagagagtcagaatggtaatgggttggttagtagaactgttccacttcattctggtgttacatcaggcccaacaccttcaaaattgcagtgtgagaagaataattccccaaagcgattgaaaattgattacgaaaagttttctcccaaaagaatgaaagaaaataaattatgggattcaggattttctcaaatacaatgtgcatttagtcgttgcaataaggtacattctccagagtcatgtagtaatgaagaggcaaaccgagaatactggtcgttggagattccaaggaaccaaatggtctctatgcaagagatatggaaagttcatatggagtcatgtgtagatgcctcccccctagttgtgttgaaggattcgaaaacttatctattcattgggtctcactcacgtaaattttcgtgcattgacgccaaaaggtatgcatctttataatctgatgtatcatatgttgagaggtgtaatatatcatagtcaaagtggtgcatcatcattctggctaaattaaatcactatttagcgtatcaggttttatgttaggttggatttggatctaaaatgaaatgagaggatttaaatgttaggtttaaatttcttacatattaggctggatttctaacaaatgatacactttcttgtgttaattagtggttctatgtattgggagaccattctagagggnnnnnnnnnnnnnnnnnnnatggtagttggtgattttagtcaggttagttttctcatcaacttgtgtagatcactatattctttctagtctacttgaacagttttggggacatctccaatgctaggtcgttattggatgctacaaaggaaaattatatttcttagatttctcaacgggaagcttatgttggaaatttcaagcatgtggtgaggtatgatctgaaggaaaattaatcaatcatagctttgtactttgtttgtctacctcaatgccacttaaatttctgtgtcatatattttctcattcctagaaattgttctcagatggctagctgacttgagacaatttgttttctttttcggatgaagataaagtgccagcctgtggtggatacatcttcgcaactgatatggtaagataacgatgactttctctgttatcatatctagccaagtcattgtactgagttgaagaggagtggttctgtgatcatagtcataatttttgtgccacatgttaaattcctttccaatgttgcttttgtctgagtgaaccttacatccaaaatttcataggtaccaatgcttgattatatggttttctttacattgaactgaggatag

SEQ ID NO: 30170 - DNA, 1138 bp, Arabidopsis thaliana landsberg
cattttaaggagtttgcaacggcgaaaatgacttgaaaaaatttattatcgatgttcaatcatgagcctgcgcattggtgccaccaagtagctctcaacaagttaagccaactcctggtaaattttcacggttaattagttataagtttttattttgttccccctttggtgttggttttatggtaacatttatttgtattttttgtttattcaggtgacattttgttaattagagacagtagcaatttacaatatgtaacaacggctacaattattttgtagataattacgtaatagcccttgatgtactacaacaacaataacaatatgtaaaaaaaacaaaatagccctcggcgtaccgcagattataatctagttggttaacattttagcatctaattaattaatgacaatgtcaacgaatcagtttttaatcatcaaaagctttcttctttgttttctcaagagaagtggaataatcacaatatcttgaaaaaagtttaacttgtgagtagcatcaaagtacatcaatgagaaagatgtaaaaaagattaggacatggaagagctatcctcagtctctgtgttggtggttgttgttgttgttgtggcattttgagagtcttggagtaacttcgtttggtgttctgcgtgttctctctcgcattgactcacaccaatgataatgtcgagcattgttccagttgtgccgaagaacacaagtggacctagagacttgcgtttgatgcctaccgggattgcaaccaatgcgcctaggactgagaatacccaagttcccaatgcactgcacccaaaaaagatagatatatttagactttaggatgttccaacttcgagaacgataatcacactgtgtttttacattagaagatactagataccaatgttggatgctaaggttacatcttttagcaaatcaaagcaatgtagtggttaagcatggtggcatgaccaagtgaaaacgactaagagtgggctatgtaactgatgactcaatgacaaaaatatgattcctagatcacagttaagaaacgctcactttatgcaccaggagaatttataattttctacactttagaatgcttcaacttagaacaacaaccacactgtgatacacc

SEQ ID NO: 30171 - DNA, 1283 bp, Arabidopsis thaliana landsberg
tctaggtttttattgcttggtttttgttggaggttcttgtttcttcttcgcctgagtcctctttagccttaactgtgatggctctaagccactcattgtcggtgtagtggtaatttggtttgggcaacctaatttttaggtttcctcacacagcgtcaacaaatagatttaggacaagatccgcctaggtttgggtccttttaccggttcacgtttattggttgacactcccggctccgtgattccaatggtccctgcaagttttggctgagattcctccttcccgccatccaagggatcctaaggttttttcttctgaagactcttaattatcaagtgaggcttgtaaatcgaaacttttatggattggttgtcagctccttcaacgacttcctgcttgttttgcgatctcggttggctcgggtagtaagaaatttggttctctacctcaaatcctttcaatcaagtttagatttttttttagttttatgtcttttgcttgtctccctatgttggaatttagtttctgggggttagagttccgccggcttagtttctcgggtttaagttccgtcggcaattgtattccaccatgttttcctcatccatgttggaagatgacactagaagatcgatgagcaaaccaaggagctttcctcatagttaaaagtgtcacaatggcggaccaatcacaatcttatgtagcataagactactctttttggctagagatggtgtttgaaattgataaatgtattacataattgtaatgattttttgtagtttgattgccctcatttcccctttgtaattgtgaacatgttgttgttaatatcatgaatcattcagacaaaaaaagaccaaacatatatgtctgagtttctctctctaggattcttcaaagatagggaactcaatccttgttccaccgttcggtatgcttaccaactttctggtgtagtccggttttgtttctggtgtggtttgctattgtttcggctatctgttgtggttagctattgtttcggttatctgttgccgcttcttatctttttcctgaataaattgtatcagcgtcatggttttaggcgactaaggtcaactctctctagcatgtttcttttcagagttttgcgactaagattgatggtatgaagatgtgttcctttgttaattttagattgactctcagtcgttgtctctaagcttcagttcgattaaaaaacggtggtggactttcagatcttatcattctctaatggagtttgttcgttgaatcccaa

SEQ ID NO: 30172 - DNA, 2595 bp, Arabidopsis thaliana landsberg
tcttttatttcgtgcagcagcagcagccacctttacctcctggttctttactcaaacaacaatcagcaacatcagtaggcagccgttgtattagtacattagattacaaccgcactgtctgcgggataaaacgattgaagtaaaactattatatgggattcaaatttcgtttctataaaacaaaacataaaaaaataaaggtttttgttctgttccaatatgcaaataatttgtattagaattttttgcacccgtaaaatatttgagcatagtaacaacttccatgtggagaaagtattgatgaaatactatgatttatggcacatgtcttttttgtatttttaataattaaattcatatattttatgttaagtgaccacagtcataatactctagttttgatactttatgtgaacaagttacgaagttttagtggcttcacatgtcaaatactctagttttcgttaacccgacaaacttctaagaacaatattacagtactttcgttttggagaatttttattttttaaataaaccaaagattgttatctaattttctgcaattttttttttgtttgaaatttacacatgttaaaagttaaaattaaggattataagtgatcaagccaaataactctttaaatattaaatgaataaattcctgaatgtcaccctaaatgatcaaccaaatcgcacttccaagattttaacatctactcacactactaagcaattagaataatggaaatatcagaactttttttgtttcttttgtataaatagtaccaaataaatgaaaaaacaaaaaaagttgcatactctgttatttctgctaagataccactattatgttgcacaaaatgttacgtaattagtcagagaaataaaaccattcaaatttgaccaaactattcctggtctggagattttgccttggtggagtcttgccgttttttcacaaaaagcctgctcatatcctctgtagcaacattgctcctgcatatataatctcaagttattcgattataattgttctaaacaagatattgcacctaattcaggagctagttctcatgaagatgctcataatgtcaacaattgataacttcctaaaccacatttcaagcacaaaataccctaaataactctttgaatgattgttaacaacactcatagcctttctccatagttttctagatttgagaaatatagtgaaaaaagagatgaaacaagcaaatatgatatatcattgactaaccttcccttgagctgaggaggcacaagcacattacccaaagtttcaggataattctttgaatgaggcaaatttcctcttggtagcttgggacgacgaggaagagaagaagcattcccactcaagtctctcttccttaatgcactctcagccattgcagctgcaacaacggaagcatggtctccgccagtcacctgagcgagtgtcggtgactccagaagaagcagagcatctggtagcttctcaacactctcgtcctgctcaaatctcctacaaaccccacaaaggaaactgtattcaatacccaaacttaacacaacacttgctttaaaaagtaacctctgacacattcaatatcagaactgatcgagatcggaatcaacaaaaggaactcactttggctacctaagaaacaaaactctgtacacagacatctatacaaaggtaaagaacagaacttgaagcctgaacctagatttatagctacatatgaatcgaaaagccctgcttcatcagcacacaaacaaagactgaacaatgagaaactaagctacatgaatcaaagttagtcatagctgtttaagattggttccagaaacaactcttcatattgaaagctctaattgcaaaccccaaaaagaaaaaaagaacacgaatccaagattggtaaaccctaaaatcactcactgcctctttggaggaaaagattgagctggagaaaccagacgcttttgcgtctgtgggagaggtttctcctcggcggctaaaacatcgtcgtcggatgaagaatcgtcgtagtcgaccagtgacatatcttccttaccaaaacggtgtcgcttgagccacgctggtccttaatagaagaaaccaatagattaccaaattttggttacaataacctatgttttgtcttgtaatattactcaaccaaaatgacaatatcttatgattagccaattttgaagttgagataaacaaacaagtgtaaacaaaaaaacgaaacaatatttgatgatacacatatgtgagtgtgaccctcaaaagtcaaaagaaacattggaacgtatgtagtatgtatatatacagggttcaatatccactcatctcaagctgctctgcttgttccagctaggtagagatctttctgaattaatgctgagatcgttcaatagagtattattattattgcatgatttcaaagggcctatgttaaatccccttaaccctggagaccgttgctggtatgcacttggtctagtgttactgccattgttggcaatccttactttgcttggtgcttcactcatcattgatgtcgtcaggcatagcttgttcttata

SEQ ID NO: 30173 - DNA, 1886 bp, Arabidopsis thaliana landsberg
aacgctagcctctatgtaataatcgagtcggtccaaatttattcatgtttcattttgtatatattttggggaaaattagagcgtaacgtcaattcgttgacaaaaaataaaataagcgtcatttctttcatatttattcaaactatgaaaacacttgctcgtgctgttgttacatacacacatgttcctcgttctcgaatctccacgaccaacgaaccaactgggtcccaaaagtataaggcacggaatatttcgggcgaaattgtcacaaaacgaaactactggggtaagttaaagtaaaataaaaacataaggtcacgttcgctaagtcttttttcttctcctctttatgacgacgtatctaccgccgcaactccgccgctagtttccacgccgatgcagcgattagaggtttcgtttgccacgcaagcattaggcttccgtcgttctcctccactctgtatccatctccaccgccagataacgccaatagcaaactcgcttgcttaaacgcgtctgatccgaggttaaccgggtcaaacccggcggatcccatacgttttcgccactgagccagcgtctcgtgtcgctcgatcctatcgcttccttccgtcgccaccacgttcaatatctgtctccctaagtaaacctccgacatgactcggtcttgactcggtatcacaacaccatcttcgagcgagtcgaacaagctcgagtaatagtgaagcgcttcgttaaaccggtctaagaaaacgtcaccgttatggttcgcttcttgttccaccactgttacgagacccggtttaaccgccttaaccgtcgctaacagcttttcgatcgaaccgggttgggataaaaccgggtgaagctcgaaaaccgaattaaccactagagtctccgattcggttcgggtctcgaacatatccggttctaaatcggataacctctccgtcgttagaccattgaatttgaattcgacgccgatggcttgagccagctgagctagcttccaacctaactcttgaatcccttctcgattcgacggattcccaacgccggtgagacgaaacgacggtggaccaccgggtcggagagctaaggcttgcattaacgccggccattgcataccttgattaagccctagatcgattacgtgtacgacacgcgacgtcgtaacagcttctagaatcgcctgattggccgtgaaatgagcgaatttcaggtagggacacgagtcgtagaagttcatctgaagaatctcttcgaaggaaggatcaatggcggcggcggaaggatgaatccggtaaattcgacgagctagggcttcggcgaagtaggtagcgactttccccatggctccggcttgagaagccgcgagtaatcccacgcgcttgacgagagcatccgcgaggctcagattctccagctgaaccgcctcggcgcaggccactagcgcctgaacgagtctaactcctgtctcctcgataagcaccacggaacgagttgactcgctggtcactgagtcacaccaaggaccgagtcgaatcctcttgttgctgttactattgctactgcaacactcatcgtcgtctgtgattggtctcagatcgcaaatccggttcgggtcaagatccgggtagtaattaagatccgagagcatgctctgagcccaaccgaacagatcataaggattgtaatgaccggtggcattgaagacatccttagaagaggcaatatcattgatcaaatatattacaaactgatcaagcttctgtgcaacatatgccatgtgtgaagatggaaccttgtaacgtaaaacagcaaaaaactcgtccatgttatcccctcccccaccaccacagaccattttctaacttaaacacata

SEQ ID NO: 30174 - DNA, 439 bp, Arabidopsis thaliana landsberg
caacactgcaataaccatgaagaaggcagccataagttacagcatccgggcaaacaccatttcttttcatcaaaccaacaatagtttttgcatcggatagcatgcccaatttacacaatccatccatcaagatattgtaagaataaatacttggtcctattcccttatcagtcatttgcttcaggactgtttcagcctctataaacttcccatgtctgaccaaaccctgcagccaaatattgtaactctgcaagctagcgagatcatcattttctctaatcgactcaaagagggtcttggcatcttccagcaaccctaccttacagaaacctttcaacatcaagttatatgttatactattgggacgaggaagacccagatactcatctagctccatatcactgaaaattctagacgcatcccaaacctttccttcttt

SEQ ID NO: 30175 - DNA, 1933 bp, Arabidopsis thaliana landsberg
acattatccgtgatactttaacaagagagttatatttagcttcgttagagatctctcaaccttgtacatcacaagatactataaggctaacatcttacacatgagcatggagacaatgatcaaaagagtatgccacaagatcattatttgattataaaattaaatactactgtccaaagtaggaagaaaatgaagaaagtgatgtgaagtcctactctacattactttaaattgatttttgatttaacgagaattttgtttttttgtccaaaagattagacgtgtctacatcagaaggctgttgtatttcagacgtgtctacaacagtattcgttcttacctttacctgtcatccttgatgagctgcacctcaaaaacttgcttgcgccatctgaactttcccatcagaaagaaaacagagtcatgcaaatccttaaccatcgtcctcccagtagtctaagtagtcaactcttggaggctgaaagcttgatatatccccttgaccccatccttttttaactcttgacagagaccttaacgcaattccactaccgtcatctctgcaaaatagcgattgatagagaaaacattcattaggtttccgacaagacagttaaaccgatattcttaatgtaaactcacttgaaaccaaagactctactgcctaatcatatacacgaatgcttactccaaatcttggaatctttttctttcctcaaaaaaccaaactttaaaaggagaaagcagaactacaaaacctccaataaaagcatcttaaaatacatattgaaacggcgcctataacaggagaaacaataaatgatgacaaaccagaaggagaaagtgtcatccatacctgtgtaatatattctgccagttgtttccaccattcttattatgctttttctggtgtatatcccttgcatttggatcgactttgtttgctacttcaccaactgaagccatttccatcatcttatcagcaaaactgtttgcctctttcttgtttcccatcttacctaagccatctatcacaggcatcaatgctgcagggtcaaatccatatcctctgtctatcatcttatgcaaaattccactagctacttctagttcatccttcttacataagctctcaacaagatctttataaagaaaagtccccaactcaaaacctctatctaaaacagcttcgagcaactccgtagcctttagtagttgccctgcagcaagcaactcattgaacatcaagctgtacaggccttctttctgtccacagatacttacagcagtctcaaagacttcttgggccatatcaaaatcagggaccttacagaacgcttcaatcaaatatttgaaggaaaatacatttggggctatgttcttttgcatcatttcatcaaggaggttagttgcatcttcaactttttctccctcacaaagatactggattgcagtattgtaggtgcatatatttggtgaaatgcccttttctttcatctcatccatcagtccatgaatttcaaaaatctggttttttatgcctaagcccaggatcagtgagttataagtctctaggctcttatgacaacctttcttctccatgtctttgagaacgcgaaatgcagatgatattttcccctgtttgcagaaatgatgaatgaaaatgttatatgcgaccgagtccggttgcagtttctctcccatcatctcggcaaacaaattttttgcttcagcaaaccttccagctttgcacaaaccattaagtaaagttgaatacgtgatcaggtcaggcaaacagttgttctcgatcaagctatcatccaccagtccgatatatgaattgcctaagttaccaagagcagcacttccatgcacccgcattcccttaactatctcaatagctttatctaattccccgcttccacagagtccg

SEQ ID NO: 30176 - DNA, 3051 bp, Arabidopsis thaliana landsberg
ttcgctagagttgttctagcagaggactttgttttcatagttgataactacaagaaaatctggttgtgcaatagtaactaaagtgatagtcattgggtaagaatcatggatgaagaagttaaacttttctcggatattgtatttcacaaaggttatatgtatgccttagacttaacaggagcagtttggtggattagtttatctgagtttggaatatttcaattcggaccttcaagtactccaatggactactgtgacattgatgagtgcaaagacaagaggttcgttgagtattgcggagatctatgcattgttcatcgattttctaggaaatttcgcataaagcgagttgatatagatatgacagttggtttcaaggtttataagatggacgaggaattggttgaatatgttgaggttaagtctttgggagataaggcttttgtgatggctacagatagttgtttctctgtcttggcgagagagtactatggatgtttggagaattcgatctattttacagagcaaaacaatgttaaagtgttcaagcttggtgatggtagtatcactaacatggttgattcttcttttcagagttgttttcagatgcttattcctcctttagtttgatcatgtttttctcatgaattttgatttctttttctcttgtgtccattagagtaaaaattgtattcttggttttagttttgcttgttactctttttttttctttcatatttttctgattttgttatttgttacttactttgctaagtaaactaaaattacaaaaggaacaagtgaaatttgcatactctgagagaacttttttagagtatacttggtgcatcgattacagaaccttctgcatgttactcagggcgaattgactccttattaataaccgatcaaaacgatgtgatatgtgccatgcacaattgatcactactataaaccattagattgttatcaatcattttttctagacattatagatttccgattagtaaaaccaaaactttaacacaaccaggaattaacgattaccaaaaagcaacagggaaaaaaaaacatttaccgaaaatatcaattatcgtttattgtcgaccggttgactaaattatggttagattgatcttttttggtttggttatcgagtatcgaccgataggtaagcagtcaaacggcgtcgtttctacattccgagaatcgccttcttcactttccgcgagcgtctagaggaagctgtcgacagattctttgaaatttgcccagaatcgatgaaacaatcataagcactcgaaatatcgtctctaaaaattttttagtttcctcgaggcgttgataggtgatcagagatatgaagaaatcgccgttgccggtgcagaatgtgcagagctccgataagaacgttgccggaaaagaagcattggtgaagcttttgagatggcatttcggtcatgctgatttcagagggaagcaattggaggctattcaagctgttgtatctggtaagtcgtaatttttctcttttactccggagaaaattagaatgattgttttagaattctctgttttgtgattgatgagattaggaagggattgcttttgcttgatgccaacgggaggaggaaaatcgatttgttatcagatacctgcattagctaaacctggaatcgtccttgttgtgtctcctttgattggtaaattttttttccctgattcgttaatggagaatctctgttttgattggtctctctaacgatgtgctttgtttctcgtgtttttcaacttctcagctttgatggtaagtgcattgtccttttcttattgtgttcttctcttttaagcttttttttgttaatggtttttgaagaaacgttttttgtttctacttaggaaaatcaagtaatggcgctgaaggagaaaggtattgctgctgagtatctctcatctacccaagctacacatgttaagaacaaggtgatttggctattgtgtgttttttggtctctgtgtatatatctatatacgacctgactctatgctttgtctattatctgacctctttcaccagtactctttcttaaaattctaaattcattccatgtgctttgctataacattgataaaatcactgggatgattgttttacttgagtattttatgttgataattccttgactttggtttagatccatgaagaccttgattctggaaaaccctcagtaagattgctgtatgttactccagaattgattgcgacgaaagggtttatgttgaagctgagaaaactccattccaggggtttgctaaatcttatagctatagacgaggtaaggccttgtaatgcctatactagagtaaccaggaaagcttaaggtgtttgacgtgaatgttggctttaattttcttgagtgtttatttgatttttcaggcgcattgcatctcatcatggggccacgacttcaggttcataattggtgattatgtcagtattcttgtccatgggcttactatagtctaacttgtgttctcacattacttacctatttatcgtcaactttcaaccttgagagattctttggcagatgttccggtgttggctctaactgctactgctgctcccaagtaattttccatttcagtgcttaaaaaacatgtgcgtaaattttagatctttttctcaacatcaattctttgcagagtacaaaaggatgttatcgactccttgaatttgcggaatcctttggtcctcaagtcttctttcaatcgcccaaatatcttctatgaaggtttctcatcgagctcctagcttgtttaatgatattttctctctgtaaactgttatgaagtattccaaatattgttttgctttagaatctttcattactatagaaaggatttcttagatttgcttttcctatcatctaaataagttttttgtcgtgcagttctgtacacagatcttttggataatgccttatactgattttgggccaacttgcctcaagtctatgtggaaaattttttgatgcactttttttattt

SEQ ID NO: 30177 - DNA, 4692 bp, Arabidopsis thaliana landsberg
ctacaggagtatattgcaattgacgacaaataaaaaaatatttgttgatcaaattttagggctaagtttttcatttacaattttcccacgatactgcaagagaactaagtgttttatttacactaaccactctgtaagtttaaaaataaagcttgaggaaccgacgtaaacactactgtagaagaggaggttttaacaaagtcactgcatcaacgttatcatcagctaaagtacaactgtagaaaaaccctaatacactaattcctaaaggcttaaaccaaaccgacaaaatttacataagaaaaacattggtgaatctaaagccgaactacaagcaaacaaccaaactacttattaaaactgattaaggaatgtttggatttttagcattttaacattactctcttcacattctccttcaaggctggtaaaggcttcacacctacgtctccgacagttgttgttttcgtgttctttttacccggtgatccgttgtcttgcattatctccggttccaggtagaaacgtgctcgaaatgctgcaagatgagcataatacgctggaggaactgtacaacatcagaaaataaaagaacatatgagtttgctgattttcgtcatatttgcgggtacacgaagaagaagaagaaatgttgttatttacctatagagaccgaccgagtgcaccgcgcataggtataacagagattgttagtcagagattgaataccatctgctgtgaaattgttctcgtcccaaagaacatggtaatgtgcaggcctgcttgttccctagatcatacaacaaacacaaacagtgccattttatctgtatagttacggaaaaaggtcatattaacggatatttcgatagttgtttcgtacctgaatacccgcatggctacaaaggtagaagtcgaattcagttggatgacatattttagtgtcaactacagtacctgaaacaaaaggtggcaaagaagcagttagttagttagttaattatttctgttatgatcttctttcaaccgtttttaagaactaacctggtaagatatttccgcttcggtcagtactgtttttgtctcggtgattattagcaaacaaacgagtgtggtgacgcttctgtacaactatgaatgtcaccggtggctgataattcggttcaagcgatgcacaagcctaaacaaacacaaacccgtttccgattatgtaaaatgttttgctaactttgtggcggattcatttcatgctatgcacaaaagtttttacctttcgaattgcatccaactcatagagtaaaacttgatagaattgcccttcgcttactccatcactgcgcgaataaaacaaccatgagaactaattgtgggttttagatataattcttttacttaaatgagcaaaaagagacttaccgataaaagataattcgaagcggtttttgccctgttgcttttctaaatgagataagaaggtccctgtagaaagcaagcaaaaaaaccttgagatacaccgataaaatcaaactacaaaaaccgaaatattgcgagttattacctgatcataccgccactaacagtaccgcgaacaggatcttgccatgttttatacaaatcttgtataagttcttgcctgtgagcttgagcacaaactaaacccgcatattttgtcacttcaggccagtcttgagaagcaacaacctaaagaaaacaaaagaaaaaaactgagtataatgaatttcgatgctccactacttgataaaagtgtataatccttacagcagcgattgaagggcttgactcttccccgttctctgggtgagtcacgtctgcgccaaaaatgattgtcggtatatcgctaaccagtggaattctacagcttatggcgtctactagaactgtgttccttcctcccatctgaaaccaaacatagaaagatctgagattcataatactaaaaacaatcgaaaatcttcgatacagcagtaaaaactatttacctttacgttgattttaagggatacatttgccagatactgtttgctaatcttgaacacatgttttgtgagacaacattgagatatcaaaccaagctcggtttcacagattctcttaagatcacctgagattacaagaaacatttcgttttcatcaaaaccattactaaagaaggcaaaagggttaagtttatggatgtcgaaataataccataaagtgaaccgttgttatcaggtaatattgccagcagaagctctaactctttgcctttggttttgttcattgaagtgtgataaacatgctttagagctttctcgacttgatcgggcctcgcactatatattggtatcacgggttctggattaaactcctacaatgataaacgaagcaaagctttctgataagaatcacatcgagttaaaagagaattcaaacaatgcagcaagaaaagaaaaaaagatgaatattattaccatgcctgagacttcacacatctgaccaagttcattacaaaatccacgagcaacgttttcttgaacgctgcgtgagaagttaacacaggcccatctgctcacagtcatcccgttgatcattttcttgttcatcatattccactgaccaacttgcgggagacaatctttttctttcccgttctcgtgatacttaagctgtagcaagcaaagagagacgaattaacataacagtattctcatagtatgagcattcagagatctgtttaggttttttacccatggagctggaagaatacgagcttcaacagaagctaacttttcgcttatgttcatgccaaactcctttgcatatggatcttgatcatatgcgttgtgttggacagtctataaaacatttttgacaacaagattaatcctcacttctaagttctaactcacaaagaaccatataagatacatgactaaaaaattacccgcaaaatatcgttttctctgtccctcggcctttggcatgtaactttcaagagagcagtaatctgcttctcattcaaccttttcgtgtaccgttgtccctcgacaattttgcatgcctacattggaaattgaatcagcgaaaatagccaagagctgaaatgtgaagtcttgaaacaaacaaaccagcagtttacggtttacctccatcggcaaatagcttgccttcttttggtttccaacttggagacatggcaaatgcgtgtgctggatcgtgaatccatacatctcttggaaatactcaataactgacttcatagtacagttctcatctactggaaacctaagaatataaaccagaaattaatctcaatgaaacaagccttagtaatcagagagtaagtaaaaagaaaatactcacattagctctcttgttggttgagttgttaaacccgcaacacggtatttccttcttacattcgctctgtgagtaacctctactttcactcctctaagacccttcttaatctgttaaaaattcccaagaaaaaaaacattcttgaggaaacaatcaaggacttgagacaagatataataagatgaagagacttgtgtaccttgacgcgatcagaatccgacaatggcttcgacaagacatcctttccaagaagctgtgctacaaactctatcactggaagaggctcgatgaatgcagctgaagccatatctacaaagtaaggagaataacattaagattgggctgacttataaaataaaaccaaaactgtaacaatctcttaagtcaaatctttaccgatatttagtgataaacccatttgagttgggctaatactctggtaaaacccacaccatgactctaacccttcaccgagtcgctgcggtgttttaatatcaggcgaaaagaaagatcttccaacgggacaaaacctgttaaccgacaactccctgagtacaatatcaagaatctgcaccgcctcttgcggacaatctgcccgtttaccagctagaaactcgcctaagtgatgcatatttgcccgtgcaacaaacttgattgccaccttatatgatctctcccttctacaaagcaaaatgtgtcaatttcaatataaaactacacataacaaaatcaatcacctaaagaaccttagacacttacttagggccattgatgataccgtcatcttcatcaacaatcttaacactgaactccttccaagtaaaaggaagttctccagcagtgtaaagacttttccggccatcgtaagccggaagtctcctcccgagatcagactctttgtaaagtctaactaactcagcaattatagctctgttaacactctttgatgacacttcaggagtaattgtaacctgcaaaacattaaccaaatgtcaatggacccaaataagcaataagaacaacattaaaatctaactctctctccttcattaaatttcaaaccttttttcaggaaaccatctaaggttcaagctttgtttctcattacagcaaaaactaaaaaaaaggcaaaaaaaatcttaactttttctaataaaaacttacatcatactgattcaaatccttggtaggcaaatcagcgagaaagtggttagctttaacaatgcatttagttccaagtgttccaaatccaggtcttggagcaaagtttgagtttttacgaacacccatctgcatctgatgattcacagcgacaatctcaccggcggtggc

SEQ ID NO: 30178 - DNA, 1564 bp, Arabidopsis thaliana landsberg
ctagaagagaggttttgccttaccgtttccggtgacactgtttatgttatggcggtttccggcagctgttgcagttatgtttacatgaggcggctctagctcgaattggtaatagagtctaccatcgtgttctgcaacattggaacttaacaccttcccttctacgttttctccaataacttctggtccaaacgcgttaatcaccttcgctggttgtccaatattttcaatcttaacatcgtccccgaggtctgtataagtggaacacacaaatcaatcaatctacgagtacaaatagacaagattgcattgcctatataactcaaaagagtaaagttgatgaatctttaatagcagagacaacttactatctgcaaatctaagaacaggagctacaataacagacaaacggccttctttaggactagcaaatctcaagtcaatctcggtgccaccaagatcagcgatcgatacaggtacctaaatttgatacaacaatgaaaagaatctcaaagtatgactaaaaaccatagaaacgaagaaacaagagccaagggacaaaacctcattccaatcttgaggaaccgaaaaggcgtaagggataataggactccaaccaacaccatgccctcctgacttctcgtctggtctacggtatgttctccaacctgtctgagcattacaattacattacaccaacaaattcccaactactatactgtcataatacaactccaagaatcaatgtccaaagcctaaagatttatgaatctatgatccaatagtaacattctcaagaagaagaaagagtgtacgaataaagctacagagtaagagcaagacaagaagaagaggaatcaagaacagagtgaaacgaaccttcttcatcaggttcggacagaccaggaactctcccagcgagaagaccttgtttaacgacagccaatccttcccttggaaatgctaaagccgtcgtcgaggagaccaaccctgacgccattaccgatcttctactcaaaaccctagcacaccactcgtcttcgcatcctcccggactcgttttcggaatctcactattacttctttgatgagcagagattttcttgtgaccggaaaagttgacgcagtaccggagcagagctgtttccatcattctccggcgaagttcgagaattgtgatgtgtttgtttgttgatcaacagattcgtggctctcacctcttttgtgatggatactaaccattttgctagcctcacacgtgtcaatgtcacttactgtaaataaatcacataataagttcgatagagttgattgacaaaaaaaaaaaaaaaaaaaaagttcgatagagttttcagttttgattatattattggttaatgctgattaattcaaaagtagagttttggttaatataaatctaaaataatcttaaaaaatgcatattgaatttttttctgtcattataagaatgcatattgaattacaaggaaataaataaaataaactagaatattgaatgtacagaattaataaaccatagtatgtattttgcaaaataagtagg

SEQ ID NO: 30179 - DNA, 1728 bp, Arabidopsis thaliana landsberg
atcactcatcttcgaaaactctttaaaattctcaagagacggtttcaattccaatggattgctccaaccaaagcttccatctccaaaatacgccacaggttatttacctttctgcattgtcttcaaagccaagtctgaagcatttaaagaatcataaatctgacctggccaccattgttgactattgacttcttctccccaaacaaaatctcccacatgaaacacattttctaattcttcaaaattatctctcaatgaagaaacctcactcatcacataatcttcaatttgttcagagtcttccttaacattctccatcttaacatcggtctccttcaatttgttgtcatcagaaccctcgttctcagaaaccctagacccagtcggtagaatattccccatagaaccagaaagattcttcttgattctctacatattcaaacaacaatgattagaaaccaaacataaacctaagacaaacagaagaaacttggtaattgaaaaaaaagggttttttcacgagaaaaacacgtaaagttaacacctttcgaagaataaggaaatcaaaatcacctgaataagaagaaggaagaagcagcgaatctagaaaccaccttcttcctcgattcctgcggcgtaaagttttcgtttttttcctctggagaataaaaaaacgagaagaaaaaggtttagacttgtctgattaatgttttagatttccttaatattcgttttcgatttcgtttatcattacgttatttaacacaatgttaaactcatgtattatagataaagcaagtttataaaaatatatcagatttttatgcaaaagcaagtttactctgttttgtgtgttttttgagctaggcatttcaacaaacaggttatgtgcatctagaggaagaaattgttgaagactaaatactgtaatacgaaaccaaattgattcaaagaacaacaatttctcaacagctgaatcaacaactcaaacacaaactatactaaacaacaaaaagactcataaattctgaaaatatcacttttttttttccgattgttgaagaaacttaagcaatggagactttagcaccagcttcttcaagagtcttcttagcttcttcagcttcatctttagtgataccttctttaaacttctttggtaatccttcgattagctccttagcttccttcaacgccaagctagttaaagccctaacagctttaatcactgcaatacgagaactactcggaacttcattgataaccacatcgaactctgtttgctcctccactacagccgccgcaccaccgtcggctggagcagcaacagccgctgctgcgggggctaaggagagtggggagacaccgaatttgtcttggagatagtcgacgaggatacgagcttcttcgagggttaaggaggagatttcggatccgattttctcgattttctccggagcttcgacggcggagataggacggaggttgattgcacggtggctagaagaagagctgagacgaaatgggaattcgattgcggtgggtttggaaaggaagtgatgagtggaagcgcaagtgagaggagaagaggaacggattgttgttgcgattgagagagtcgtcgacgccattgtttctcactctcttcttcttcttattcctctgaagctttgggatttgttttgtgtgtctctgtgagtgtgtttgtagaagatgaggaggataaaa

SEQ ID NO: 30180 - DNA, 2838 bp, Arabidopsis thaliana landsberg
atgtataccgggagataaaaggccaactaacacctagttggtgttgttctatctcatcttgccttttgatctcatcctctccaataacgtagatgttgacggctacgtttcttttatctgccaatacttcctcacaacatactacgatcctattattcttatcaatgaaatgcaccggataagaaagattctcaaaagccagcaataccgggagatcaggtcttgtcacactaaataacttggtccataagatactcactccgttcttaaccttgttagtaacccatacatcgatctttgatgtttctttgctttggtgtaacaaagaaagattgtctcctttgaaagctgataaagctacaacattatgtacatcatacctaacgggaagagagcacaagggctcaaatgtctctgtagagaagttaaagctttggatgaagatgtcgggtttacggttccatttagcaatccaatacatgtttcctttgagtgacaaacctttacaaggtggatctatagaccaatccaaacgagtatcatcaacaattctccatgaatcagatttgaaatcatatatctgaatcttcggttcataagaccccgcgatttcactctcgtcttcaatctctccatcgaaaatccttagaagtttgtactcatcacgacatacattgtcatatccaaaaccatagaaatcattactcgaataaaaatccattggttcgatccatttgactcgactcaaaaacgggttccaaaccgcgagtttgtagcttcttgatcgttcgttcttgcatctacataacaataatccatcacaatggaccatagtggagatttgagctacattgtcgaactcttgcgggattggtgaagatgaacgagctcctttcactggatcgatgatctgaacgatacgatcgattcttatgaaacgttcttgttcttgatttagatccaaggatttgtagatgaatctcttgtccttcaagagagcaaaccattgtttacacgtcaatttgaattgcgtcaaatattcgactggaatcctacaacatatttcttctattatatcaataggaagcaacgaacgttcacatgaagccatgcaaaaacaaattgagaaaaaaaatcagaaaatttatgacaagtggtcttgcttcttatactacgtcgtgaatggatggtaataaacaattaaatgttacctctagtttttttttttgagagaatggtttttatccgtatatggcttattacaagtttcctcctttttcgagtttggtttgaggtctatattgaagatgagatactaaaaattgaggtaaattctttagtgtgaaggaaaattagtaaatacgatacgtttggaattgtttactactaaaaaaaaaattgttttagaccaagccagtccgacaaaaaggcgtgtgaatcataagaagtatcacatgatgctagacataaaagatttttcaaacatgacaaaacaaattgtgagtgtcttagtcatgccatttgaagtagaacgaaacttagtgatgagacacgtaacatcagtgagaatcaagatctaacttcggacttatcgtacgtaccacgtccacctaagtgttatccatatctactacatgtctatcttcattcaattttttttttgcattaacttgtaaacatagtgcataataattagaatcaagatttgaatccaattcgcttactaaatcctaaatgttaaaagcatacatgtttttcaaatcctacttttaggtgctaagttttttttctaaggtagttagagattgttagattttatatcattgaactgatcatcagtctctatactaacttctagatctcattgaatgtttactcaattttttttaattttttgtttggataatcgtctgctcgtggttttgatgcgtacgaacactcgtcaccatgcatgtcaagctctccttcctatataaactaaaaccacccattattgtcctcaaaaacaaacacatcaacaaaacaacaagaaaaaatggcaataaccaacaaattaatcataacacttcttctccttatctccatagctgtcgtccactgcttatccttccgtgtggagatcgacgagttcgagccaccacagcaaggagaacaagaaggtccccgtcgccgtcctggtggtggctctggcgagggatgggaggaagagtcgacgaatcatccataccacttcaggaagcggagtttcagtgattggttccagtcaaaggaaggttttgtgagagtgctgcctaagttcacaaaacatgcaccggctctcttccgaggaatcgagaactacagattctcgttggtggagatggagccaacaactttctttgtgcctcaccatttggatgccgatgctgtttttatagtcctacaaggtaaaggagtgatcgagtttgtgacggataaaacaaaagaatcgttccacataactaaaggtgatgtggtaagaatcccttctggtgtcaccaactttatcaccaacactaaccagacggttcctctccgcctcgcccagatcaccgtccctgtcaacaatcccggcaactacaaggttcatatttattgttctattagtcattcttatgtatcttttataccaagatcagtagtatatagttatagcgtgagcatagaggtttgttttagtgatgttgttgtgttattactccggttttgcatgttgataagaccaaaaaaacaaaaatagtgacatcgttgtgtcaccattcggagttatccgagttattgcgtaatgttcataaaataactaacattgtttaatcttga

SEQ ID NO: 30181 - DNA, 1926 bp, Arabidopsis thaliana landsberg
tagttaattttgttaagcatcatttcaactattaattattacttgctgatattggaaaccttttgtgattagccatacatttggattaaattttggtaaagacttgttaataattttgtttgcatcatgaactattccaatacaacgattagttgcattggaaaacatttatatctactaataattttttgatcaaagtttggtaaatactacttgttactataggccatcacacggtttttaatataagcatatccataatgatgcttgtgtacaatttgaatcagaatatctaaccgaagccaaaaaaaaagagctccattgttaaaagttctcatttaaaagaaatttgaatctaaatgaactcaattatcgttatctctcgcttgacatggattatcaatgttgttaaagcccataaaatgaaaatggtgctgtgctttgtattttacagctatcatgtcaaacagtaagttaaatgaattagttgaaactcgtaactcacgtgtattcatttttttcttttgaggtgtcactactcactagtccaaaacataaataaagttcaacagttaactgttcttatgtcggaattgtcttaaaacgacatgacccacagtaataatatacctttatatttctctatatatattggatcgacagaatatgaaataatgtttatatttacccttgatgttattgcgattgtctataatataaatttaaatgctaagtttttttttgtatatatggaataatggtttgcttcagtctttgtaatttataaatttataaattgtgccaaatgtttggcaaaaaacataaataatgtgccaagtatattattttctggcgagtgattcaattcattttttatattttgttccatcctcttcttatacctttgcttgcaaatatgaaaatatgaactataatgtgttatcaatcagatgttccagttcatgtagagttgtagacgcatataaatttggttttcttgattcataaatgatttacgataaatcataacaagttaaagtgtttacatttatagattggatactagtaagctgataagctgaggtttgagacacttaggaagatcgtgggtgttgttacgccggttcaagcggcatagtatttgctcgccgagtaaagattaaacttgtcgttgcaagagtggggaagagttagagaaaggcgtgggtgtgcacgtggggaggatgcaaccgccgcaagaggcggagccgggaagtcaaacttaaccacttgttgatgtgagtacgtgagtttgaggtacgtatagtagataatctttttgtaatattgtctaagtagagaagagatcatgttaggtgtcttaatgtgtatacgagagtgagacgtagtagtagagtaccactaccgacatgatgcatgcctaagcttttgctgttgtcgtcttatacacataaggaataacaaaagctccaacaagtctagcgacgcttactctttgtctatgaatacagacaagtttttttcttataccatgatttgtttttgtttatttgagttatttttttcactgtcgagttactaaaatactactagtttatacgtttcatatgaaatttatggggttttttttttgcacgacttagatattattttttaccaacttaaatttatgggtttttcttgccaacataatttgttttgttttattttgattgtttttctgtaaaattttagatgtacttgtatgattcagaaaagaagatattatttcatttttcaaagtgaagtatgtccaaaataattttgtcaggcactagtattattcatctgcgttttgtccgtttacatataaactcaaatatctacaaaccaagagcgataacatccaatttaataaaggttaaagcacgatttcacaaaaaccca

SEQ ID NO: 30182 - DNA, 691 bp, Arabidopsis thaliana landsberg
tattacaaggtttttggtgttgacaacactcatgctgaggttgcttcggttggtaaaaccgaagaacagctgaagaaagaaggtgtaagttaccgggttgggaaattcccgtttatggcgaatagcagagctaaggctattgataatgcagaaggattggttaagattctggctgataaggagactgataagatcttgggcgatcacaattatggcgccaaacgctggagagctgattcatgaggctgttcttgcgattaactacgatgcatcaagtgaagacattgctcgagtctgtcacgctcatcccaccatgagtgaggctatcaaggaagctgccatggctacctatgacaagcccattcacatgtagaagccctcaggtacatcatggtttggtgttgattctgtttcggtggatgactttcttggttcttcgggttttaatttttctttggcgtgtgcagatgcgtatactcagagatgaggtttgggaggtagcatgaaatcaatgccgctactacatgcgcctttaataggactttggctcttacagcccaacattagtttctgttggaagtccaatgcgcgaagaccttgtacgtcgagggtgattgcagtatgatcagtgggtagccacgtgatgcaaatggggggggcaatgtgcggacttgcgcagagttgctgaagt

SEQ ID NO: 30183 - DNA, 3211 bp, Arabidopsis thaliana landsberg
ctcttctttatttcatttttgtcagattattgttaatttgtttttttgtttggttcctctgaatttcgttctattttctcgaatttcgatgttactttgccttctccagattactctttttcttggaaatacttgcttttgccaaagaaggttaatgtgtttttttcttttcatattttgttgttttggtcgatagtgttctcacagtttgattggcagttgatttcgattcctttgcatcacaatcaatattaaagtaagcatatcccagttattataccaaaaaaagaaaaagaatgttttgttttgtttttatccaagaccttgcgaatacaagacaaagaagagaatgatgttgttgagaatagttttacataaggttatcagattaaactagcaaggatattatctttaatatatacaaaaaaagtgacgaaactttttatacatagtttcaaataacacgaagttgcccaaatatattcaaacaacgcaatatcttcaaaacaaaatacgtatacaagaatgtggactatcacaaaaaaagccagtaaaattcgtatatcatgaaaatttgtatgatctacgaacatgttactccataaggtatttgcctgcaatcactgagatatggcatgaacaatggacgacatataatgtgtagaaacactagctgctctcatatgaggagacgagaggtaaaaaggctaccaaagaaaaacagaaccacagtttgaagactgataaacagagttgccaaaacgtattataaggttttatatatgttacaagcagaataatccagaaacagcagcaacattttgtaatctctctatctatacaaaagttaaagttgccactccagcaaaaggagtaaaagaaggcacaaattctgcaaagaagccaatcttgtcataacttgctagggatcacatcacgggaaagcttggtcggctttacaaacatgtcttgggtctctgcaatgaacttggcaaactgagatcctttcgtttgtttgttattaccatctttgagtaacttaggcagattgggtagagactgctcagtctttggtgatagtgatggcatcaaagcccaaatggatgagagttcttcgctaggttgatcaagtgtttgaaggatcgttgtgttctgcatatctgttttaagacgggaacaataataagcaaacactttttgacacatctactctctattctgcttccataagtgaaacaaaccaacaagattagacaaaccttctgcaaacttgaagattggtgccaagactgcacatgggatgctgaagttgagatgcggtataacagtccccgctccatgtcttgcgttgctgcagatacagaaaacatagcaatgaacaatcaactacatatcatcatgattaaagaagaactgtccgtttctaatgacacatctcagcaatggatctaagagacctacgtagtcgtatttgagagtgattgtctgatacctggtaacaagtccaatcatatggccacttgaattgagaacagcaccaccactgcctccaggatgcacagcagctgttgtttcgagcatagcggggaactctgcgacttcttgagaaatggattgcgtattcaatctcctctttgcgtgaactacctttgctacaactccagaacaaatagaaggagaaagccctaataacaaacacagaagaatagagaggatcatttctttcttccatttaaggacacttggcacatgtaaggcacaagagaatgtaatttcagggtgtgcaaagaaatctatgcaagattatggaagcacaacataagcaagaattgagcaaaaatctgattcaacaagacaattctaggattaacggagtctttaccacatcttggtccgaagagtccatgtccaacaacatgcgctgttgtacccaaaggaggagaagaaaaattggcagtaataggttggagctttccagggacatattctagctgcagtaaggcaatatctaattgttccttgcaaatatagaccacgtttgcaggacaccaagtccaagaatctaggtgacacaaacgcacacgtatgtctctatgcccagtctgaaggaaattgtgtttgtattccctgatgttctctccaacagacgaataatgatttcgtggagctttccgtggcaatgtttgactcttctgttcccaaaatttacttcccgtggaagaaaattcctcggctcctaagacatagggtttaaatccttcaccatatacaccaccttttccatacctccacggctcaagcaggtgagcatttgttagtatgagaccatgttcgttaagaataataccagaagcccaaacaccatcattgaccgtaataagacaaactgattccatcgccttctcaatagccacttgtgcaggaatactagcatctgatttaacacttagtacttcactcccccactgacttgcttttccttctacagatggttcctcaagcagcaagtggctgcaagcagttgtgattgctccccatggaaccaccagctgctaccgaaggctacagttttgcatgaaacattacaataaaacttcaatggacataaaggaaatgaggctgccgttgacaaacctgaatttcaacgccgctattcttttgccttagtggtctaatcaaaatgccaattaagtgcccattcttatcaaacaccggagccccttccattcctgaaagaaattgaaccggaacggaacatgttttagctcttaagatgaaacaaatagagcatatataagaactattgataatcgtacataccagggagacatcgaacatcagctatcatcagtgacttctttagggatccagaaggatagctattcgcaatggaaccagttgatacgctgtttcaaaccagtttagattcccggagttaaatgctgacactatcaagagaaaggaaatcatgatgacctctagtcgattaaaatacagtaacgctagtgtagccataattcacctgttaaaaaagttaacaggtgaaaggattccaaagggagagcctagtgctacaagtgtatcacccttgctacttgatgaagcaaaattcatgcttggttgaccctgatttacaaaatatttgcgtcacaaagatgaaccataaatcagaaagaaggaaaccgggaggaaaatcagggaaatatttacc

SEQ ID NO: 30184 - DNA, 2058 bp, Arabidopsis thaliana landsberg
  unsure (1)..(2058): unsure at all n locations
tgtgagcctgtaattttaacatgtatattttgaaatggtttttatataaagggtcgtcgaaaagattgttgtaccgttccaaagccggatacacgattccgtgctatgtcaaagagaagcatcaatcatcaggaagttggtgtgagatacctccatcaaacttgaagttacgtggcgaaacttatttcaagtatattccttaacttctatgtttatatatacatatatgtatgcatttaaccggctctaagtggatgtaaactgttaatacaatgataaatttgtagagataaacgaaaacacccggctccaaaccaatgtccatacactccaattggtgttgacttgtttgtgtgtccaaggaagattgatcatatagcccaacacattgagctccccaaaatcaaagctgaggcaaacctccctgctcttctaattgtcaacatccaggtaaaaaacactaaagaaagtttcttagatcaaaagagatgtgttttcaagactctaatgaatctggcttttgtagttgccaacttatccagccgcaatgtttctcggtgatagtaacggagaaggcatgagcattgtactttactttaaactacgagaaaatttcaaaaatgaaatctctcaacaataccaagacagcatcaaggttaaccatgaaagacctaaagaccgtttcatttttttaaaaccattttttgtgaatgcgcgcattgatctttatagatggtttgttacagaaactagtggaggatgagatggaaaaagtgaaagggtttgcaaaagaaaacatcgttccgtttcgtgaacggcttaaaatagtagccggattagttaacccagaggaactcagtctgagttctactgaaaagaagcttatacaagcttacaatgaaaaacccgtgctttctcgccctcaacacaacttcttcaaggtttttataaaatcaccatatatactctttctaaccaacaaaacaccatttggtcacccaattatcatatgatcggttcggtctctctctgtccagggtcctaactactttgagattgatttggacgtgcatcggtttagctacctttcaagaaaagggcttgaagcattcagagatcgacttaaaaatggaactcttgatctcggcttaactatccaagtaatgtttttgttatcatattttatacgacactattcttgttgaacgatgtagagaattaaaaacttgtttttttttgcaaataggctcaaaaacaagaggagttaccagaaaaggtcttatgttgtctaagattgagcaagattgactttgttgacaacggtcaaattccttcacttttaattcgtgaagaaggagaatcattccctttgtgatcttcaatgttggatgaagttgttttgcattaaagagttgtgtgttgtttgccaatgttgtaataagtaaataatctgatgtctctactgtctactaaatatgagaataatcttggaaaaaaacaactttaacgagggaaaaatgtcatgctctatttttttttttttagattcctctaaaaatgacaaactttttgttacaatattttcctctattacatcacaaaacgaagaggactagaaacaaacaatttgagtattaatggaatttacttattttcaagtaacgtttctttcttttgtttcctcttttgtctaacaacgatgaaaaaagtggactttttgtctttcttagtagtttgcctttccggtttatctgtcatcttgttctgcaaaacaaaagaaacccaaaactggtttagtgtggatgaagaggactaatcagactatttccggtttattatcaggttatttccggtttacccctctgtaaatgggattttctgacannnnnnnnnnnnnnnnnnnnnnncctttgcaaaatctcgtcaatctttcctgatttaaaaatcaacggtcctgatatgctctgttttccacattgtagatgctccctgtacaccaaacaatcacaaacattttaacttcaaatatatttttgtattagtctcaaagattttaac

SEQ ID NO: 30185 - DNA, 3361 bp, Arabidopsis thaliana landsberg
  unsure (1)..(3361): unsure at all n locations
attaaaattcaaatgtaggacccagtaagaattaaaagaacacaaaaacgtgaaccaagaaaaaattgtattcatattcatctaagataatcagactaagcagtaagcacatagggttaagaaattttttaatcatgcatacattgttatagacaaacagaagaagcaaacgagcagacaaaagactgtagcaccaaaagagccatgtgaagctgagctgtaaatgttcagctgatcaaaagccccaaaacagataacaattataaaaaataaaaacataaaattataaaatctatctttctggattcagattttagggtttgactaaaactctgctaacgtttgtcttcttgtggtactctaactcacgtgcttcacttctagtcctaatggaattttcccacgtttctccaactagggttttgacgcgtggtacttttatacttctacgtaagtggacataaaagttgtgtacaaaacaatattttcggaatgtgcaaaaaccatatgtttcttgagtgcaattgcattttttttttcttaggttcagatcctgaaagtttttcagatcgagtttctctagtgaatacgtgtttagttcccatttttttacgagaagaggtaatgttaccaatcaaatacattataacaccttacagtttttttatatattaaagaagcaaggagctaaaactagagtaggatttacatttttaaaaaagttgtaaagcataagggaatctagacatatagataatatcagaggacttttgtggtggataagtaagttgtatctaagttttattttggctgtcttcttgtccccaattttctctacatcttctgtcttcttcctcttacttaactctctctttcatttttgttatttatttaacaataaattaccttttcacctcactaatctgatttcttaacacttaagtcctccaccagcaaaaaagacaaactaacacgtccaattattgttgcatttttacttttatctttaaataattctacactaatttcaggatcctgcaaaaacgatagaagaatgaccactaaactaacatcatgttagttatttctacatttgaggaagaaagacaaatatttatgatggatttttaacgatctggttcggtcagactatgccaaagatgggtattttaaggaccatataaaataggccatatgacttttcaaagttttggcttcactggtcttatcatatgatcatgcatacatacatattgaccgttgccaaaatattagacaaaaatgaacatatatgatcgttcgatcttacgaacgcatctcctttatggtccagatttatagattcacttttcttttgtggtcttaagatcaaactcgtccaaaccaataataaacatgcatgcttttgatcttttaaacatcctaagtcgagttcataatacaccatatcatgtgatcatgtgaagcaaaatactaccaaatgtgcataaaattagcataaaatgtctcattgttcaaatactctaatctcatacaaaatcatcatcgtgatttacagaaactagatttggtctttgcaaagacattttaatctgagcatcatcaatgttactattaccatgtaaacgcttataagtagacaacttcactctttttgtggtctcgttgagagataacggctgcagcggttcccgaggtctttgttgtggtttgttaaaggcacgcttatttacaggttggttccgattgtgctcttcggactccaccgtttttggactgacatttgattcgatgggaacgagcttcccatctacctggtttgtgaaaacaaacgtcacctgcaatgtttttaataaaccatgaaaatagttatcataaagttattggcttttcgaaaaatctgacataagatgtagagtttatgattataagattgaaaaaacttggagacaactcacctcgtcacctgctgaagcttgcagtatagcatctggaacggatttgaggtnaaagtgatgaccccagcttcctagatcttcttccaatggagtgcccacctaagaatattcatgggaaaaaaactttgtagatgaatcggatgtaaaaagacatgagcagagtttgtaactaacaatggaattgatgaagaaatagctcaaaacagacttatatttaatgcaggactcagtaacaagcacaagaagggacctgtctctcagagttttttaacaagttaaagcatcctgcatcttttgcaaatccgcctatgtcttcttggtcaatctggcaagcattgtcatctacattgttctcattcccttcttcgatattctcagtaccagaggcatcattttggcacctgctgcagctcatcttttcatggatttcagacctagccacattaccagaaaacaggctttgagataaaccatttgaatgtgtatcatcttgaggtacaaaatctgtccccaaatgtggatagagaaacgatgttctgagtgggcataaaacattccctgatttcagaagaaacacatacctaacatccccatggaaggaaaataaatctcgtagatcctctgtagaaagtaagttcccctggaaaatcaaagatgttgtggttgatattcaataattagacacaaaatgactaatagatgaagcatataacattccagcaagaacctgtctcgtgctgttatccgtctgttcatgctgaataactttttgaagcccttcttttgacatctggcgctggtaaacctaccaatgtaccacaagaaaacaaatatgaatctgaggtaagcaaactcccccaaggaaacttgagtaacaagttcggctagttatgcagtaccttttcttcaatagttccagtactaagaaacctgtagacatatactcttttcttttgcccatccctccaaactctagcagcagcctgttttgacagcgaaataatgcatgtacagcacaatcgatcatcttttatcaatataaagttgaaacatatctaaggggaaattaggatggtaattacttgtttatcattggcaggattccaatcaggatcgaacaaaacaagtcgattagcaccaattaaatttaatccacagccacccgccttgctgcttaagagaaatgcaaactcatcctaccaaaaccaaaagtcaaaccaggtgtctactcaggttcgaaacaacggcataaatagataagtcatgtacctttgttgggtcgttcaaccggttaacaagcttctgcctcttgctgattgttgttgatccatccagcctcagaaaaggatatcttctttcacgacagagttgagcaaaaagatccaatgtctagtgcaaaaggt

SEQ ID NO: 30186 - DNA, 2576 bp, Arabidopsis thaliana landsberg
  unsure (1)..(2576): unsure at all n locations
catctcttgacacggacacttctttaaacaatgaaagcgtatatttttatcccgagaactcaagccctatcgatcttaactctagaggacaacactcagttcttatctccattcatcgaacggcggagcgtttatacatcagtcttcctcgaaaagctttaccaacagataggttcacacagctcacaaccccttcactgactggagtatttggcagttagggtttcaaaatccccgccatatttcttctacaatcgaagtgttaatggagtctacagcggctgaacaagacgagagaaaaattgtatcggtagcatcgaacgctagccaggacatcaaaacggctgctgctgcatcgcggatcagtagccaaaacggcgcttctccatctccgtcgctcaactccaaggacttcatcgtctcagcagcagctaacatcgcttctcagccgttacagaactacgattcgaacgtttggggagtactcaccgcaatttcaagcaatgctcgcaaacgccggcaggtttgtttctctcttacaaaacccatattctttcgaattccaactttaattatgctcagtgttttggtattttggaactttaggtctgttatgcgattctcgttcaaattttgatttggattcgtgatcaatagggcataaatatacttttgacttctgatgagcattgcttaggacggctgccatgtcacgctagttatcaggtagaatcaaatgcaattagcgggaatcactgtaaggtattccgtaagccggtaacaggcggtgatggggatgatgtaactgtctttatggtagacacaaggttagtgaactctctcctgtttcaattgtgtggttcatcttttttttgcagttgtttatgtcttcggctctctttgattcagcacaaatggtacgtttctcaattgggaaaggttaacaaagaatggccctgaagtcagggttcaacacggtgacatcatatcgcttgctgttcctccagagcatggtaacataagttttctgtgcattagcattgtgaattcatatctcaccttttatcacttgtttaagttaaactgatttgttttgtgtgggttactatactgtttccagttttatgcccatttttctagatcaattaacatgttaacactagacatctgcattttttcagagaaggcatttgcatttgtataccgcgaagtacttggtaataatcctgcgctgtcctgcatgaacagaaaaagaaaagcaggtacgagtcacgaaggtcacacatttttttctttctgtcctaactttccatgtttatatataactaaagaatggcacgtctcagggctctttttcaccattataaagcatatgttttttgacttctgagttctgattagtgtttttgctcatgtgaagaggatactacttgtgaaattaagaggcagaagggcataggcatcagtggtcccaatggtccaatatctttggatgattttaagagcctccagcgttcaaacacagtatgttcatcattgatattagttttcattgttagatgtaagtgattgtatcaatcttgatgtcattctcaacttatgtgtcaacgaatcactgttgtatgcaggaactgaggaagcaattagaagcccaggtgcttaccattgacactctgcgtaatgagtcccgctcaattnnnnnnnnnnnnnnnnnnnnnagttgagtttttctttgaatccttgttgtggccagtggtggtttcgccatgttaaatgttgtttcaaacgattgagtgattgaaggattatttgagtatctctactgaaatatctttgcatttgcaggaaataaaacagataaaagaatccactgcaaaatcatttcataatgaactgattgagctacgtgatcaattagatacgaagcagaaggaactggcgcaggtcaacaaattatcagctgaacagaagaattccatagatgaacttggtgagagagtaagcgcttctttgcaaactctcagtgaagcaaatgaagtaattcaaaggtaaatggaatgcttttcccttgttgagtgtgatcatattttatgcaagtattgtgacaagtttaatttatatgtcccaataatgatctgattaaagccatctttaaatcgattatttaagctgtgaagcagaagacactttgaactgtttcaattcggtcattttttggcaacaacatatagcttaaacatttatatacactgcttcttttggtagtcaattggcacttcgaactgtttcatttttgtcttttttggcaataacatatagtttttttttttttttttttgtgtgcaacaacatacatttacatgcactgctttttttggtggtcaattggtctgtgagtatgaactgtttcatgttcaaatgtttttcttcatattgagttgtgtacctttttaaaatatctgatgtgactatgttttcatagcctgagcattgcaaatgtaaccataaggaaaaattacatattgctttcagtcaaaaggcatctatagctgaactgaaaacgggttggatgaaga

SEQ ID NO: 30187 - DNA, 2428 bp, Arabidopsis thaliana landsberg
catcacctattcaattaaataaattatcaagataacatttagaattatcagaaagcccttgacaacgcagtgaaacacaagtgtttgtgcacattcatctaacatacctctcgtcctgtatcttgaataatttctgtattagcatccaaactacgacccatcccgtcaatttttgaacttaactcttttttggtaccctgtcatgaaatgttaacagcaacaaaatgagacaaaatactgatgttctgcaactaaattaaatacaggtactttatcatttggatgaattaggctcacaaaaggaactatcataactaatatgggaagtaagaacttgccgagagtgatgtgtaaaaaccatcgatctggctgccaacactattacatgcatctgataagctgcgccttgttgcaaacataagatccggaagtttccagccctgagaatgttgcagaataaaccagttcccagtaaggttttttaaaaagggaaaataactacaaacaaataaaccaggtctaacttacaaacaaacaagccaggtcaaattaattggcaaggaaaacagttaaattgttttccaaaatacaaaatctagactagccaatagcactctaatcgagtaagtaagaagctcaagcatggtgaaatattattaccttccaccatacatatccgtagcctatcaccccaattataatgatgtaaccatactttttaccacctggaaaattgtaaggaaattgttaaaatggagcagaaaggaatacaaaacttccaacattaaatctctagaggacctgatcctgctgtggtaacaatagtgataggtctgtttgaagaaagcaagctcaattcatgcctaagactgttaacctacaagaaaaaatagagataagacaagtaaatctaagtccaagtcctccacaaatgtatcttatccagctaaatttaataacctatccacataaataagtagcttaatatcaatcaaaacctgggccattagtgtatcattgcggggcttgctggctgatttggcaggttcttcttgcttcagctgcctaaataccatctatcaagagaaataaaccattactccatttataaaaaaacatcataaatacaagcttttgcacaacatagaacttagaataccttaagagcaccggagacaaaactcgagacatctggtaaactcccttctttagcaagtactgacccaacaagacctaacgtaaaagcaagtgaattgaacattaagcatatgtactaaaattaatcgaaacagtaagacattaaagggtaaattcatcatctttggtgcattcacaacgaaattaaacataaactagtctccaataacgctgaataatctcccctaacacatacaagagagtaaaaactgttcctttgttcaatttctgattggtcgaagaaacagatgaaaaccaaaagtgaagcacactaaaaaaatatcaaaagacttgaaatttgagctgaagaagattcgatgattgaaagacagtgaagcaacagtgatcattataaaagggtttatcaaaaaccctaatttctcatcctctaaatgcaattccccatctacgaaacaaatgagaacccgagagaggagtacgagcaccgatcaattaatcactaaaacagaaaacccccacaagagtactgacctgcaccgatgaggatggtgagcttcccgagaggaatagccatggaagacgaaaactcaatccggcgagcttgtacgacgaaggattaagatataagaagaagacgcatgagaagatctaagagagaattggtagaagagagcagcgggaaggtgccggcgttaaagatgatgcactcttgcgacgacggagatagagagagagagaaagagaggcggagaggagagagaatagagaatagagagactcaaaattgttttgtcgaagggacagtgttgtgttcctcaagtgacttgacatacaatacttttattttattaatttttttattgggcctagaaaaaggccttagaatatgctctaagaagatgcccatgaggcataaggactttgaccaattcgagataacaaaacaacttgagaggctgagagcagaccacacatgacattacaaaggcgtttttgctagagttataagcttcaagaagttgtcctagtaattaatagtttgtttcatctattccacatacatatgataggtcgcaaatgtattattaaccgtcgacgtcctgtgcctatctacctcataagatgctcgagtttcgatagatcttcttcatttttataccaccaaaaggaccaaatcgtcaccggaaaaaaagcaatgcaagtccgaaatagagtaacatgaatacatgataggaaaagtgtttccttccccaaaatatctaaacgagac

SEQ ID NO: 30188 - DNA, 3169 bp, Arabidopsis thaliana landsberg
  unsure (1)..(3169): unsure at all n locations
actactccgatcatcatctatctctaaatccataccagctgaaaaaccaacccctgccacaaacctagaatcgtaaccactactcccaagtatatcaaaaccatcaccgctacttttcaacatattaacagacccaacagatccctgactctcttgttcaacttccggtgactgaaactgcatctgtttaccatgtgaatgagcaacacctgacaaccctctcttcagagctttactattctccatattcgcagacgtgtccttaacaagatctctcctaatcctcctccattttctcaagccttgtcctttcaaaaccggagaataagcaccaccaccatcacctggtgaatcaaaactcataggtttaccgagttcaacagaattagaagtcgaaagcagtttcacactctcatcagagcaagacccgttatccaaactcctaccatcatcacaaacgttgctggcactttgttgaatcaaaacattatcatcaacagactcaagtgcagagctttcactctccaaatccattgactccacaaaaaaatctatcccccaccaaattcacatcggtttcagaagtaacaggagctcagatcaataacccaaaacnnnnnnnnnnnnnnnnnnnnncgatcatacacaatcaaaaagtcaactcaacaagctatacaaattcattggttccttgacggttaaatagaaatataaaggtctaaaatttcctaccatgccaccatctatcggatcaaagaagagaagaaatgattccaaaaatgaaaatccagctcaatggaagaacacagatttcgaattgaatcgcaaagttttggtctttttggagaaaggaagggtatacagccgagagatggaaaaaggagggtgaaaagtgaaaaccataatccaatgatcggattcgcagatctataattctctcgttcaatgtgaaaagtttctttgtgggaaaaagtttattcttttttccctcatgatcaattttgttcctttttgaaaattacgtgtgggcggctggaatataacacgtgtcggaatcgcctgacctnnnnnnnnnnnnnnnnnnnnnnnnnnnnnnnngattggacccgacatatatataccgttaataattatcattttggttattacaatttcagaaaagtgttgagctgacctaaaacatgggaacagtgtgagaataaacagagaattacaaagggtacatacagccataaaacaccacaagtcacattcttacatcatctgagaggattgagattagcacaaacgaaattgggctactacacactcattacacagactgaagaaacataacaaaaaaaaagagaatcagaaaggcttctcgtagcctcgagctggaggttggtcccaagcttgcaagaatgctgcacaattgcaaagacaatgaatctcagctctttaagaagctaaaatagaaaagagaaagaatttgatattggtcttactcaatggtatttctccgagtgacatgaagatcgaatcatcgtctgtattatttggtacttggtcatttccaatagctccctgagacgttttcaggatctgttagcaacaacaaacattctatgtgacataaaacttgacaagtagagtaggtacctctcggtcttgaaggctaactgtgttgttattctgtgggacactactggttccctggtttattggagtaaaggaatcaagatactctaccatcatgagtctttcattgtagtctgggacgtcatcgatgcccatatatggagcagcttcttgcctgttagatatgaaaacccattagccaaaatgtaataggtgtgtgtatatatataagtgttaagagtaggacttggccgtactttcttcctggatcattgctggactttaccacttcttgatcatcatccaaattaatcacttctatctctttaccattgctcatccgagtactcgtaccaaactcgagagacttactagaactgctgattgagagatcaaaatcaacagcttgacgagattcctttatcccatcattcacatccgacgctccccctagatttaggtcacacatcttaaacgaagcaggaaacagctgatgttcttcagcataccctggacctgttctgccagtgtgtgtcctattgtatgtagagttattaaccagactttcatggctgaccctttttccagcagcaccgtcaatcagtcttttgttgaacgagcttgtctttccttcttcttccggatcgcattggtttccgcttgttttaaacatgttgaagcgttcattagcttcagaaactgccacccaatctctctgtctttttgatccctcctccaagtcactgccttcaccaggccttttctcacctactttccccaccgaatgtgatctgtgcagattaggcaattctaatcctgattctttctcactgttatccctgagaatgctactgggaaaagaattagacctatgacatttactgttctcaatatattgaacaagagcaaaatcttcaacttggtcattttcatcaccagtactatcggcctttccagatgattggcctcgagtctcacatcgattttcggtttgatcttcttcttcaagtccagaattatgagaggtatccttgatattatgactcaaataaagctttgggccttttgcagtcagagaagagcgtgtcctcgtaggcaccttctcaaatttacacagcgttgccaaatcaataccactcttggtgaatgattcatcagccccacactgttgatcaatagatgcatcttcacaacgttgatggatagatccatcttcgatagcagtctggttctcatcctctccaccattaccaccagacctacctttcatctctcctgatccagcactcaagctagaagagccttcggatactttagagatttcacaatcctgtactatatctttcccggcactcgaggaacctgtcttagactgtgcctcatcctggagattgtacttgtccaacacagactcggaatcacctgctccttcacattttctcataaattcaccagaggctgaccgctgaaccgagctagcaatatcttcagcaagcggctgctcttcttgatgcccagacacagagtcgtcaccagtctcagtntttag

SEQ ID NO: 30189 - DNA, 1950 bp, Arabidopsis thaliana landsberg
cgcgtattcacgtcgctagcataggcacgtaactggagctgatctcacgtatattttggatcgtaatcatggacggcgaagattttgccggaaaggggccgtcaatcttctctatactgtcaccttttgtagaatttaacggtatctccgttgaaatcgagatgattttaccataatagctcctcttctgcgatcccggaatgtgcaatcgatttcttaagggttggattcgcgatttgtgggctattttgttaatgatctaaggaaattatgtgatgtcttagctttttagaggaatagaaaaaaataatcatttgcatgcattgctggacaacattgcacgctttgcaataatctcattcatgttgtatacatgtttgcttggtcctatattgttgttttctatgtctggtatcatttatgcatacattggtctgaatttcataggcggctgctgaagccaagggattgaacccgggattaatcgtgctgcttgttgttggaggtccgcttcttgtgttcctaatcgccaactacgtgctttacgtttatgctcagaagaacctacctccaaggaagaagaagcccgtttccaaaaagaagctcaagcgggagaagctaaagcaaggagtccctgtccctggagaataaaagccagcttaagcttccttcacttgtgcctccttcaaagcggtttttgttcggttaccaaatttcacccttgcgggttttttcttcctttacttctgtcatgaggattatcttgagtcctgtatgatttcacatggagagtgtagactattgttttggtctgacttgtttttccttcatacacacatttggttgctactgtagagtctctcacatcatctttgctacaaattctcatcttcaatatcatttaacttatttactatttagatgttacttggttccattgttacggcgctaccaatcctgcttttgctaaaccgaatagctatagagacaagatgtgtatattcacagaatcaagacgcaaagagagtcaatatttgatttttacaaacagatccatcaactaaactatcattgacgtcccatgattgtttcgtatcaagttgttttattagctcaataatcacagatgtataagagactaaaactttcatcattttgattcgttttgcgatacgatttccggattcttagtccagtgtttgatccatttctagacatataagaagaaagaagttgcgtcgtcacttctacgagactcaaggagtctggagcttttacatgttcatacctggaaaatcaacaaggaatccaacatctcaaaacagccaatctcaaggaaattgaatcatccctacaatactgtttagcaacctaaaacatcacaatttcagcggtttgataagattacagtttaggggaagcgattcaagacatacccagcagatagttttgcttcatggccttcttcaaatcatcttaactcaaatttgttgtactcatcagataagttgagatgtatcctcttttcgtagtttgtatagcactgcatttgttgcccatcccgcttgtctgtagcaacccaatgtggtaacctgttcatcctacagttccaatttgaaaatagcaagagagaaaaaaacattgagattcttgaaatttgtcatcatttctgcagcaataagtaaaccgtccttcagtattactcaataggtaaccaaaaatattaaacagaacaagattttgttacaatcaagtgaaataatacctcatcaaatgccttatttaatagacacgctggcaactatgtacgctgcgtcaatctcatgacaacagactgcagaaaaggaaaaggcaagatatctattgacagcatttatctaagcaagcaaacaagatgaaacacgatatcaagatcaagaaggaagaagatgcaacttacagagtagccac

SEQ ID NO: 30190 - DNA, 3010 bp, Arabidopsis thaliana landsberg
  unsure (1)..(3010): unsure at all n locations
cgagagactagagaaggatggactgagaccaaagacagcttgtgttctgtttcaaacacgttttttgttttccggttgtgagtgacttcaatggattctaggactctcctctgcagctcaggtgggtttaacaccacaacacattctctcaaaccagggaggctactttgaagaatgcttcctttatggacatgcacaaatggaagcataacagccttcagctcttcaatcccacggttgttgatttcattccccaaattttttttccctctcttcgttacagtcatcccactcttcttgagtgtggacgtgagcctctccagatatttaggtcttgcgagtcccaaaacattgcacagctccaggaagttgttctggaaaggagttccagagagcaagattcgtttctgtgtttccactttggatagtgttttccatatacaacttctctggttccgaggtgtgtgtgcctcgtcaagaacaagaagtccaggccttcccataagtatctctctgatatcatctaattctttgtctggcttcacttctctcaccatctttgtctttttgtcctcgtccttaactcctgcaagcttctcatacagattgtagctgatcccgagtatgctcttcgattttatccaagagtatattttcaccatccttatctcattattgcttcttgcagtggcattcttctgcatcaaaagtcccagcgccgccgagttctctttcccagtaaagtccaaactgctgagattatgaaagggaatgcttatgttccatttcttgaactcctctgcccatgtgagaagcaagctcgcaggagcaatgatcactggtttgcaatctgggaagcattgaagataggcttgcaggaaaatgatggtcagacgagtttttccagtcccgggagcatgtgacatgatgcatcctccggtctcatcactgttctcaaagtccttgagctcgttcaacatgattgtaccggctaagttcttccagataaactcaaaaccctcttgctggtgaggatacatttgagatttgacccctgggatcttatcccaaacagttccttcagaagaaacacatccctcatttaagctgttgttaggagcatcaaacccaagtttcccaatgaagctgctgccttcttcctcttcaaatctatcaaattttctcctttcccttgtagtcttctctccctacatgaagaaacatgcactagagttaccatcaaaccttttagtttaacgtttcaatcattttactgaatactccaaattccttacccactcagatacatccatgcttcggatctctctctccacgaagccacagtgcatacacttcaaaccaacctcaagatcaatacatagatcgtgtttnnnnnnnnnnnnnnnnnnnnnnnnnnnnnnnnnagctgatatatttttctctacctgcaaacatttcaagttagatttaccttgttcctaacaaaaggagatgaatatactgttttggagaaaacaagaaattacatttgaaaaaagctcgttgccgccgatgtcgttagatttagtgaaaaatgctagttcttcccacagcctatcttcctctgaatcgatctcagaaaccacaggtggtgactgaggctcctccacaccaaatttctctatcaatggtggtggcctaatgattagaagtccagcatcatcatattttctgtgatcttcccttgcttgttcttgagattggtcttcagctgaagaaactagttcgtctgcttcatcctcttcgcctaattgacctttctcccaaacagagttcacaagaagcctgaatagatcaacttctttattgtttccattcaatattctccaatccgagtggttattaatcttgacctctttgtcttttagagtaggatcagattcatatccatctccagagctaatagaagaatcagagtcatcttcaatatgttcattagtcacaacagacttatttaacccctctgcaactgcaggtgtcgtcaaacccatcctgttgttggcttggacctcttttgctttctctgaattctggatttcaggtattgatggcatttcaggtacttgtatttcttttgctttctctgaactgaaaacttcaggtcttgatggcatttcaggtgcttgtacctcttttgctttctctgaactgtaaatttcaggtcttgatggctcttcaggtacttgtacatctatcgctttctctgtagtgaaaatttcaggtctggatatggatggcttctcaggtgtgttcaattcttttcctgtctctggattctccacttcaggtctggatggagctccagttgttttcccagagttgatggaaacagaatcttcatactttgatacattagtagaagcaaagttgttcacatcctcaatttcatctcttattgaatgtggtctaatgaaagagctgtgtgattcagggtttcctgtgttctctttgccacagtgagcacaagtgtacacaacattgctcggctgctttgttactactcttacaacttctctttgtcgttcttttttttcttcttctcggtggtttagtttctgaatcttgttgtctctttctctaggcttggttaagctagaaccagacctcttataccttaccaaagccttcctttccactaaagagactctcttgattggtgaactggcctttctcaagtcatcatcatctctattatctccaactacctcctttacatatgattcatcgtcactcgaggaggaagaggaagatgaagacgacgatgatgacgatgatgatgatgaagatggatcctcagaagacaaagactccaccgttacattatctttggtgttattatcttcactatcttgattttcttcttcctcttcatcggtttcacttgagctatcttcaccatcactgatagactctacaattctgctacttaattcaaatagcttcttcttggctgaagctcttcttctagctt

SEQ ID NO: 30191 - DNA, 1103 bp, Arabidopsis thaliana landsberg
cgaagaagaagaatatgatgaagaatccgtatgtgaggatgatttggaagtaaaatcgtgtatgcaaacaaatgaaaataagggtaagaagagaaaagtcgctgaggtagacaattccgaagaaaccctagagtgcatgcgcggttgggagacactaggccgaaaagtaatcctccgagaagtattgtccgtgatccagatgctatgggagcttgcagcaaaccaatgtgaaagcagttgatggatagcgacgtgaaggacaaccaatacaggctcatgttagggaaggagccggtgaaaaagatgatggatgctgtgggaaaaacagagaaacttgggactaaagggcttaatgtttcggtgtatggaccaaacggagagaatcataagatggtgttgaagatatggattaagggcacacctgttttgacgtcgggatggaagaatttcgtgaagagttataagctcgagaaacatgttgattttctcactatttggatgtttaggcacaaaaagactcgggagatttgcttcgctattgattccactaggtttcctgtaaagggtacgctgagtaaaaggatcttgcaggaagtcttcaagaatccataatagggtttcatttcatactttcatgtgcatgtgagtgttttcagggtttttccttttcttttgtatctctttaagaacatcattattggttgtttcttagattagttcttagactaggagcatctcattttctttatattaataaagggagttatcaggttttacaaacatgaaatcgattatatagttttgtaaacaaataaaaatagcactataaacggaattgtcctcacagagtcacaggctttccggagactacttaaagcttagaactcaggcaatctaagaaacagattatgtaagtccaccaatctaagtgtagaaaatttcatgatccatatttaacacgattcgtgttacggcaagtaattaactttggttctgagtctcaaaacatcttggttcattattcttgaaatttctaaacattctggattgagtcttgttgttaataacttctctttagtttgtctatccaatacatcctgctg

SEQ ID NO: 30192 - DNA, 3030 bp, Arabidopsis thaliana landsberg
taaccatccttttggtttcttaactttaccaaattacaattattttttagtttatttgagatgagaacatggatcgtattttagtagtcttgttggaaacacaacaaatatggactaggaacagataaggcttttgtagttttcccattcatccgtatcatactgtcacactcattgttgcttagcagcttaggagttggaaccaaaattcaagtcctatcataaaagttttcatattggtagcattagttggaagatacatctcgtccaaaattacttattttaattaagtaccttaattaatcatagttaaaataaataaaagaaaacattttgttagtattccgagacaacatggagaagctagaaaaatgtgtgttgtttataaacattattcttcctaattttacccctaacaaatcgacataacagtgtcatgttgatcattgaatagcctcgagatgctttcttatgtaaaaatcactttatagtatatgtctccaactttcccgatcttcaagcaaacttatagtatttgattatttcggatggtcagacaaaaccacacttatataaagctgatttgaaatgcaccagtaaattcagtaatctttatcatcatgtactactcgtaatcattcttgctttataatacgagcaaacaagaataatagattttggggtatttggtccgatcaacattgatatctgaagttactatgtgaatttttgtttcactgtctcaatataacttaacacaagaagccagggcgaatcagccatcaaaacatgaaccatcgttgtaaactaaaactttgtcgtcgttgctctttggtgtggtttcactatgtccaaaaaaggagaaagaaaataggatattaaaaagaaaacaaagagggaggaattgagaggcgagtaataatgcgaggattgagggagggttagtgggaattgccccaatcccactgatcactatggagacaccaatacacatatcatgtgaccctaagccactaatctctctagtctctattgtgagtgattaaatttcttgactctatatgtcctcatgtatcttattctttcctcataatacatctacaatctaagatatgcacttaaaaaaaaagtattaaaaatatcgaattttgtttttttgaattagattcccatgtagtagataacatatatgaacaaaatatactaggatttatagaaaaagcaaacaaacaaattgtcaacagcaaagcagaaaaagagacaaatgttattaagttataatgtcaagcaacattgagtaatttgcggggatgagtatgagagagtaggtattttcacgttttcagacgtagagacatacaaagagcttatcaaccattttaaaagctaaaaggatttcccaacataaatgagaagaataaagtgcatgtttccttctttgaaattgaaataactaagaaagcatgtattgtatcattttttaaaaacaaataaaagaaggatatgatgaaaataaaagtaccaaattcaataaaaagggtaaaagaaaaaaacaaagtggaagatttactaataatggtttgaccaaaaaaaagagaggttaattcaatcaattaaagacaaaaactcgaaagtgttggggagattttgtggcgtgactagcggaatgggaccgacaaaagagaggtcgtgtggtgggagtagtcgagctttgtactttgtaggaccattgcatcaacaatctcgacttattgtaatttaagggatacatactaaaatgtagttttccatgctacaataacaactagttatattaagattttttgttttttttgttttttggtcatctcattttattagataatgaaaaagatcaaacttccaaacaactagttaagaaaattatgctgaaaatgtataaactaaaccaagataataataatgaatgagtgatctcaacctattgtcctacaatattctgaagagaggttgatctttgattagcttcacactaaaaatgaatgagtgatctcaatctattgtactacaatatggaatttctgaatttcttgcagagagaatgtgagaatgtgtaaggaatttgtttgttagtaaaataactttcattttccaataatgtggtcttgtatatataaactttcactacactacatgtagttaaatcatctcacgttaaaccatacaaaggctactcctacttacgacaaacatctaacggtaaaacaacgaacaaggacttgacttttgtctgcatctctttggttttgtctcttttttcaataacaaattcaatttccaacaattgaacttggatacaactgtgcaccttgccccataataactggtttaaactttaaaccacagagtaaccggattttggtttgttcacggatgtaattgatcctactaggattatcctacggatctcaaagcttaaaactagacaatttcttgagcaatgagaagcaaaaccaatctgaacattgctgatgcatcggttgaacatgtcatccagaaaccaaactaggaagagagtaacatccatgctccaaacactgggaaggtaattagtgcagatgcctggagatttcatttttaatcagatgtgattaaggatcagacaaatcaaacattgatttaaaccatctacaagctctgaaaaatatgaactgacataccatgaaaaacaccacttctctgtttgcgagagccgctgtgatctcggttctttccatctcatgctcgatgaagccttgcaactataaagaatcaaagcaaagcgcggttacagattcattcgatctaaatactggagattgtgaaatgtgattatctgaaacaaaacctggtggtgatatttggtaacagctgcccagaggctttttaactgtgacagggcttttgtgagatacggttgcacagagagaaccttctttcccttccagtgaatgtcaaatgcttcatcaactttgggcagatgttttctttggatatcgctcatgagctaaa

SEQ ID NO: 30193 - DNA, 2695 bp, Arabidopsis thaliana landsberg
gtatatgttcaaaatgtttgtccagttaataagcatatgtaaaaagtcctttaagtatctaatgtggttgtgtataataaaaaagatcgcaacataccacccaaagtggactgatctgtgtctctcgataaataagaaacaacattggacttcgaagaaccactgacatttattttcctagcacccagattaataaccaacttctttgcctttacaaatttttcctcccctgcattccttagggtaatcctcgctatcagaatcataaggcttgctacactttattctcactatccttgacggcttttcttcatcagtcaccataacatcatcaaccctcttgtgttttacaatcttaggttcatgtgttgagcaaattccagctacagaagaattaacgtccgattgttcgtttatctgaaaacccacattatcaattctaacaccacctagtcggcgtctctcagatccaatctcctgatgaacttcaggctccaacttagtgtgactaccttttttactagcatgctttttacttgaagagtgtttcccatactccttgcttttctttggggatttttccaccaaacctttaatcgaaaacttcagtgagcgcccagatacgggtccattttcttcatcatctgaaaatggaaatatcgaaaatatttcctcctctgttggcaaaccagcagcagcccttaaactagcaatcaactctttgtccaccacatcttttttcttccaaagttcttgaactgcatcctgaagatccttcacctgagaagccaaagatagaatttgagaaccaggaaaacttatatgatcaacacactagcaaattgtactattgaaccctctttccattccaaaggaaaaccccctgctcgacgagcaatacgtatatgacaataagaaccaagaagaatgatctgagtgactgagaagcgagggtactaataacagggtaacaggaacaggcatacctgataacactccccacggcatgtggcacatttatattgtagctttccatcaacttgaaactgcatatatttgtcatcactgcatgacagtttaaagaggcaaacaatttcagatttactataactcaaatacattatgcgatgcatacttaaaatatgactcaatctaattggtagtatatatcagatggcagatgcaacagagataactatgtttacaacaaaataatgaggacgaaccttattccatcacaatggcaatgcacccagcgttgacaaatatcgcagcataccattggggttgattccgaatccctatacacctatacaagataagcaaaacctggttaatgcaacactaaagaggcgttatgttttgctacggggatcaagcattaaaaaataaaggccatgataatgctattgctaagacttattttgcttaatataccttcaagcatacagggcaataatttcccttaacaaacaatctgccacaagcatcacagcaagtatatgataaaaaccacctgttacagtagaaaacaagaaagaacaaaagtgatcaacagacttttaatagggcaatctatctgcaaattcttaactagcaaaacaaagtataattgttctgctcacttgtaagaccaacctaccccgcaagagactaagaatgtatacctgacactcaggccatttccagggacagtagaatcacagctgtggcatcttgtatgctttgggcagagatatggcccagaactaacattctgtacggtcaggataaaataaataagccaattcactttactttaaaagatagtcacatgaagaggctatctgtcaggtaccttgtgtggaggatgttggcaataacaatggtaagcagcatcacaccttttgcagaacatgaacttgttaggatctcctgttctacggcagacctaaggagggtaaaagactcggtgaggcaggttcaaagatctaaggacactctatataacagttaggctaacacttttatatatgtttcattacttaagacaacttgtttcgttagtttaaaaaaaaacatatgttttatcaatcacttttcgaaaaattggcagtgctcagatgcaacagatatcacaaagaagaaaatgagaaactagaaagaaactacctcacaaacccggcaagagggacaactccatgaactccaatgaaataaatctgcaacttacatcaattagacccaaaacacagactttagcaagcgaagaaaaggacagcagcaaatagaatgtaaagtacctctatgttgagcccaagactttaaacaattcttgtggtacttctttccacagtctttacaagaaagcatcctccttgctctatcacttccttcaccttctcctaggaagcacattctgcacattatattcatgccggagtggcctaattcttcaccagcatgatcgtttgagctaagctgtacaacaaacaaacaacaacaaaaaactcaatcaaagcgaagtcaatacagaaaaaatttaatatcatcttcataaaaaaaaaaactcacgtcattgacaccagattcaaacctccgagcataatcctcagcagcttcgacagtaacagcagcttgtctctgaagagcaacacgtttcttctgagcagaagcttcctccgccaattcatcaacaccagaaccaatagcacca

SEQ ID NO: 30194 - DNA, 1831 bp, Arabidopsis thaliana landsberg
ataaaaaataaattcgaaaatctctcacccattacattatctaacatttaagaaaattttcctccaaatacttaactaatgaaaagtaaggaaatttctccatttcttttattattcctttagaaaaaaaaaaaaaaaaaaaaaaaggaaagaagaagaacaacaacaacaatgtggctacctaaagcagacgcgacaaagaaaggaacaagaaatggttcggtggcgattgcaatagacaaagacaaaagtagtcaaaatgctattaaatggacattggagaatcttgctactcgtggccagactcttgctcttattcatgtccttcccaaatctcaatcttctttaggtttgatattaccccacattctcaatgattttttgctctttagtttaacatatttattgcttcctttttgcgtaatgatttttgcgcaaagttttcagttaggtctttcgcttttgtgtgtttcatgcagacattgaagaaggaataacacataagcagcaaatggagaaacaaacgaaagatctctttgtatccttccactgttattgcagccgcaaagaggtaattataataccaaattaaaatgaacttaacttttggttaactagatatcaaaagttttgaagctttttttgtgtggcatatctgcatgcagattcattggctggacgttgtgcttgaagacgtagacaaagtcaaagcgattgttgaatatgttacggtctctgcgattgagaatttagttcttggtgctccatcacggaatagctttatgaggtaataaaactcattagggttttcattgataggttgagtgcggaagaagtattaaccaaaactagggtttcttttacaattatgatcattaatcaacaggagattcaaaacggatttaccaacgagtgtgtcaaaggcagctccagatttctgcaatgtttacgtcatttccaaaggcaaaatctcttccttacgaaacgcctcgcgtcttgctccctaccatccatcagttctcagcgaagtagacgatcatgaaactattgccattgagagaaaacataaaacaggtcagagttttcatcttgaggggaaattttgttgcttgcggttcaagcatctcaaacacattcttaactcttccacctcccttgttttcaacagctaacacaccggccttgcctaagggacgaagatcgattgattcagatgttaccaggttttcttcagttagcattgaaaatttcagaatctcttacgtctacaatttcctaaatcttggttttgatttttgtagattagggcttccgaaaccgccacatggacatatgaaattaatgggggatttttcagattcagagtccgagttctcattcatcagtgcttctcaacaagaatcatccgacctttccttcatcagctccggaaggccgagtgtagaccgatcttccttcacctacgatttaccagaatcagcaagaacctcaagaatgtcaacgagctcagagcagagcattgggtctcatagattaggaatcaagtttacagatttgagttatctcaatggttcttcttcggtttctgatgaaagtggaagaacttcttgttcattttcatctcagagcttggtataagttgaaattaaaccatgtttcttacttatcggtcttaaatccgatttcttttttccgttacactcaatgaaaatgtttgttttgttgcagaatgatgtagaagctcaaatgaagagactgcgtttggagctgaaacaaactatggatatgtatagctcagcttgcagagaagctttaaccgcaaggaacgagg

SEQ ID NO: 30195 - DNA, 2688 bp, Arabidopsis thaliana landsberg
gctctcagttttgtttgggtttttttaggtgatattcatggacaatactcagatctattgaggctgtttgagtatggaggcttcccacctacagctaactatttattcttaggagattacgtagacaggggcaagcagagtttggagactatttgtcttctgcttgcttacaaaatcaaataccctgagaacttttttcttctaagaggaaaccacgaatgtgcttctattaacagaatctatggattctatgatgaatgtaaacgtcgattcagtgtgagactctggaaagtgtttacagattcttttaactgtctccctgttgctgctgttatagacgataagatattatgtatgcacggtggcctttctcccgatttgaccaacgtggaacagattaagaacattaagcgacctactgatgttcctgactctggtttgctctgtgatctgctttggtctgatccaagcaaagatgtcaaaggttgggggatgaatgaccgtggagtctcttacacgtttggccctgacaaagtcgcggagtttctaataaagaatgatatggatctcatctgccgtgcccaccaggttcgtcgtctacacactgttcgtttctattttactaaagatgtcacggaacttctataaaaatataactgttgtgtttttctttttctaaaaggttgtagaggatggatatgagtttttcgccgatagacagcttgttacgatattttctgctcccaactactgtggtgaatttgacaatgctggtgctatgatgagtgttgatgaaagtttaatgtgctctttccaaattcttaagcctgctgatcgaaagccccggttcttatgaagtaaagaggtagttcaagtcttttatactaacttgtgatgagtgtttcaattcctgtttcagtctttcagatttccagattgctataaaaagttcatcatgcatttcttctcaaattacttagattatgacatttgttcatcttttgcttacacaacttgtttaagatttgattgagtaaaacagaaggggtttcgttttgaactttgtgaatatgagctcagagcttggatctcagattcaatcacttataggaaaacttgcttcatttttgcatgttgcagttgaaacctcgcgggaaagaagaggaaaaaggcgatacgaaagcgggagagacatttgaagctccctgagactttgtgcggaggccttgcaaaggcaaaaaaacataatttacatgttatatcatcttatttgaactcttgccatttcttttctcaaaacactttatgttcttatgatcttctcctctgactctatatagacagtaaaaaaaagtctgcaaattttcattctttttcaacaaccaatttcctcagtgtacatactaaattgttctgtatccatacacacatatacttgggaaatcttcggtttcatggattcttcacaactcgaagcctctataaaaacagattctttgcttagttgtcgtcgtcgctgcaaattatttgacaagtggagagtttttgcagagctaaaaagcgaatacaagttgaccaaaaaaggtcaaagccctggttccatatgaaactgtcaaactttggacgtgcatggatacaaaagcttctgtcagtttactctcctggatttagggttttaaaaccagctgtgaggtttgctgcaatggggcaatgtcactgcaatgtgttggatagagtcttaagtcctctgtttactttaaaacccgtattttaacttgctgctattcacaacaagaaaaatgaagtcttgtctagctacttttgctctcgcagtgttagtaacacaaggaagcatttttagtttgtgtttggcctcctctgcttctacaaactctgttcctaattggtttcatcattggccgccgtttaaatggggaccaaaatttccatattctccacctaaaccgccgccaatcgagaaatatcctccaccggtgcagtatccaccaccgatcaagaagtatccaccgccaccatacgagcatccaccggtgaagtatccaccaccgatcaagacttaccctcatccgccggtgaagtatccaccgcctccgtacaagacttaccctcatccgccgatcaaaacttatcctcctccgaaagaatgtcctcctccgcctgaacattacccttggcctccgaaaaagaaatatcctccaccggttgagtatccgtcgccgccatataagaaatatcctccggctgatccatagtaactcaaaaccaaacaaggacgtgtttgtctataagtatatgtctagttaaaaactgttatgttctttctttttcttatgactttctgttatgatgcatcaaataaagaataaactgttctgttttgaatttgttaaataggagagtgcaagctcaagaacaagctgtttcataagtaaaaaaaaaaatcttttctaaaatcaagtaaagtcaaaatttggatattgtactaaatgaatatactttattcaacaaagttttgtgcattgttataatttcacttaaataatttagtgcgtcaaaaaacaaaattaaaacgtaattggtcaaggaaaaaacaacaagtctcaagggaaaaggaaaacaaaaaaaaaggaaaatttaataagcaatctggaccgttcatacttttta

SEQ ID NO: 30196 - DNA, 1304 bp, Arabidopsis thaliana landsberg
tatcaagaaaacgtccataccattttcctaatatctgtcacaaggtctttcatactacctaggtttgtcatattacctaggtttgtcatctttataagctccatatattcagctaatttggtgaagctatcatcatcttcccctaacacatcaactactgccttttccctagccctataacacttgctatatgatgcagacactcttaaatcttcaagaatcagcttttgcaaatccatcgggacaggtcctttaataggctcactatattgtgctttatacacagctgctatcacccttgaagttgccttcttcttgtacattttccgagttttcacagaacaagtatggtctagtttagctttgcgtatctcataatatccactctcaggcatttcatgagctgttacccgccaatcacacttctcatcggcacagtttaaaacaaatgaatcaagttttgtgcgtgtttgtttgaagtgaaacatatgcctaatagcatatatagctaatccgacttgctagcataaacttttcctttatatacatcttcaccgtcagccctatctatatccggcattatggcagcttcatactccgtgtcatcaaacagaggaggaatatcaaactcttcatcgtccaaatccgacagcttcctattttctcttgcagtttcatttgtattacaatcacctgttctattgttaacaacttttcccgttccactgctgtttgcaagtaaatcagttggaagcttaatcgaagacgttatcaaatcatcaatttccatgttcgaacctgcaccttccacactggccaccaattatgtgtctactgttggtgacgcaaatcccattctaacatcagcatcttcttccccgacacatattatatccaatgcatttgagccacccatgtcctcatccaataatgggctccaaaactccacatcataagattggggttttacttctataatctcatcccaagtaagatcttcgcttccttcatccactagatcttcatcatcaagatcttcagataaaatttcactaacaagaggacctcgttcacaacctataactctttctacagtttcaagttctgcaacaaattcttcatcttcggaggacagcaaaaattctttcaacccggccttcgatatactatcttctgatccacataaacgtttcgacttattccctcttccgtcatcttccttaactgaactggtcttcactagcccaccgtcaacctcagaattgttaaaactcttttacaagaatgtccaactttacaacatg

SEQ ID NO: 30197 - DNA, 1606 bp, Arabidopsis thaliana landsberg
cagtattacgatcatagccagtaccaaaaaaatattttcaaaccgcaatgggttcttaacacgtgaacaacaaatcttgattaaattatgtttttatttattttttatatatcctggtatctattataaagaatggaacagagggacctagtaattattatgttaaacttaaatctcataagaaaaaaaaaggcaaccaatatattattattatgaataataacatttcgaagaatttacttaactaacactaaaagcacaacaaaagtactctagtctctctaaagaataatgatgatccctttgtttaaacgtcaacggcacatcgttggacaagctggtacttcacggctggaccatcaccagaaaaatgtccggctaaggtaatgtaagctggacaattgacgtggaggcggtacctaccggagacccacgttcccactttccatctaacccaaccatcgatcttgatattcagaagcaccatccccgccgttagatcttggcttaacgccggagaaaaatatggtgccaccggtacagttgttccatacagaaacggcgaccatattgtcacatcaaggtggccttggtaagtcgccggcaataaagtcgccaacgtcaccttataacaaaaaaaaaaaacgattaacaagaaaaaaaaaagaggaacaaattttagttaattaataattcacatcccaaagattattaaaatataactaattcaaacctcacatgcaaaatcatattgtttaagactacgttgagaacggcctattaacaagattcgtcgtcggtccattagtatatatattttgtaaacatgaatctttatcatatataatcagtttgttgaaataaaattatatatatgtgtgacgtctcaaattatgaagggttttgtgtaaaaaaaatctggaattcatccagttttgcaattttgtcctcgacctctaacatatgcagattaattctatgaaatttaaaataatacacattataatcttttttactttttttttgataccactaattttgtaaaatattgacattataatatattaaatcgaagctcttacaatgaagaattcaactctactttcaaaattttaaaattttaatttatacgatcgtaaaaacgtttataatatatgtataaaagttatattgtgtattattttagactttataggattaatctacctatgttggaagtaaagggtaaagttgcaaaaatagatgagataaaggtttttttggagaaaaccaattatgaaacataactaaacagttttcgtttgagaatcggtcgcatataatactaagattcgtcggtccattctttataaacacatttttcttgtaagaattgcattaaagaaatcctcaaaatgagtttaaaaacgtgaaacgctaattctacaatacctgttggatgcggtaacacgcgtaaatgtcaaggcggtcatagaagattccgatcttgtcattaggatttcgacaagaaagagtgacctgaagatcagaagtgagataattaggctgagaaacaatgaacgcgtaaatggttgcgtcttgaagaacaaaacgtggtccgtgtggg

SEQ ID NO: 30198 - DNA, 3271 bp, Arabidopsis thaliana landsberg
  unsure (1)..(3271): unsure at all n locations
atcaaactcagccattagctcgtgcaagcgcttgtcgtcttgtgtggttttctttgtaaaatcaagctcaagcacgtgctggattagggagattcctaagtcgtgcatgcttagcgagtgagcgtgctgtgcgattaggtcaaggaattcatctttcaagaaatcatcagctattgttataactttcttgagtatgacgcaaccgttttcgtcactcgacaagaccaacaagtgacggtacgtgatatggcaaaacagtttcttgtgatgtacgttgcaaatgtttagtacttgtgacgccaaatcatagccgcgttcatgagtcataatctcctagaatctcatcatgatatatagggtagagaaggattgtgttgatatcgtctgatattccgaatatcttcatgaagcgacgtaagcctacttagtctctaatgattatgacgaagagatccaaatctaacgctagtatattcgcaaacttagggacttcatctgacctaccgaggatcaaaagaaaatcgtccatgtcagtttcttcggaactagtcattagtctctgcaagcgcctggtatgtggctgagttttgtcattgatgctctccataattttaaggaattaattagtcaattgtgtatggagatgaaccatgaatgttggattggtatttatagagtgaggggtttagtattcctaatttggatatataaagtggattgattntctcgttaagattttctaaatattttgttcataatttcttatataaaaacaatatccaagtgaaaaagaaaaataaaaagaaaataataaaagaagttctatatatttattttttatttttggtcatcaaactataaaaatactgaattaaataaaagtcgatacagaccaagtcagaaaataaataaaaaacagagccatgatcaaagacaaatgaaaactgctcagacgaaatcattaattggttagaattctcgtgtacttaacatttaaccattccccctgaaccggatcaggtttattaggctctcacacgtataccaaataaaactattttctcaaaaagttccttaatttatttaattatcatctctggtttcatccaagtgtaattattaaaattatacatataaacgttcaggggaaaaagaaaatattaatacactgagactataaatacacgtacagagacttgaacttgttttcttttcttgatcagttatcggaatcttttatttcttcttgatcagacgacgttgaatacagcgagacttggacttgtttcgatggagagagaggagccaattgcgaggaacgaggtggatcacgaaacgccaacgaaaccagatggtaaggttcttttctttttctatatttctgaggaatcatatataaccaaaagcacttcttctttgtgtttgttcatcgtgcagaatccgcctctgcatcatctccccgtaggtctgaggaaacgctaaatcagagtacccaaatcaaccaaacggtaaggtttccttctctgttggtattctcttaagtgatcatgaagaatcgtacaacgacttctttgtatttgttcatcatatgtagaatcttgaatcaccaattgttcaatcacaagaatcttccagcttcgaaaatgttttgtgtttgttccagagtcaaatataaccagccgcttgttttgtgtttgttcatctgcagggtccgagatcagtactacatcttcaatcacaagaatcgcatctcagcaattccacaaccacccatgcttcgtcgccttctgtcaatgtgacaccaaagccagacttgtcttcactttctaatacaacagcgacgcaagaaccgtcaccttctgctggacttcaaattaggacgattgagaaagaccggtcaccgggctctgccttcccaagacataaaagactaccagttttcgatgaggtttgctcgggtgcggtgtttccatggtatggaccgcaagaaccagacttgccttcttcatctggaataggaaccatgtcagcaaacagtcacgatgatgtaagtacaacgttccttgtatgatggacctttttgtttcgaaaaccaacaactcacaacaataagatttactctttgtgtaatcatcctgcagcgtcgcgcctatgaattagcttatcctttaccaagcagagatatacaaagcaaaaaggagctgaggaatgctcacctcaaaactcccacattctctctcaccaacactactaccacaaccatccatggctccaggacatgatcaggatcactctgctttggatgaaaatcttcagtaaagtcgccaagggtcatttgtttccataaaaacttcatttaggtttgctttgctttgctttgctttgctttttctgaattccgtgatttttgcttctataagaaacctacatttgttggttaacccatcgtgatatttgcaatgctatgtaaaatgaattgcagaccaacaatatgaatcatgtattggttagaaaacccatgtgtgtagattaggttatttcatattgttttcattgaaaatattcggttccataaaattttgagctagtttatatataaagcagcaaaaccatgaaaatatccacaaagtatacgataatgatctaaatccaatctttcccaatttcaaattctttccattctgctttcttattacctttttaataaagtttcttgctaagcaagcaactataaaaaaatatcttgagaaaaaagcagacgtaggcaacataagactacacccaatcaaatatctacggagagagagacaataggcaagaggtttctctttgtgaaattagctagtggaaagattgttgaaacgattaaagcagagaataatactgtttcaaagttgtatcagattgagcagagattgtatggtatcataaacagggttgtcaatactttctatacgaagttgatcacaatttgggaaaattttaagcgtgcacaagattatccgtcgtatgggtgcactcactgttgctgtgtgttagttagaaaaattgatggatctatttgagggaaactttgtgaaaattttctattgggcctcaaccacaaatcattatgttgattccactaccagatgtggagaagactctcaccaagtcagatcttctccgcagaactatggtcataataatcaacggacacaactctggtcaaaaccaagcccttcttctcataaggcatttgctcagggttagaatcatgagaatattgttg

SEQ ID NO: 30199 - DNA, 728 bp, Arabidopsis thaliana landsberg
caatgtattgtatttgcttgtttcatgcaaaattgttccccatcaagcataaatcgcaaccttacaaattccattactgatttttttaactaataatattactaattacatatgtaaagtcccttaatttcatgacaaatcttttttatttaatttcaaaatataatgacttacgtgttatggaaagaaaaaacaatccgaatatagaataatcttctgccttttgacctttttccaaaaacataaattgattgagtaataagtaaaaatatgccaaaaagagaacaaattggagcgtatgctttaagtgcatgtcctacaagagtatttgaatccatatcatacgaaactcgtgttgtccttggctccacattacgaccatccttacgcaatcaatattcttatctatatagtttctgttacttagacatcaatcggtctggatatagcaaacaacaacattttaaagaatggcaaagataagacacagaattttgttttatccaaacttttttcatatatctgatgtgtattcagtatgacacacacaagctttttcacattgtataccaatcaatcaaactcactctatatcgaacccgattctcagatccataaagaatcaggtctactactcaaatttattccaatggatgcgtagatgtaatgtaacaacagagaacgatttgaagaaagatttattttgaatcgaatagagaatgtgtgtg

SEQ ID NO: 30200 - DNA, 2944 bp, Arabidopsis thaliana landsberg
cttaattgctgtgttgagtagcctccttgtgcttatgtttaatagtttgctgtgtgtttcatcacataatgtttcaggtgtcaaaactgcgcgattagtttctcagaaagccaaaggaatgcctcgcataaatgttcctttaacaaagatggtggaatcatctgctagtgaagcaatggcaaatctgtctctcgagttgttcagagcattcaagagcaagcagcacctacaaggtaaatttttcagctcttcatagtagtatagatgttcccaaggaacaatgcttagccacacttttgaattttcatcaggagaagtgagtttttcagctgcagcaactgatgaaaaggtatcttttgttctggaagttctaatggtgtttttctaatcaacagttcttaacactgctgcaattgtctgttcttactctggtggaaaatctcgtttgtattgtgaccaggataagagggatgctacctataaccaactggaacgatactctagaaagctagatgttatggctccatcaacaaataaccggcaagactctcccggttagtcctgtttgctgtttacccacatttagtaaattatctccaattccttcttcccctgaaaatctcatatggaaagaataatcttcaacatcaccgttttctccctcgttctttttgttttgtttcagccaaccaatctgcccgagaagctaacacaaaaaaccctgtgaaacgagtacctgctcaccgaaggtagtatatacatgtcatctcctctctaaacatcatatgcaacatccatattaatatcggtaattatttgtctgaaaactttgctatggatttttgcagaacccgtaaacggggtgctcttctgcaggattcagaagaagaggatggctgattggaacagcctgaacaaactgaatcgcctggggagttatgctttatgctcatgataatttcccaggtccttccttttttttctcctcttttggtgattcgtttttgtaaaaagaatctgtaaggttaacttagattccttgtggacacatatattagaagtttttgaaagttggaaaagaagtaaaatcgaatcttccttagtatcattattcattatctaagcagaaatatctttcatatctgatgtatacgatatatgaactaagaatatacaccaattactagttcagacaaatacaaatactgtattgtacagtttctgttgtgcctcagaaataaagattctcttcttctatggattctctgactgccttcaatatccatggcttgagtttcttggtggtaactatgatccccgttttgtgagcaagatactttcctttcgagaagtccagagatttccctgtagcatcacacactacgcctccagcttctgcacaaggttattttgttctcttctttatatgtatagtcctcttgtattttcgttatacattaaaaaaaaatgacatgtgggtattaaatctagatcccttatgtgtttgataactagccagtaacatgttaagttataaagtgaagtagagccaacagatctcagcgtttaaaaaggttgtatgtactgtacctgtagtgattattgaaccaggtgcatggtcccaaatacactcacggtatccattgagagtgaaacgcaagtatatctctgcgtctcctcgcgacaaagccgcatacttagcttggctatcgatccttacaggtaatgctttaatcccgagtttctactctaaccgtaaacagattgttttagtggaaagaatcccacttggttatggcctacttacgagcacattgtaatagaaagaaaaaaaacaagttgttaccttggcaatggtaccatggatgggaattggtttgtggtatgattctaagaacttcgcttcatcaagattctcattgctactcacttgcacctgtgtcagcacaacatctctttaacactttcaaacaattgcagatttatcacatggtttagctttggacaggtgaatgataccttttgtggcagagaattgcctttgagcgattgcacgtaagtccctgaacccgttgtagcaaagaaaagacagccaacatcttcctgggaagaatgatcagtcgcgcaaaccgcagaagccaagagaagatttgggcaagccatgacaccaagcaccactttgccttccacaagcaaggctaaccccaccgcgtattgctctcctcttacaaatctaaacaagcagagaagtttagcaaccatgtttttaagtggctgaaaagattaagtatagagaaagcatagagattagagagattgtcaccctctggttccatctataggatcaagaacccagtgggaacctttgcaaccgccttctgatttaccgcagtctatagcatttaacacatcatctgtggatagaggagagctggtgtacgattcctcagaggctagagtatctttcacaagctttgcaatatcttctagaaacgcctcacttccattcttccgcagatctccagtttcctgtaagatttccccgttataaaacccgagtaacatttacgctataaaacctctgattaatataggttttcaagtgttatttcacctcttcagctactaatgacagtttatcaggttggagctccctctccaatacaagactaaccacagcttgtgagcctgaagaaaccatccgttaatgggagtggtaaaagacattttcttgattgattttatagagaaaacaagaacttagcaaaaacagaaacttgaagttgaattcgtgggtatgcaaacgacgaggtacaaaccgtaatcagctgccgtaaccggacttctatcggaattttttcaaactttggattgccaaagagttttctgcacttcctgattcatttcataataagggttggtttagttttagcgattcatataa

SEQ ID NO: 30201 - DNA, 2920 bp, Arabidopsis thaliana landsberg
caattgttgtaactaagctgatttcttttagtattttaaattttaattagcgatgaatcagtgaaatttgttattgtcaaccacaactaaatcggtgtgagtataacctaccacaagttactgtcaatgattactaaatatttataatttagttgttgatagttgttgccaatgattacaaagcgtacacgatattgtgtatatgaacaaaatacaaagaaactaaagaacaacaaggtcgctgatatataccaaatcgtcggtttaaccggctctgccagtgtatattttcctagtgacaattgtcacatatgtaaaatgtgttaaataaaacttgagaaaggaggccactttaacacaactacttcaacctttaacatctaaaatagaaaacgtggcccataaaatgcaaaggaggccgaattaggcccaataaacataaatgggccaatttaaattagtcacgttaaaagagctcaagaatcaccaaagagtaaagtagatccgagcgttacttcaaaatttgaaaacccgaccgttggtctctctcttcttctaatacaaacaaaaataaaaatcaaaacaactggaaaaaaaaaattcagaaagtaaacacaaactttcattattaattattaatccctttgaataaaaccagtctctgtaaatctccgtagctgagaggagtgaccatggactcatgaagatattgattgatttatcagagatttcttcttccttgaagatctgaaaaatcaaagctttttcaagttacaatgacgagaagacgccatggctggcaacgaccattacaccctttacaggtttcaaaatcagaacccacttcttcagcttatttttaagatttatttgtaaaagtttcttactttatttgcaaatcttccggtatttgtttctgtgtggagaatctctcaatttttgggttgatctatcgatttatgtgtttcatgagctgaatcagtgtgctgatctatatgtttccaggtgtagttagtttctagagtttcttgattagctagtgtaagctgcgtaattgggaaaaactacttcaaaatcttgactttttgttcctcttcttttgattttggttactaaaacttaagatgtgttactgctttgtgcagattgtgggagctgttatatatagtgttctggtggcagccttttatgtattcctcgggtttttcttggggaatcgaatagctgttatcgcgcttctttcggttttctcctctgtggtaagtaaagctcaagaagttgcatttgtttaacttctcttcttgtaacagaatcttgaagaaccatgtgctgagtttattgaggattttttttgtgtttcaggcggtttcggttatagttttattcgttaggtgtactgcgattgatcccacggataagactagtgctaagaaaaagagaaaggataaatccaaaggggtcttgatgaagctgagagtcaaggttgttctgagtcaagttgttgtgaggtttttcaggagattagagaggaaaatcttaaggaattttcttagaagaacttatctggatccatggaaaagcagtgtgcagctagaaccacttcttccatttccacttgttatgaaagatgatgattctgttacacctgatcctaaagaggaagatgatatctcttattgttcactttgtgatttagaggtttgctttcttttcttcactagtatttacattagcaatcacttttatttaaaagctaggacttatttagacgtttctttgtgtgttttgcttaggttaaacgcagcagtaagcattgcaggacatgtaaccggtgtgtcgaagggtttgatcaccattgtagggtaaggttttgggggttctttccacctgaatcttacagtttctgagtttttgaaactgctaatctttgtgtggatttggtgtattcagtggcttaataactgcgttggaaaaagaattacacgacgtttatactcctgatggttttcgtcttgcttatggtgtgtgttgctctctcaactacttgaaacgtaaaccttaaaagttcttgttcattgaaacaatgatatagacttgcttttgttgcaacagctaataatagaaggtggaacagctcttgccgtatttgtcagatgttttgtggacaagaaaggaatggaaatggaattgaagagaaggctttatgtagagttccctcaatgggctcttgctacaatatctgtaaagtttcatatacatatgctgcttcctcatgacatctacgtagcttctttttgtttatgagtttatgatgttttgtcctcttacagattatcttggtcttgttcacggcttatggctcagccgccatggggcagcttttcctcttccatgtagttctcataagaaaggtaactcttacaggtgaatgaatttgatttagagttctttatttgacaagtagtatcaaacatttgcaggggatgagaacatatgactacatattagcgatgaaggaggagaatcaatttacagaagtggacccttttgatgaattagattcgtcttcagatgaaagctcagattttgattcgcctgaaagattaagaccaacgtttatctccaagtttatgtgcaggaaagcaaatgaggtgattcaacttctcatttctccttgtattgttgtcacttttaaggactctcaaagattatattttgtgttttaacagaatcagcagagactatccataaaaatagaaggagatgaccagtcaccttcttccacgctgatcaacaagaaaccggggtttcatgtaagcataaacccatggaaaatgataacattaagcagtgaaaaggctctacaagcagctgagaaagcaaaggaaagactgagccagacgaccccagtttccgggac

SEQ ID NO: 30202 - DNA, 1725 bp, Arabidopsis thaliana landsberg
ccaagctcgcgagtcctctgtaagcattctaaaccattctcaacgattgaaaatggatttgtgatttcactatagatttggtctcgccatggcaggaacgtaatttataggaagaatttgtttttagtttttttagattggaagatactattgttgacatttgtgtagtgaagagcattattattatatacatgaggagctctctaaactttgatgtgtgattttgattgaaggatggggcagccaagaggatctcattccagttccaatgtgttacatggaagctggagaaagcattaggtgatttgacatatgatagatatgatatctctgacgaagtccgtgaacaggtaaaagtgtgttcattatgtagaatgtatgaagatttggttttcctatccatggaggtgtttctaagggtttttttttgcttgtgattaggtggaactagcaagattacagttaagaagagcaatgcagagatatggatcgttaaattcgaagaagttctcgagtggtttatctgagccaatggagaaagatgcctcaagtaatagaaaagttattgaaaagttggagagtattccagagacagtgcattctttatcagatgagaagaaatttgaatcaccccctccttggaagagctcttcagtatcattggccttctttttatcaaaggatggtgatgatgagagattagagaaagcagttgccgagaacagcgatgactcacagaaatcggataatctcacgattccagaggattttctttgtccaatctctctggaactgatgaaggatcctgctattgtttccacaggacaggtctggtttaaaaaatcaaatctttatatagtgctaacgtatggttgttgatttgaaaccttaacaatgatcttctctcttcgttggcagacatacgagaggtcgttcattcagagatggatagactgtggaaatctgagctgcccaaagacacagcagaaacttgaaaactttactcttactccaaactatgttctcagaagtctcatctctcggtggtgcgctgaacacaacattgagcaacctgcaggttacattaacggcaggacaaaaaacagtggagatatgtcggtgatccgggccttggttcagagactctcaagccggtcaacagaggatcgaaggaatgcggtttcagaaatccgctctctgtcaaagagaagtacggataatcgcattctgattgcagaagcaggagcaatccctgttttggtgaatcttttaacctcagaggatgttgcaacgcaggaaaacgcaatcacatgtgttctcaacctctctatatatgaaaacaacaaagagctgataatgtttgctggtgcagtcacctcaattgttcaagtccttagagccggaaccatggaagcaagagaaaacgcagcagcgacactttttagcctgtcgttagccgatgagaacaagatcataataggcgggtcaggtgcgatacctgccttagttgatctgctcgagaacgggaccccgagagggaagaaagatgcagcaacggcattgttcaatctctgcatttatcatggaaacaaaggtagagcagtcagagccggtatagtaactgcattggttaagatgctcagtgattccacccgccaccggatggttgatgaagctttgacaattctctcagttcttgcaaataatcaagacgcgaaatccgcg

SEQ ID NO: 30203 - DNA, 1191 bp, Arabidopsis thaliana landsberg
ctttttgaaaactcgttattttcgacgggggtgtatatgttatatttggtaattattcatctccacgccgttagaattgctcgaattttgaggtggagaatttttcccattttgtgataggaaacaaacgataactgaaaagtgcgataagaaccccttttttatccactgcataagacagaaaagaattatagtctttgacgacaatgttcttagccattttagaaagaaaaaaaattcttaatcaaagatctaaagaaaatatttactgttcataaactacgagcgtaaaatgtcaaaatttaaaaatgcgtctgccgggagtcgaacccgggtctattgcttggaaggcaattatcctaaccgttggactacagacgctcttgttcacattttcacactgttcatttatatctctaaattattccaaattatgtcagtatgctttcgtatatcatttaggacaaaggcagagaagcatagatagagcctatgcataactgatcgtcctatgattcacaatttaaagcagagagaactgagcagagaagtaccaaacatcgaactttagatttcataactttgttactatcggattctctcaaaggcaataatattgacatacatagccttcaaattatctaagaaaatgttaagaaagtacattacaactcaaatcaaagtgttactaaaactatcactactaaaaaattaacctgcattccaaccaacgatcagtaaataaatactaagtagatatgataatcaagtggcccgtgttattacaatttgatgtgagttgctgcagcaatcttctaaaacatcgtctttccagcgttttgggaggtgacaagagtgaatactctgtcccaatcttggctgacagattcttgaatcttgtagtccccaatgaaaggcaaccaagcttcttctgaaccgtttatcccagtccaagtaaccttctccggcacattcagaaaatcgaagttcaacggctttggcggtggctcattaacctttacagtggattttgtctgccgcctagcgcttcctctaccttcagaatgctacaaaaatgtgcaaaaacaacaacagttcaggtaaaacacgggtttaaaccttaaggtaatgtctacaaacaaactcacttcggaatgcgagtctccgttttacgctgtcttgacggacttc

SEQ ID NO: 30204 - DNA, 1782 bp, Arabidopsis thaliana landsberg
  unsure (1)..(1782): unsure at all n locations
agaattggcgatttgctaaaccgcgatgtggaaattctcgtttttcttttccaagaaaaaatggaaaatttctcttccctagaagaaaaaatgggaacttgcttaaattcgaaagtctttgcttttctttttcaaaaaggagaaaaaaaaaaacgagacaattttcctttttagtttcgaatgaaacaagcaaaattggaaattgtagaaaatggaaactaaatttaaaaccgccccgaaagtgggtccacggttgaacaagtattttctttgaccgcctcaaaacgggtccacgatcagatacaatatttagatcgcctcgaaagttgggtccacgatcaaattgtctttaaaataattacaagtacaaaacgacatcatcaggtcgttggattctgttcgccttcctcaacgctgagatggcgaatatcacttcggttgaagaggtcgacgatggaaccatgctgatcggccacgggagcgacttgagaagattgccttgaaaaccaagttgatctggagacatgttcagatcgccctctccgaactcaatgacattcaaggcattgacctcatcgttcaccttttgggttaagaccnnnnnnnnnnnnnnnnnnnnnnnnnnnnnnnnnnnncctcttcctatcaagatgccaaccacttcctctacgccttgggcttggttcagagcgttcaccttaggcttaacgatctcttcctgctcggtgagataggccttcatcttgtcgagacggttttgagccttcctagtagtatgggagaccttcgcagctcggtcggtctgaagcctaatacattctctctcctcgtgctcttttaccgcgacaagtgcgacctgaacttcaccaatctctttcaaaagatcagcctcgtgaccattaagtctggtgacctcgtcattcagcgagttgatctccgccttgtgggtctcatcggcatccttaaaagcggccatctccttcatatcccttgcatagatgatctttgcttggtcaacatgtctcttcaggttctcgaagatgtccctgtcatgcgagcattcatcctcagtttgcgatagtacgaagcgatcagatcattggccagagcaggcggtctagctgaattatccgctttcatccagagctccgcacagagaataaaaaactagaatacttgtgtattcgacagataactataaagaacatctgacaaacctgtggtaactctaattacaggaccaaatccttccgggtagcgatactctcctgccttagaacgcttcaagtgacgtccagagatgactgatagcctcacgatcacttacgagaaatttatcaccagtatacttgaatgtaaactggtcgggattaagagcttcaccccgtagacagacagaaagtctttggcacgggagctccatcagttaggccggcttcagtggccgatctcttcttggattgactggccacccctttccctttctcttcacgggactgcctcgaagtctcatgatccgcagcagttccatccttgtttgaatcaaggatggtcaggtcaacatcgaccctcacgccttcagatgtggcggtctgaattgcggcaggctgattgccagtgataacttgaacctcaagttcaacgacctgagtagagatagtttggttctgatcgccaccgacaatcagttgagcttgagcattgtcggccccttcaagacacgtccggtcttgagaatcttggacgatcaaagtctcgtgagaaacctgatcaacatcagaa

SEQ ID NO: 30205 - DNA, 1780 bp, Arabidopsis thaliana landsberg
ttttcttcttttttgtaacttcggttcatatactggagtgactgacaatcccttcctaatatttgcaggttggagattctagacttctgtctgacgttgatgatcttgctagtactttttcaaaggttagctagctttaatacgcgttataagtgatcacacttgcatcctatacttctgttttctttctcattatattttcaaaatggtaagattgctttgaagaagcttgtgactgaggatttttatctttgcttttacagttgaatagggaacctgatgtgtatagtaatacggggccaatcactgataggcgatcaagtcagagtgagttcctatttgccctaatgttgtcttcaaatccttgtgaaagaatacttgatcaatttatttctgtgtattgcattgatttaatatttcatgtactgtctgtaaaacttcgcatcatagctttacttacttctgtgtatttatgtatgtcaaatctgtgtctgtcagtttacttttaacgttatgatttagagtgagctgttttaactccattctccttatccatatgtttcaacgatctgccctggtttcttatacattcccatggtttttcatctatcttgcaagcaaagctttagtttgtggtttaacatttcaatggtttctctcagattctttagctgctgagtggacccatggggaagagttaccaaattggtacggccggcaaatactggactctgatgccattaaagatgacaaggtgtggtcagcacagccattttcatctctggaccgtgttgagcagagaatccctgacagaacaaaattgtatccagaaccacaacgtcaactgcatcaagaccataatcaacaacagttttccagcgaaccaattcttgtcccgaagtcatcttttgtttcataccctcctccaggcagcatatcaccagatcatcgtttaggacaccctaatataccatatcaatctggagggcctcaaatgggatcgccaaacttttctccttttccaaatttgcagcctcagttgcctagcatgcatcatggatcaccgcagcatactggaaacaggcctcagtttcgtcctgctcttcctgggaataatctccctccagctcaatggatgaatcgtcaaaatatgcatcctggggatagttccgggatcatgaataatgcgatgctacaacagcctcctcatcaaaacggtttgatgcctccacagatgcagggctctcagaataggttaccacatccgatgcagcctcctctcgggcatatgccaggaatgcagcctcagttatttaattcccatctttctcgatcatcatcctctggaaattatgatggaatgcttgggtttggtgatctgagggaagtaagaccaggatcaggtcatgggaacagacagaatgtgcgttttccccaacaaggctttgatgctggcgttcagagaagatatccattccggtctaaatatatgtcagctggtgagatagagaatatactgagaatgcagcttgttgctacacacagcaatgatccttatgttgatgattactatcaccaagcctgtcttgctaagaaatctgcaggtgcaaaactgaagcatcatttctgtccaaatcatttgagggaccttcaacagcgtgcacggtcgaacaacgagccccatgcttttcttcaggttgaggctcttggtagggttcctttctcttcaatccgcaggcctcgtcctctgcttgaagtggaccctccaattcagctaaat

SEQ ID NO: 30206 - DNA, 3219 bp, Arabidopsis thaliana landsberg
tgtatttgccacaattctcaaagcactcttctcaatattcttagtgcctttgttaatcatttttctcttttaaccttttactttacataaaaaaaaaattcatcagacaaaataaaaccaaactatattttatattttataaaattccgtattttctaaagtgatttttaatgaccaccatcaagttgatcaattggaatggttattaattttccgtttttaacatttatacgtgtcctacatatgataattggtaatcatttcttgtttgatcattttttttatctacaacatcatcaactaatgcgacagcctcactaattagtaattacactaatcttatcatctttaaaatgttatgaggaaaatgataatgaaattaaataatctgtcaaatataatgatattattttcctaacaactacttactctattttttttttttttttaacatctgactttattaatttgtaaagggatagtacaaatagagttgtagccatcttgatggtacatgaaaggtttcatacaaagaagacattgagtttgcatactttgtgagtttgtccgctgccaagtttctctcccgattgacataaccaattgatgagaagggtaacttagtcatccaaaaccgaatgtcataaagcagtgtttcaaggagatgatgatcttcagtcttgttaattaggttcgttagctcaagtttgtcgccttcaaaccacacataacagtatccacgtatccaaaccatttgtagggcatgtaagaatcccaaggcttctgcttgtagggctgagtatgattgttgtagtttcgcacaacctgaatgtagtacacgtccattgcagtcacggagtatccaacctgtgcttgtataatcccttccctgaacatagccactgtcaaagttacatttgagaaatccctccggtggtgaactccattgtttacttcggctcaacggtcgatcattagactgtgccgtgttgtgtgagatagccgtatcattaaccatagtttcgacccattcggttgcttcttgttctgctttctgtgccaccttccaagggaaacgatcaagctgttgaaaaaggtattcgttacgtgatttccataagcgccacattatccaaaaaggcatcaagccattaagaatgggaaggttttggtttttcttcccctgcaatattagtcgtatattctcttcaagattatccgtgaagcaaagtcgattactcccagaaaagtttgcacttctccatacaacctgcgcataagaacaagtaaaaattatgtggttaattgtctcgtcggcattgcagcatctttgacaagtcgggtctgctggaatgttcctgttccggagttgagtggttgtggataaagctccggataaacagcgccaaatgaaatgcttgatctttggagtgatcttcaatctccagatttcttgttttaatgcaacgtctccttcaaggggattaatgatttcctcctctgtaagattgacatgagtggcaacccaataccccgatctcaccgtatattgagtattgcgagtatacgcccatttataagagtctctagcggcatagttagagagatacaaagatttagccagttgttgatcctccggattaagaactccttcgaaaatcacaggatcccattctcgtttattttctctccataaatctgctactttcatgtcctcatccagaattgggccacgagcaggtcgcgggggaagtgttggaagccaagggtcttcccatatcttagtagtttggccatctccaagccttacccgtaagccttgttgtagtaacaatttcccttcttgtattgagttccagccataagatgcatgtcctcccttattcgctcttaaataggtagtattgggataatacaatcctttatatagacgagcaagaagactttgagggttagtgagaatgcgccacgcttgcttcgcaagtaaagctcgattgaactgatggagatctttaaatccaagatcgccttcttttttagggagagtcattctttccatgctacccaagggattttctttttaccattctcctttccccaccaaaacgccgttatcaaactgtttatctcattgcaaattaaagtaggaagtaagaagcagttcatcgagtagaccggtagcgccattgctattgccttaataacaatctcctttccagctggagataaataattatatgcccatctttctgttcgctccttcaccttggttcaatggtattcaaaaagttccacttttctacgacctaactgttcgggtaagcccaaatatttacctcctcccccaacgttatcgattcccagcaatctatgaagtcgttgtcgtctcatggttggaattttttgaccaaaaattattgaagatttcgcgtagtttatcttctgacccgaagcttcttcatatttcttgaaaatcaacgctagctgctcaatattctgattagatgctctacagaaaaacaaggaatcatctgcgaacaagaggtgagatatggcaaggcaatctttggtaatcttcatcccatgaatctgtttattaacttcagctttacgcagcatattactcaagacttcagcgcaaaacagaaataaataaggggatagagggtcgccttgtcggatacctctcgatgggaagatcttaccatagggtgatccattgataagcacctcataagaaacggatgttacgcaagtcattatccatttgacccatctcggtgcaaagcctaattgtatcataaccttttccaaaaaattccactcaactcggtcataagctttactaatatctgtcttaacagccacgtacccactttgacactcacgtcttgatttcagagaatgaaggagttcatgagcgaccaaaacgttgtctgatatatttcgtcctgggacaaacgctgcctgagagtccgagatcacatctccaagacactgctttaagcgcttaatcaaaatcttacagataatcttgtagctggcggtacagagactaataggacgataatctgacatgtgtttaggatcgatgatcttagggatgaggcaaatctgagtttggttgatttgattatccatgacatctgattcaaaaaaatgacgcaccatcaaacaaacatcattcccaatcagatcccaaagatgatgatagaacgc

SEQ ID NO: 30207 - DNA, 4822 bp, Arabidopsis thaliana landsberg
catttcttccatctgcagccaaccttgcatggtcacagccagtaatattcaaagatgaccaaatatgaagacatctccaccaaaataatattgcaatttatttctgaaataactaaaatcgcttgaactatattttaaatttttgaagaagtggaaaaattgcaaaggggaatgcttgcaatttcataaaaaaaaagttgcaatttaaaaaaaagagcaattcaagattttcggcccttgagtttttgatgtgttagaaattaataatcaacaggatatacctgaggcatgttataatactattcaacgacaacggccgttttactataaaactgtaatcgtaaataaataaagtcaacggtcagaatcgttggctgcaataaaatacgatttatttagttttaaccatacttacacgcaaatgtaattctacatatatacgtattatatcaacaagaactctgtttattttcaaagctttcttgatctttcattctccattctcttgatatattcacctaccatgattccaacaagatgcaatgagatcaacggctcacgtccttcgtcgctaaaactcgccggagaatcccacaccatcaagaaaacgtcgttttgcaagtcgaagccacgacgcacatggacgggcatctccggttatcatctacgcgcattctccaaaagtgatccacacgcgtgccgaagacttcatggccctggttcaaaggctgacgggtctagacgagattattagacggaacactagtgaatcttcctcttctgttgtgacggaagaggttaacgtcggggatgataacacggcggctccgtttagtcaggatagaacacaacgacagaagttaactgatatggccgttgttcacaccgagctcgatgaccttgtgttggttctccaactcaacttatgtatatgtcaccgaaccggaccgattcatttcgacccttggtttttaagttcgaataagacttcttagcaaaaaaaaaaaaaagttccaataagacttcccataaaatatgcttttatgatttctattttatatgtatacaattggtttgttcattcgttcgttcataagttgtttcactgtgattagttggtgtaaatgtcacttaactttacaaactaaaaacaatgtcacttaatatctgtatttggttgtttaaaacatgaaagttaagggtttacctgttctttttacataaattattccataaatctcagcgacaacgtgtgggcttcaacaaaatatttgaagaccagaaatgcattattgggcttcgcattaaaatgagcttcaagctcatcttagaaagtttttctaatgacgatctatgtgccatcttaacaattctttgaggaagttttataactagaaaaaatgtaaaactgaaggtggagatgagtattagttatttttattgatttctagtagcctccccaaagtaaaacactagtagaaattttggaaacattaaaaccaagtagaaaaaactggaaactaatggcatacaattaaataaattgtgttttattttgttaagtgtagcatgttcacctcaacaaattgatagttcatctgaaactgagaccatcaggagaggctaaaaaaagagtccttttcttgatataatgttgttatagacctttagggccctcttcctgagcccaaataacttattaaaacatatttatctctatatttggcatatatagatcctaggcccgttattaacatgccatgttgacaaaaaaacaagaaaaaaatcattcatgccactatgtattttccccccactatgtaatcatgatattgatttcctcatctacttacaattcttgtatttgttttcttttttgttagtccacaaatctacatctacttttcgaagtgacactccaataaataattacattctcttttcaaatcttcaatgaatattgactctaaactgcatggtgtacctacatgcaatattccaaaaatgaaagaagtattatgaagaaagagccattggaaatttcatgaaagaagtatttaacttggtcaactagttggccatctaaattgggtaatctcgtgggttacaaaaatgtttcatgtttcatatcaattaaaattggaagcatttttgtttagaggttgagatttttttatattgtttttaccttttaatgttaagttttctaaaacagtatagttttaaattggtccgactagccagtccgatacagtttttaaatcattgttgtaaagcaaaaaacattatgccatcttaactcgaaatcacttttccaaacaacccggttcacttacttccatagaacacgaaacatacgaatatctttcataattcaaaaagcagtcgggtgtaaaatgtaaaactaaagctttttttttgttaattatatgcttgaagagaattgtttgcgtgcaaatgtgaaccacacgaataaagaaacgtggctcccaaaacgaaagaactattcaattcaatgcagtcaaagtctcgcacatccttagcttttcacttccctataatgtgtttcgatcaacacgtttctgtcttctatacgaataattaattgtcgtgtaatttgatgatttgagtaagttaatcatattgaaatatacgataataacaataatacatatgtgttcaattaaaatcagatcaattatttaactttttttgaagagttttttcttgttcgggcagaaaaaaaaaaactcatctgcatgaacgggcactactcgggttactccaccgtaggtatgaaagttctggttgatcgattcaggcatgaaattccccggaataactatctgatctgtattgtgacatctccaccaagaagattatgatgaaagaaatgtttggcctatttttaaaaataaagtcggattggttaatcttttttttttttttgggttttaatgttatggttatcttttcaagtttctattatgttagtataatatatatcctgaattatcttcaatattatatttgttctttttgtgatttctgactttctgtcatattttaatcacatcacttaattccaaacctattagaaaactcgtaaccagccacattgggtagtggcttcacttcacatggagccagagaacaagtgaactagtaaccgaccaaacacacaaacacttttattaatctgacgctgatttttattcaatcaaaactaaaattttaaaataaaaatcgcagagaagcaaacagacaaattatttacaaaacgttgcgtcgttctcattaatctttaacacttctttttggcgttgaatctttcgtccgtcctcttaactttaagacaaaaccgtcccaaccaatattttctctcgtcaaggattccatcagcccgagataaggacgtcagcgtcccaccaagtctcagcctcacattccgtcaagtccgtcaacacaccgttaaacttcctcaaatctcccacggctatctctccgctaacatcatccctgacgtatactttctccacaccaccggtatcaactccgattatattccctaacaaccgccccggctgcctccactccgcgagcaaagccggcatccgaaaaccggcgcgtggatcacacgccttcactttaacggcgtcaacaccttttttctccgccgcccaaaaaaacggtgacgaggttgagttatagttcttgagaaacgttgccacaacattctcatgatcatcgccatcgatatctaaatgatcccaaagcttcacgactccactcgaaccaatcccaccaagatcaggccatgagaacaaatctccaaaactaccactacatcgcctccccatccatgtgcaattaccattgtctccctgatcatcatcatcatcgtaataatcagatcctctaacgcggaaacctccgttgactcgtcttcgattaaagatcgagtcaacatcctcatcttcatcatcagcctcatcttcttcgtctttttcatcgtcagaggagacggtagaggaacaagaaacatcggaatcgctatcgtaatcatcaaaaagagttggagaggaaacagagacatctatttttcttaacctaacaactagactgttgagtttactaacaaagttggtgaaataagctagaaatgcgataatcaaagctccccatttccaaaaaccataagcttggtgtagctttccgattccggaaacagcaacagatcgagaaagaaacgaaggatcattaatcgagtttataccaacttcgaaatctcttattctattaatcaccggtacctccataatctctgcagaaagaaaaaactaattaggttttttttttgtttttttgttgttatgagaaagagagaaaaaaagaagagagatttggatgcgaaggcttggggaagccttaaaaagaccgaactgaagggttagagagtacacgtggcggagattgagtgggtgaagatgagagttttgtggcaacacgtaggaaaaaaggtaagaggaaatgggaaagataagatacaatgagtcagctttctgacagatgtattctctgtgtctgtaactatctcatgaccacaataaataaataatagtttagtttgtttttgggtgttattatcataaatatttttgagtggttcgaaccacctaccacaatatagcttttttttttctttttttttcacaattattgaaaataaggtttggatttgaggcgtccaaaataattgtgttggtggttactttatgaagcggatcattgatgataatttttttgtttttgtttttgttat

SEQ ID NO: 30208 - DNA, 4789 bp, Arabidopsis thaliana landsberg
  unsure (1)..(4789): unsure at all n locations
gtaaagtttgggagatatttgaatagtcacgttccaaattaaggcatagtgacgttgaggaagataccttaaccttggttaacaccagctctaagcgcgaagcttctaagaaggaaggttatggtgtacatatgctttcacaacaaagaggtcagaggattagcaataattctctctattaaagaggatggttggtacaaaggtttcttaattagacacatacaaaagatgtgattcactctattactcgactacagaaagaaaaaaagttatgatggtttgacgccattgttattgctatctcttctgttttatttccgtgctactatatacactcttgtttcgcctatgatcctccatttctgaaaattcaaagatgaatctcggatattgcgatataaccaagtgataagaacgcatggttaagctcatggaacaagagcagtgttttctgttttttggagggtgtcacttgcgatgttaaatcttgcgaggtgatttcacttgactttatcaacaacacttatgaaacaaaatagtgctattttaaaactccaattaatatattgatcaaagatttttcctcttcattaaaaagattttcttatctcaaaactctagcctttaggcctaaaatttattaggtcaagttctaggttcaatcagaaacctaattaatgaactaagatacttggatcttcgcgaaagcaactttagtggcaatattcatgtattatattttcccaatttaaagtcacttatccaattaaacaccaataataattactttgaatccacgcttccacctgacaagagtttattccacaacttggagaaatgtgatgtgaggtgcaagcaaactcatttgttggccctttacttactacaccttgttaatgtaccctccattacattttgtttatttggagaaaaacctattggaaggaccaacagattttgggaatataaatatcttcatcgtcaaggctttacttattatcccttactcgtaacattttcgagagtctgtcaatatatctaaatttcttaatttggaagtgaattagatctttttttttacgctatatattttctttgtgttttgcagggagacaaaacgaacactgcacttctacagaagatttatgaatcctagtttttatagaagaatttggtttataagaagtcaggactctagaaagttgtagccttgttaaaaacaaaaaaaagtttactgtaccatcatggcatcatccctgtcggaacgatcgttactgtcacaaccgttacggccaccacaatcagtcattgtcaccatcagtccatcaccaccgtcgttacaacggtatccattgttcccaccaccctaactgtggtcggctcgccactgttgtttccattaccaccgccgttgccatcattgttacagtcgtaaccaccatcatcacggctgttatcactatgattgtgaccactgcggtcaggtcactagtcgtaatttgtttttgttttttgtttatttatttattccaagttgttctatataatatgttatgtcactaactattcagtagcacaatttttcttactgtgggccacgcactttgggccagaagttatgggttagacctttaacgcacacaaacaaatttgatttatgtttaggatttataacaatgttaacgtcacggtcaaattgatggtttcagaattatgaaggaatttgttattttgaagtttatctatatatttgtttttgtatttttttcttttatatattcaaataaactctaagggaagaaatctagaaaataaaaaagcatctataaagggagtcaacatacactcctattaaaggaaaatatctttctcaagatttaattttccagtattcctatctatttttttttttattaatgaatttattttcataagattagccaatagctatgagtttagagagtgatatcaaagaaagcaaacgagtcgttgaaccatttgatgatgacgattgtgcggtttgtttggagccgttggctaatgatgctgacgaacgaactgttgttaagcttcgatgtagccacaagtttcacttaggtgagcaccaaatattttttttaattagaactttgctttgagaaaaacatagatccatttttttttctcttgattaatatcccttttattcttattatttgttttgttatgaatctattatcttagtttattcttcgatgaaattaatttgcttttttctctgtctctgtctccaccttgcttgatgtgtccattaactcgaacatacattattgggtcttcagattattacatcactccccgagacttcttgctgtctatatatttttatttatatatctacacaaatctacaataactttttcattacaatatttttaattataaaaatcattcgctaataggtttggtttcctacagattgtgttggttcatcctttaacataaagaacaagatggaatgtccatgttgtagacagattgaaaaagggaaatggttgttcgcagaacctgtagatcaactggaagaagatgatatgtcaccactcgacatggtaatagatatagacctaaattttttccaatcgtgtgatatttaatttggtttggaattgatattattggatgagtaattaacatattgatgatttatcgttggttcagctaaccaatatggtgagtccttcttttcttcatattgatgatggaatcttcaccagtatagctagtgtgttatttccaaatgctccgaaccaaatcagtaacaatgccaacgtgagcagtaacccattgggtgagccgcgtaacactttgttggacacaaggatgcaacgtcaagtcgacgaacatgtagcccctactgtcgatagcgaacgtcgtttacccgacatgctgttggaacttcatgacaggaccgggggaagtggaccaagtggttatgggcgtgaaagaagcggtgggggaggcggtgaaaacagccgtggtggggaagcggtggcggaggaagatcaggtgggggaagcagcagaaggggcggaaatgatggattatctgaacttttagacttggaaccaaataaaaacaaatgtgatcatttagactttgctgcattcagtgttgtttttttccaatgatgtgttttgtttatcaaactctttaatttcatggttttttcactttttttttttgttttggagaacttgacattgagtttctttgtgcatcagaaagttttatggcctctttttattttattataatattaaactaacccaagtccttataaaatttaaagaaaaacatgcttaagttttaggtgtaaataacaataaaacattactaacagtaaacatacacaaaacatgctcaaagattttcagtttcactttacttagcaacaaagaccgcatcttaaatcattgttgtttataagaaagtgaatggtaaaaactaaaattgggattctttcaatcgcaacgtgaagaaataatgatcagagatttcaaaatacggtgattcagaaaaaagttatcatgaagggaaaaaaaaagaagaaaaaaatagcatacttgtaattcatattagatagaaagaaaatcagatgtactgctttacataagtttgacaaataaaactagaaacaagcttcaaatggaaacacatctcttacaatttaatttgttaatttaacatttagtcgaattgaagtcctaataattaatcaaaatttgactaattctttttattaagtgggctttgtgtatatgactggatcacctgttttgacggatttcggctaattttagaggcttaactcaaatcggatttgtctatctaaatcacaaatcaaagccaatatgagtttttttttttgtgattggacacanaaacacattcaaaaaaatccaagaatcatggttccctattaacttacgtttgaagtttttttttttttataatcttgaacttagaatattcctcttacatcacacacacacacacttcacacaaacgacttataggttcatagcatagaaactagttaccaaacctgaagacagaaaaccaaagtccaaaagtagaccatacttaacaaaatggaatcaccaagttatggaaatagggcttccttgggccacaagcagcagtagcagccacaacacccaagttcccaccatgtccatttacaacatccatgttccaaaacccgtcccatatggcattgtcttcgttcatagtattagcatcaggtatgtttacaggagaaaatctaccttgtaactgctcctctaatgaattagagttatagccaaagggttttgatgaatgtgttatttgatcaggataatagaacacatcaccaccgccatcgctactgctactgctattgttttcttcgagtaaagagatgatctttttcataccgagttggtcgaactgaaacaactgctgttcttgttgcaactctatttctctctgttccttgaagtgttgcctttttaggagacgactctttatcttctccgcattgttagtcgtaggctttgcctttttcttgaaatgggttctccaatagttcttgatctcattgtatgttcttgctggtaagcaacgtgcaactgttggccacctatacggaaaccgtaagacctaagataaaagccatcgactggccgaccagcaccaaaaaaaaagacttgaggttgtttgttttcgttttgaggtattgttgacctatttcccgggttagggt

SEQ ID NO: 30209 - DNA, 2981 bp, Arabidopsis thaliana landsberg
agacgagaatgagaaagagaaagaaagagagagagagaaagtaactgaaagcgaagaggagaatccagaagataaccagaaagggaatccagaacataacccgaaagagaagtccgaagagatgcaatatcctgactttggtgctagcaagtttcataactccttgaacgagcacatcatgcctgattctgacaaggtacagagacgtgaatacctgtgtatatctcctgttttactcaaaccaactattttggtgtggcacatgaatttgaacggaatcgggactcagggccaattttttcatattttccaacaggataaatacctgattctgcacaatagtttcttggttgcgtgatattgttctttccattatcgtgttcttcttattttagccgttttctgacattttttcaatgattccagagcttgggcaatgtaagtggagaagaaatcaagatggttacggaaggtttgacaagtttgagtaaatttggagagaaaggtcctcaagaaagaatgcacgaacctgtagaaattgttgaaaggtaagctgatttggatccaaagttgaatgtgagtcttttgaatgtttgtgacttgtgattcatggttgtatgtttcctttttgctacgacagaggaaaacggcctgcaaatgaagccggtaatgatgtgggtacaaagaaggcccgtacagagtcatcaggttgtgcacatgggatttgagggaatcactttcatggcctgttttagtaaaacagagtatttcttttgtctattagccaggtacaagttttagctggctttttaaggctccttaacatgtcacgggacgaaaaagagagaaacaaaacaacactaccaagacattgatatgcaaatgggcctcataagtagacccattaagaatataatgcataatgaagcccaaattacgccgtttctccgttccctttgtcttctgagcgaccctgcaaggctctcacttctttttttcttcttcttctcaactcacccaccgagtttcttctcaattctcgcgggacatttcgcgggcgagggaaaaaggtaaaatttttggcggatagagagatcgaaaaagcttaacatttagtgtctgggttgttttcttatctcgtagaaatttagaaaattcaatactcagcttagcaatacccaaatctaacctcgttatagctaagattactttatcgagttttttcttctcttgtgctcatcgaaaaccatatcaagggtcgatctgtgttttttgtctgatgttcttgtttaagatctctgtcaagcacgtaagtagcttaggaactagacgaagcaatcgcagaaatatttaccaagctcccatttttcttttgtgggtttttctcttgtgtttgctcatattgattctgatctgatatacgtgtgttttgcttctttgtttgattatataggaatctacaagtatttaaacctttgctgatttagaaacgcatgagtgcatcatcttcgaggatagcagtataaacatagctagttgattgtagagaatgtataaagcagtaagtaagcgggtaactagaagtagtggatctggtttgaagcagacaaatgtagataatggaggagagattagtccaactgttgacagagtatctgaacaaggcaaagcatcagaggcagggggtcacataccaaatgatgccaacggaaatggacatttgcatcatgagattatggatcatggaaaggggaatgaagaacataaaccaacccctcaaaccgtgaagaaggattctaataccaataccaaattttcagggtctcatcgtgagcttgtcatcggtcttccttgccgtggacaatttgaaatccacaaccggtccagggcatctacgagttcgaagaggttaggaggaggtggagaaaggaatgtgttgtttgcaagtcacaagagagctcatagatctaaggaagatgctgaaccatctttggttgttgctaattccacacctgtaggtcgaccaaagaaaaagaattagactatgaacaaaggacaagttagagaagatgatgagtacacaagaatcaaaaagaaacttctatactttctaaaccggattaactatgagcaaagtcttattgacgcctattcgttagaaggctggaaaggttcaaggtttgtctcttgatgacatttgcttttccttttaattatgcattatttgagagttataggtatcatctgtgagatatatttctgatctcactcagtcttgttgattatgtgttctttgtagcctggaaaagataaggccagagaaagagcttgaacgagccacaaaggaaattttgcggcgcaacttaaaattagagatctttttcagcaccttgacacactctgtgctgaaggaagccttccagagtctttatttgatactgatggagagatttctagcgaggatgtaagagaatattgttctgaactcaacctttgttcccttgtttatcctgatagaaccagtttgtgtctctagaagtattgataatacgagcagttgtttaatcgcagatcttctgtgcaaaatgtggttcaaaggacttgtctgttgataatgatatcatactatgcgatgggttttgcgatcgaggctttcaccaatactgtcttgaaccacctctgcggaaagaagatagtaatattctctgcctacgtacttggtagtgttttaagcagttcttgctggtatctacagctgtcttttttgttggttttaatttttgtagttcctccggatgatgagggttggctatgccccggatgtgattgcaaagatgacagcttggacttgcttaatgattctttagggacaaaattttcggtcagcgacagttgggaggtatatacctatatatgttgaggtttttattgttaaagaaaagaaaacacttaaaaacacacctgccttgaacttttgtgta

SEQ ID NO: 30210 - DNA, 485 bp, Arabidopsis thaliana landsberg
aaccccatctgtgctaccaggaaatgtgagatcatctttttcattttagataaacagaatacataaagaaacggattcaggtcacctggcaaccaaagtccgacaaaggaccaggcccggtcctatcattcttcacattgccattagagataatatcttcaaccatattcaaatacagaaactcctcatgctgatcaaaaaccatcttaggaagaaacaaaaacttcttcccatcaaattgaagagactgtgacccattgctttcatcagaagattcatcagcagaactctttacacggacaaaagtcgtgaagcaaaaccgaagtccattttcagttactggataccaaagataggtttctttcaatagaacctcgataagaatattaattttatttaagtactagttagtaaacgaagaataaaagcaaacttattgattattttaacagatcggaaggtcttatcttttttactatgcaagt

SEQ ID NO: 30211 - DNA, 4156 bp, Arabidopsis thaliana landsberg
atgaatagttcacttgggttgtttttaatactttttttttaatcaatgagaaatcaatgctcgtgtcttctcttgtcagccacaaaactcataatccggttgagtatcatgattaataatatgtcacacttttatgctgctgatcggctcactatttcaaagaaaatcataagcagcgtgaaacgggacggtctagttttggtcgataccgttttacatcaatgatgcgaatttgacaaaaatataattttttctcgacggtaggcacatttttatgggggaaaaatggtacataatgagctattatttgtctatgatatataactaccagttcggtcgtgtattaatttgcagtgatcgttatcaagattcgaatcgaaaccatgggttgttttaataacatgggcgatttgactttgtcaacgcatactcgttttgtgaaacttttgtagtatgtggtctacataaaccatgcattctcttaaaagataaaatattatcgtatatgaactcttttaagtgactactgaatattataagaaaaacgttgtctcttttgattaaatgtaatgcagaatagcaattataaaagtaatgctatagatattttgttgtatagctgtgggtcaacttttgctaaaagaatgccactttggaaaaaatgactcaagcatttagaccaaatagcaatcactatagttttcacgtcaacatcaaatttctattcagtattacgtactaattataacttcattttctatttgtccaaaatggacactaactccgcagctggtggctatgtttaatgataagcatctcgtagagatcgtatatccaccactcccgacgaagggttagagaagtggggtcgtctccaatgtgtgacaacagtcttagagacacttacgtacaccttccatcgtccatgcacaaatattttaagaaaacaggaaagtagaaaagctttggatatatgattttgaattgagataggtataaatatagtagtaggagagggagaggaagagagggaagagatgacatttttaatgaagggtccaaaagaaaaacagaatctgaaacgtcaaatcatgttagttgaggtctttggctgtttgtgcctctgacgggtcttgtccacacactttaatgtttccttttctttctttcttttttcactgccttttttcttccttcattattatgtttttttgcttcaatcttcattattaccgttttcattatcctttgtttgtttaacggtaaatctgtttcggaacaatttagtataatagccccaaataaaagtagtgtaaagaatgtattagttagttagatataattagttaaatataaattgccaaatcaagtccataacaaattagaaacgtggatacacagctttatccttaattttgtttttgttttaattagcttacatgattgcatgtgacacataaatgacaaaaaacaaatttgacataaaccatactttaaaaataataaaattatgtattaatgatgttattggtttaactgatttttattttagaagtctacactttaaagtttaatccctacctccaacatctttaatcctaacaatcctatgaaattgtatatgcttaagcagttaaccctaacactgtgtacccttacgctaatttaaaagattctatgaaagtacttctaattttatattatttttagcaatagaatttcataacattaatttctatgctttataaacatgtttaattctagatatggtataactatatttcttaaattgttaccctaaagtcgtataaatgtgtgtaaaaaaaaaagtcgtataaatggtgaacaattaaattgcaaagatgaaagaacacaaattattcacgtggccagcccagcccagtaattgatagatttgttgtttaagcccagcaattagtatcgaatcgaaccaatattctgaaccgaatacatcatggttacacgaccgacacctataaggttgtcttctttgatgatcaaacctaaagtccgaaaaagaaaaaaaagaaaaaaaacccgaaaaactttagctcattgaaagactaattgactaaagacatggcaaaaaggatactgtatttagtaattgtttgtgtttgaattgattacgtcaaatatagtttgataacgagatgcatattgcaatcccatagccaaactagaaatatacaaatttgaatagaaaaagaaacgaactaaggcaagtcatatacggcaatgaaggacatcaatacacttcccatccaaagcttcccatctttctcctccacttcactcactgccttcaccactttccctttactatcttccaacacctttagcactttcccttcttcactgtacttcacagctacagcatgaggccaaccacctacctgcagcaagtactgaaacttcactgatatcggcagcttcagaaagaacttcctcaccctcgggtaatgcgccatcaagtgtgtgaatatgtttctgtggcagtgcaccgccacccagaaatctccatctttgtttgtgcggatgttgtctgggaacccatgtaatagagctaccacttctgacgttccagctttctcccctttcaaccagtatttccgtaatctgaacaacaacaacaaaaaatgacttagattctgttcacagtattggagtttgtttctagcagaatcattgaaacgatatggaaacaacatgctaatcgttccattttagcttcaatcagaaatgctgattgcagaagttatgccaagtatatatacagacaatgatgtggaagtcagagaggaattaagatgaaggactcaccttccaatagatccttcacaaaagatgaaaaaggagccgtctttgccgagggataatccgttaggaaactggagatttctcacgagagtggtagtctcctttgtttttggattgtatttcaacaccctcccactgtcttcccccgagacaatcaaaagcataaatttcctacaaatagcgcaatcaacatactcaaacaaaagtagtaactagacatcggaagctcattgcaacttcttgtagatcctcaaaagataaacagaattcaacatttaaggctctgaagttatagccgcagtcaaaattttcaatttatgtgcctatgacagatcatttcaatcaatataacatgagttccaaaaagcaacactttatgcaagccactgatcaggagagttagtaaagatcaaaactttaaaaccttacataccttcgttggaagaaagagctgctatcagtaaagtaaacattgccttcatcatcaatgtcaagatcattggtaaatctcaaaggcacaccatcagcctcgtttgtaacagaagttgctaaacctccttccggaccaactttcattatccccaaatacgcatctgcaatgtacaaatccccatttttcttgtcgaatcgaagacctaaaggccgaccacagatatcttcatcctttaagtaatccaaaagcgatggcttaggatcacatagctctgacctaataaaacatcaaagttgagaactttactggaaacgaaatggtcacaaagactcgattgcaatcacaagactcaccgattgttcgaagtatatgcgaaatctgtccaacgagtgccattccaaaagagaattcgaccgtcggcgactccggtataaggaccacgaccttgcggatcgaaagcaatgctctcgggaccttgaacctcgttaagaaacctgatctctgaattctgcaacagattctggcggtctctctcctttggaagtgacgataacggaggcatgtcaatcttgtaagttttgaaatccgggaacttggaaatggagctgtgactgaagggatcgatagcgcaatagatggcaaagacgagaaagatcttcgcgagtatgctcatggccattttctttgtacgagggatgatgatgatgatttgaagaagaaaatggttggggaagttttaaggtagagaagtagagaagaagtagttgaagtagagtacacttttctggttgaaaatttaaaacttttctcaattgctgctctttttcgatatattaagaaaagtcaaggagcaattgcaaatcggctaatctgatggcaacc

SEQ ID NO: 30212 - DNA, 4752 bp, Arabidopsis thaliana landsberg
cgtcatcattcctaataacagtcaaaatcgaaattatcccttttggatattccctcccctctctttttcctggttgtctccctctctcttgggctcctggtgggccttagctctctctagatggaaatcgaataaagttagccatcaatgttgattgattcacaccttcgttctaatctttgttacttgtggattgattatttataaatgcttccattaaatttccgaatattcccaagcatacaatcttactaaactcctcctattcgacagacacatcttctctaccttgataagctttacagctcctactacatattatcacgccgtttgattaaatgggccttatactttttaagataagatatagtgtctgtttattagtaacaagatgtattatgggcttttaggagagcccataattcaaactgttaaaagatcaatttcctataatgggcctgacgacgagccaacataggtggggccaacccaaggacgggaaaacgtgactggtgagtattattattagaagactgtcagtttcacttctcgaggaaaattgctaatcggagaaacaagtgagtggaggagagaaaggttcccgcgttgagagagtatttgcaaattaattaaggtgtatatttgatgctaggagagggtgagagataagatgggttttgtctgaagagctccaacttgattcgctcaattgatctcttttgtatcgacaacctgcgatggcgccggcggaatctggagtctctccccgtcggaatccttctcaagttagctcctttatgcccacttgaactgtccatagcatgtttggcttgtgctttcatttctatctaaataaagatcctagctttcttgtgctgggattcttcttttgctctgttttcagacttactgaattgttgatatccgtttccttcagctctcgtggatgaatctctctagtaacttgattttggcctaccagagctttggtgtagtctacggtgatctcagtacttctcctctttatgtcttccctagcacatttattggaaagttgcacaagcatcacaacgaggatgccgtatttggtgctttctctttgattttctggaccctcacgctcattccccttctcaaataccttcttgtgttactgagtgccgatgacaatggagaaggtgcagtagcaaacgagatcctcctctcttcaacttatatctccccggatgattgaatctttttctgtttttgcctctctaggcggaacatttgctctctattccctgctttgtaggcatgctaagcttagcttacttcctaaccagcaagctgctgatgaggagctctcagcttacaagtttggtccttccacggatactgtaacttcatcccccttcagaacatttcttgaaaagcacaaaaggctgaggaccgctttgctgcttgttgtactttttggagctgctatggtcattggagacggggttctgaccccagctttatcaggtaaagcatgcctgcctcctacatattatattcagagttggagttaatttcatcgtctgttacttgtagttgtaaccacccaccttcttcgtgaccatccttactttctattcatcagcatcttttttgtttgtttgtggtcaataactgactgactaactcctgcttcctttcagttctgtcgtccttgtcaggcttgcaagctacagagaagaatgtgactgatggtatctaatacgtgttgcttccactatgtgcctgtatcaagttttgtttgttgtcttgattacatcttgtgactttcttttgttattgatgttttgtctcttaatccactgcaggcgaactactggtgcccgcctgtgtcatattggtcggactgtttgcttatgaaacaaagtggtactcacagggtggctttcatgtttgcaccaattgtgattatctggcttatttcaatattcttcatcggtttatacaacatcatccgttggaatccaaagataatacatgcagtttccccactgtatatcatcaaattcttcagagtgactggtcaagatggatggatatctcttggaggggttcttctttctgtaacaggtagttctggttctggatcaaggcataaccataatattatttattttctgcttgttttgaatcctttagtgaatggtcttatgttgctaaagtgattatcgctgtctcatcaggtactgaagccatgtttgcaaatcttggccatttcacctcggtctcaatcagagtaagcagaggtttcctgtctagtagtggtgtacatcagttattttatctgtgacttctctacagccttggtagttatccttcaacataagtccatgctggttgcgcagctttgtttcttacactctacttttttttttttttttttttgtgcaggttgctttcgccgttgtcgtgtacccctgtctggtggtacaatacatgggccaggcagctttcttgtcaaagaacctcgggtctattcctaacagtttttacgattcagtcccaggttcatttactttgacaccagggtttaatattcacttttttccttgtgataatgacaatcttatatgatcttggtcctttatgcagatcctgttttctggcctgtctttgtcattgccacacttgcagccattgttggcagtcaggctgtgataaccactacgttctcaataatcaaacaatgccatgccctagggtgcttcccacgcatcaaagtagtccatacttcgaaacatatatatggacagatctatatcccggagatcaactggatcctcatgatccttactcttgcaatggctataggctttcgagacacaactttgattggaaatgcctacggtaaactttatatcattgcaaactatatttccctctccaggatctgattgtttgatggtggttctctcattactcacaggaatcgcatgcatggtagtaatgttcatcacaacgtttttcatggctcttgtcatagtcgtggtttggcaaaagagttgttttctggcggctttgtttcttggaactctatggataattgaaggtgtctacctctcagcagcgctaatgaaagttaccgagggaggttgggtgccttttgtgctcacgttcatatttatgatcgccatgtatgtgtggcactatggcacccgtaggaaatacagctttgatcttcataacaaagtttcattgaagtggttgctgggattaggacctagtctaggtattgtccgcattcctggaataggactcgtttactcagaacttgcaactggagttcctgcaattttctctcactttgtgaccaacctgcctgcattccataaagtcgtggtgtttgtttgtgtgaaatcagttccagtgcctcatgtttcccctgaggaacgcttcctcattggtcgagtttgcccgaagccttatcgtatgtacaggtgcatagtgaggtacgggtacaaggacattcaacgggaagacggtgactttgagaatcagcttgtacagagcatagcggagttcatccagatggaagcaagcgacctccaatcatcggcttctgagtctcaatctaatgatgggagaatggccgttctaagcagccagaagagtctctctaactcaatcctgacggtttcagaggtagaggagattgattatgctgaccccacgatacaaagcagtaaatccatgactctgcagagtttgcgttcagtgtacgaggatgagtatccgcaagggcaagtgaggaggaggcatgtgaggttccagttaacggcgtcaagtggtgggatggggtcctcagtgagggaagagctaatggatctgatacgggcgaaagaggcgggtgttgcatatataatgggccactcgtatgtgaaatcgaggaaatcctcgtcttggttgaagaagatggcgatagacatcggttattctttcttgaggaagaactgcagagggccagccgtagcactcaacattcctcacatcagcctcattgaagttggcatgatttactatgtttaagcccctaatatgagtagcattcataattcatggggggaataatgggaacaatctattcaagtttcaagtgtccccaaggcaaaaattgtatacttaaatattcttctggttgggaatgtagtctgcgaaacattatatcttaatcctgaaatgtgtgcttggaagtgtaaaatgtaaaccactcttaataagctaaagacttcactctctctctctctctctcttcattatcccctacacttctctttctaaaacctctggggttcttgttaaagatgacgtctttgctcccaaatcccgacccgattactatacccctggtcctcaagcttagctcctttcctccgccacggaggctcttctctctcaggctccggcgcttcaccagaaagtcatcatctgttcttccgttggtcgctgtttcgtctctctccgctactgccgccaaacctaccagatggagagagaagccggaattggcggaaagcgactcaatttccctcctcaacgagaggattcggcgtgacctcggcaagagagagactgctaggccggccatggactctgaggaggccgagaagtacattcacatggtcaaggaacaacaagagaggggtctgcagaagctcaaaggaattaggcaaggtacaaaggctgctggtgacggtgtttcagctacaaggttga

SEQ ID NO: 30213 - DNA, 1918 bp, Arabidopsis thaliana landsberg
ctctgatggatgctttgagagagaaaggagctaggatgaaaccaatgctatgtgcctgcgcatctcaacaacctgggaagatactcgtggttggggtttgtgggaaaccgaggctcggggcagtcagagggaatgcttttggcaatgctttcagaaaggcagctcaagaaagtagagctgattactttcacgagctattcgagtcttcttggattgtcttggatgcttctgcagttaactctttcatgattagattaaccgagaagctctgacatagtctcattgttcttcgattcagtgtgttttcttttatagtttccagttttcatctcactgtttgcattttttacgagcctgtgtaataggcacaatctgttatcaatcatgtaacttgtttaatcaaataaccatagagttttatgtgaaaaggtcctttactcatttggtgttaactctttacctcttcaggtctttaactctgtttatataaaacatctgatgaacaatctgtgtttgaacggatagattaaaaatacacgcaggcacaagacaagaccaaagaccatatgggtttggctaaatccccaaaatttgtacagaaacatgaacaaacataatgaaattcaacaaagattaatactccaacaatccagttccctctagcctaacccaaacttgaaagagaaaaaaaatgagacctgctcagaatcgtgaagcgaaatcttcattgagatgatggaaacttgagaacaaaatggctaaagacattgtctatttcttaacttgaaggcttctttctccacagagttgtcccgcggttgatctcctgaccatctccagacaacctcaggaggtgcaagaactggctatcgttgtggccctgtgtgccagacgtggcagagccattggttccaccaatttcagaggtggtggtggtgagtgaatccaccacatcgtcttgttgacattctcttctataatccagagttatgacctgaagctcgtgcgtgtctacaatttcttgtggtatgctctgccattaccaggaaacaagatcatatgattactaaagttcacatataagcacattgagctttactcataaacctagtgacttacctcgagaacccatccaatataggtgacattattgacatgctggttcatgtcgagatcagctcgtctaggctgcaaaaacatgttcacaaagcctttaagatattttgaagcctaaaattggagaaagagatctaatattgctattgtttgtaccttaagcccaatcattgaatactgagccggatcttcgagtttcgggattttcttcaagcttctgttattctcttccggaaatgctaacctataagatacatagaaaaaaacatacttagcattcgttgaccagcaagctttgccctgataccaaagtgtcctttacctcggttcttgaggacagaagaccaagtactcgtcccgaacatcatcagaaactttctgaagccgtctagtgtcttggttcatcatcacccacttgctgaaaccataacaaaattgccacacaataaatcagaacaggcccatatatccaagttaccgcaacacaaaacatgtaactaactcatatatccatgtccctaaccaatgcagaaagtccaaaactttgctagttttctcctaccttgtagcacggccagtgacttcaccagtgacagaatccttaagaatccaatcacgccttgtcccaatccttccttcactctgacaccaagtctctatctcaaccacatcacccctgtagtagtaaccaaacaaacaagctaaaagtattcaaaactccctactcacactattgtcaaaacacaaacaaatacataaacaagcaaaagcaaaaattaccaagcagggtacttatagatct

SEQ ID NO: 30214 - DNA, 1421 bp, Arabidopsis thaliana landsberg
tgcgtgagaagaaaaacaaatcttttttttcttttgtctctaaaaatgaaacaagagaaaattaatcttacaatttccgtaacgtttgctttttccttcaacatctttggaatcaattcaaacgcgatagagagtctctaatggtcgatgtgatggatacagatgaagaagccacaggagatgcagagaaccgtgatgaagaagttaccgcagaagaaccgatccacgatgaggttgtggatgcggtggagattcatgaggaagaagtgaaagaagatgatgatgattgtgaaggattggtgagcgatatcgtatcgattgtcgagtttttggatcagattaacggttatcgaagaacacaacagaaagaatgttttaacctcgttagacgattgaagattcttgttccatttttggatgagattcgaggttttgaatcaccaagttgcaagcattttttaaatcgtttgaggaaagtgtttcttgctgccaagaaattattagaaacttgcagcaatggcagcaaaatctatatggtaaaactcattttggtgacaattttttgattgattgtctcctacgtaacctttaattgtgttatggttattttgattacaggcattggatggcgaaacaatgatgacgagatttcattcgatttacgaaaagttgaatcgtgttcttgttaaagctccttttgatgaattaatgatatctggtgatgcgaaagacgaggtaaattatgtgttccctttccgggtgcgatgtaggggtctcggcccaaaacttttcggatatttaacctaaaagttttttttttctttctttatctacactgtgtagtttctgaaatgagccattttatttttgtggtagattgattcattgtgtaaacaactgaaaaaggcaaaaagaagaacagatacacaagacatagagctagcagtagacatgatggtggtcttctcaaaaaccgatcctcgaaacgcagatagcgcgataatagagaggctagcgaaaaagcttgagctacaaacattacatgatttacatacattccctgtggtcgtgcgacactcaataccagacacaggaactgattcagggcatggactgcattttcttaggagtggcagcccaaatgagatagctgaagttatacaagagatgatgcatgcttcaattatctgaaaattcagattttatagcagttatttaactccaccaacgagacaatagttcttcaagaagataaacataatataaatgaagaatttcttgtaatcgtccatcaaagattaccttcactcgatttcctttcttgtgcaaagagttccgacgccaaaatgtcatatagagtgtaagttggttaaataatgccccctggaggaaaatgccctgagaaatgaaacagtcagatg

SEQ ID NO: 30215 - DNA, 3400 bp, Arabidopsis thaliana landsberg
cgtgttcttgtaagtcccttatgcttcttgtaagaaagctaaccgatttcttttgttaaagatagggccaaatcctcttgagagagcttattttttaacctttgcgatgcctgaaaggtcacttgtggatgtgcagctggagttgctgccgcttttagagccccagttggtggagtgttatttgcattagaggaggtcacatcatggtaggttcaccgttcctttcctcatgtccagtggctgaaattactctgctctgagaaataaccattttgaggaactttttttactctcgtctattatttccttagcaactggtgtcacttgacagcaatgtagttatctttaggatgtcctagctagcgtgagtttgggatgctatgctgtctgtccatttaattgaatttgcatgtgctgttgaaggtggagaagtcaacttatgtggcgtgtctttttcacttccgctattgtggctgttgttgtgcgtactgccatgggatggtgcaagagtggtatttgtggacattttggtggaggtggtttcattatatgggatgtatcagagtaaggttctagtttcagtacttacttatatcaagcaaggttaatagtgctagaattgacctggaacttttctttctctcatttagtggtcaagatgactactacttcaaagagctactgccaatggctgtaataggagttatcggagggctacttggtatgattttttcttttcctacacttttggttccatttatcttcatctgactgtttcatttctcatggcattttcctccaggggcattatttaaccaacttacactctatatgacatcttggcgtcggaactctttgcacaagaaaggaaatcgagtgaaggtaatctttgatggacgattacaagaaattcttcatttatattatgtttatcttcttgaagaactattgtctcgttggtggagttaaataactgctataaaatctgaattttcagataattgaagcatgcatcatctcttgtataacttcagctatctcatttgggctgccactcctaagaaaatgcagtccatgccctgaatcagttcctgactctggtattgagtgtccacgacctccaggaatgtatggaaattatgtaaatgtaagacactgttatagagaatctgaatctttgagatctgttgcatattctttaccaagccgatctattatgatgaaattgtagccaatttaacgtacatagactttgaaggtttatacctagaaaactttcagactttcctaaaactgtcttttaacattgccgcattcttgttgctttgtgtgccaatcatcgcagttcttctgcaagacggatagcgaatacaatgatctcgctacaattttcttcaatactcaggtattcttcttctagaataatttcaaaataattattttcattttctacttcgctttgttttcaagcctgactgtttcaattgaattgttctgtttttttattttgacgacaggatgatgctataaggaatttgttcagcgcaaaaacaatgcgagagttcagtgctcagagtctactaacttttctggtatgaaattcttctattttgtttgttcatagtattggtatttagttcttcgtaggtttgagtttgattgaatgatgtccatgctagcaatagaataaggaccatactgatatgacttttacattgttctatctataggaatatcttttgacttgcttattcctttaataattaatataatcgccatttttctttgctttaaatgatgtataggctatgttttacgcattatctgtagtgacctttggcactgctgttcccgccggcccccttgttcctggaataatgataggatcaacttatgggcgccttgtaggcatgtttgtggtcaggttttataaaaagctcaacattgaggagggaacgtgagtctctttgtgtattgctttgttgatcataccattcttcttttttttcaaagtttttggttgaacttttggcctttgatacaaaaagtctttgaactttagttatgctttgctgggagctgcttcatttctcggaggctcgatgcggatgactgtatctttatgtgttatcatggttgaaatcacaaataacctgaaacttctgcctcttataatgttggtacttctcatctcaaaggtacgagttacctaccaatatcatattatcttgattcttggagaaatacgcttgttttaatttgttctgttcttaggccgtcggtgatgctttcaatgagggattatatgaagtacaagcacgcctgaagggcattccgttacttgaatcgagacctaagtatcacatgcgtcaaatgatagcaaaggaagcgtgtcaaagtcagaaggttgatatcatttctccctcattaaaccactagatggagcttgtgacacgtgcttcttatattatgctatattataacttgttttctttgactttgaaggtaatctctttacctcgagttatcagggtcgcagatgttgcttcaattttgggcagcaataaacataatggatttcctgtaagcattgctttctttgacacaggtttgactcgtgattacttagtcctctgtgctgatgttttcatattttgacattctaccaggtaatcgaccacacgagaagtggtgaaacacttgtcatcgggttagtccttcggaggtacgtgattgtacattgcaaaaagaattattttaaacgaaatatagcattctgaattttgttcaccgtgcagtcacttgcttgttctccttcaatcaaaagtcgatttccaacatagtcctttgccttgtgatccaagtgccaggaatatcaggtaaactaatgttccacattcttctttttttcactctcttttgaaagagtcatattttctgatagataaattgattctgcattctccaggcacagttttagcgagtttgctaaacctgtttcatcgaaagggttatgcatagaagatatacatttaacttcagatgatttagagatgtacatagatcttgctccatttttgaatccgtctccatacgttgttcccgaagacatgtccttgacaaaggtgagtaaaagctccaattatgttttatctgagacaccaaatatccatcatcatttgttgagaatttgatttgtttcgattaggtatacaatcttttccggcaacttgggttgcgacatctattcgtcgttccccgtccttcccgtgtgataggcttgatcaccagaaaggatttactgattgaggtaagtagagatacacacatcgatctgttgacaaaatccgacatattagtaacagtgatgttgcttttccatttatacaggaaaacggcg

SEQ ID NO: 30216 - DNA, 1306 bp, Arabidopsis thaliana landsberg
  unsure (1)..(1306): unsure at all n locations
gtcatatctatatattttacactggtaaataatgtattcataaaagcataaacaaatcactacatttccgtcattagctgtcttttgtctttatcttacccaacaacacttaaaatactaaacacgagttccccgtatacattattagtattgttttttcgtaaaataacacaatgagacagctcactaaaggcattatcacgatctcctaactaaatttgtgctgactatcgcaaaagaaaaatatatatatatataaatatggttatacattaccaagtaattctgaatttgaatctgtttggaagagattgcaattttcttaagaaagactggcatgagtaaggaagattataggcctaactttattagaaaaaatacattactacattctcactagtctttatttttttattttttagatgtagttaaaaatatattttaattcactattttttgtaagtttactttacatctatctccaaagcagttctcttggactagattgagtaccgcttcgtctccttctatactccggaaactagtgagccaggctgctgtgtaccacttgtggaagcagagaaataatcttcttcacaaccaagtttatatcacgccagatgcagttnnnnnnnnnnnnnnnnnnnnnnnnnnnnnnnnnnnnnnngccaggcagaatcggaaacagttcaggtctctgatgactctttggattcgctaactagttgattgacactcaacaaactctttgtaaccattgttttttattctttcttggcttggttgcaatccttaggttaaactcttttgtaaacctcaaactttcattttaatgatattcacattcctatcaaaaaaaaaaaaaatgatagtcaaatctttaaagtcaaatttactaggtaatataacttgtatgaaaatataggtttacaagtcaaaaccaattggcaagggataatttgatgattgggttgatgtttgcttgtgatggagagagtttcgtttgatgattcatgaaacgagaattcatgttttgaaacagagaagagattcaaacagaggagaagaagaagacttggcaaatcgtagtgactagagagagcaaattgagagagaagagaattgtgaatagctttagggttacgtaatgaggatatatcaaacaatgaagttttccttttttttctttgtcattgtttgacaatgaagctcattgaagttcattgtttccgttcccgtttgtttccttgtaacgccctcaaagtaaccaaatacaatgagctcatgagagagcattgtaaacaat

SEQ ID NO: 30217 - DNA, 3314 bp, Arabidopsis thaliana landsberg
ctcctcaagataatcaattttcgcaaattgcatgtcagtgtcactatctttacagagcacgcttttacagtctaaaatctggcacataaaatatcctaatttgttgttcaaaaaaaaaatatatatcgtaatttattatttattttcacatggcgagcatttgtttttttaactcaatgagtttgaatagatgaagtaaacatgaggtcaatttaacgaaagttaagtcacctaacgctttgaaatccagcctaccagcctcaatttatatttacaccactttgaataactcatttctgattagagttttttttgtttgtttgttggaaagctgactagttgaaacgttagactctaaataagcttgttaatcaaactggtttcaactatcttctttaaaccactttgattttatagctactaaatttatttacggattatctttaattactttcctcatataattagtttcttaagccaactataaaagaatcaaaaattagaagactaaaaaaaaaaaaattagagtaattaacaacgtgggttattgttaccaaaattaagaaaaatacaagaagtagaaacaaacattaaaatggtccaaaatctgtttaagtagagataatggtgtagaccttaaccagctcaatcccattgttgttatctctttaattactacaatacattttggatagtaatatttcgttatgctaattgcttgtattcgatcgacacctattattacccgatctttatctgaaatggacggttatagactaaaagttgttgagatatttttaattaaaaaaaaaaagttacgttgcagaattatttcataaacaatgaaatacagacattaaaaaagaaaaacgattagagttggtgatcgttattaattaaatatcttgattaatcagtgattagtaccaatccatagaatcttactggttaatagaaagtggaaaaccagttggagaaaagataaagtgaaaaaagtaatgacgcggcgagataatgaagaaaaacgtttgtggtcagcacaaaaaacgtgttcttatcatttcgacacgtgcgtctctctctctgcctttttagtggcttaataagtactacttttcttctggataaaggtattattaggtttataaagctttaacgtcttgtttcattttttgtttttaacttgtataggagcctgccgcccttaatcacatagtcgcatgcattaatacttactacatagtttaataactatttctaagtcaaaatttattctttgcaaaaaacatttaaaaaaaaattataaactctttcccaaattttggataatttgttgactttttttgttgttaaaataaattgttgactttattgtcaatgattattgtcaatgtgaccatactcttcttttcttggtggattgaccataatctttttttgataagagtaccaaaattagtaaaaagtttacagaaattataattccgaattgttgagatatatctacgtttttgaatgttgtaatataattagtcataaaactttttactatgattctctttaaattcagttctttttaagtttaatgacaaaatgtgagattttttttgttttcattttcgatgaaccccatatgttttaaaatgaaaaactgctatcctagtaaaagacacgattgtattaaacgttttgaagtaaattttcatacataatccaataacaacagaaattcttcgtctatggatttttgaaagtagatttatagatgatatgttttctttaaaatcctatataaaaataatcgaagtactacaggatagattagtttgttttgtatgattaaccggtagagttaaatatgtgttttaattggttatgggacaaagtcagaagactaatatggcacgtgacgtgaatagagtctttggaagcgagaatacgtggtgggtcagcgtagagaagggtcaacacagatttatacttttttttgttgtgaattaatccagaagccagctcatcaacatcaacgcttcaacttcaacttctacatccttgaaatatctgagtcctatatcattgagaaacagtcaaaccttctctttcactatgtacctttgacaagttaagctcattttctccttccaccatttatatcccaagaaagatcattttgtctcatattaggtgaattgctcatattgtcttttcttttttaacttggatttaacgggtttataacaaattaataatgatttttttatataggaaaaaaacgttgttgtattatttatttctcttaaaagggactattacattttagcaagatcgaatttccaaggttttaaacttcaaaatgaaaaatattaagcaaagaattagaaacaaaaatcgattcaacgttatgtggaaccataatgcaagattttggtaaaccgtggaatgtctcaccatgtgtacttttttaaaaaaatcccaaaatcaacaattgtgaagagatcttcatgagcttgattcgacgtactagagtatataaaaaggcaaaagataaatttgagacgatggatctagtcatcaagtagaaagacaaattgatctctctattcatgactgtgaaggccattgatgatcaaatagcatgtgaaatcataattttgcacgtgatttatcctaagccaatcagtaagttacctagctacttattccattaaacgtgtttaaatttatatgtaaactgtgttaaaaaggaacaattgataagcgcaatcataataatactaattaaattaacaaaacagtaaaaagaagttcttgaaaatcgtcatgtatgatgaaatgattaatactaaataatgtttaaagaaatgtcatgtcatttaaacccccccaaaaaaaaaacaaagacgtcacattcaaatgtcaaaaaatattcgaggaaataacgcacgtgtttccaaaaacacagatcagaatacgtcccgtgtgaaaagagtgtgtgccagttaggcacgccacgtagatacttgacaaaaacacggagccatataaatagagcttctttctcactttcagtttcccaaacacaaacaaaactcatattttcaatctccaggtgctttacaccaacagagtcgcaagaaaacaaaaaccaaactcggatttagtttgacagaagaaggaatcgagagtcgggtatgcattatcctaacaacagaaccgaattcgtcggagctccagcctcaacccggtatcaaaaggagcacgtgtcaccggagcaagagctttcagttattgtctctgctttgcaacacgtgatc

SEQ ID NO: 30218 - DNA, 3515 bp, Arabidopsis thaliana landsberg
cctttaattacttaggagcgatatttttttaccttatctcaatttgtatttgttttcttctgatgttgcctacttttctgtttagcattatacgtcaacaactgacaaacactgaagatatacggcgcgtgcgaaagaaggcaccttgcaccgttcctgaaatcgtaatgcttcaaaggcaggctttggaggatggactctttaaggagccaatatttactggtaagttcatgacactaaaatgtagaccgttctatacacgttctgttgattgttcttataatctgcagttatatagctaatatgtttcactgattttcaggtatgtcagtggaattagtatctctgcacactgagccgtatgatctaagaggaatcatgataattgagaatgatgaccgtcatgcttctgttggagcggtggaagataatgaatgttctgttacggccgtggaagaaaataaaacggaagaaagctctgatccgcaagctcacccaaatgattgtgacgagcaacctggtacggctcatactcactcgcaggaggaacaaaccataaaccaacaggaagagctgaaagatgataatgagcttgctgaaaaatctgacttggaggttttgaaggaaggcaatggagctgctgatgaagtaaatcttgtagtgattgacgatgtcagtcaaataccgtctgaggaaaaactcgaccgtgtagaggatttacaggttgaagaatcccatgaaaaccatgatggagaaggcgggcaggatgtttgtgcggatcctaatgaaaaaagttgcactgacgttattgaaattgctgaaggcgatatagatatcaaccccattttcaatgagatggacttgaaagttgaagatgaacttccacatgaagatgagaaaacggatgcatcagctgaagttagcgagcttgggagagacgatcagactccatgcgataacacagttgggtctactgaaactggatgcctagaagctggtgatttgagtaacatggctttggaaaattgcaatgaacctctggtggaagcgaatagtgatgggttgaatccaaagacagagtcttataccaaatacgacccgcataatgagatgtctaatgaggaggcgtctatgcaaaatgcattagatggagagcatacttctcgtgatggtcttatgggagacaatgatgtaagtttctttgttgcgtcatatccttattcaagtaagacatgtccctgactctcttgttatcttatggtgtaggaaatggataccatggaaaatgcacatgacacaggttctaagccttttcgaatttcaattcttttcttttccaaatggtctgtatcctcttcatttgatcaatgggactgatactctggtcatcatatcctggtttaaaactggactcaacaagcttaaacttggagcataatttggatacgagatgctgctagtgctattcccgatgatttctcaatggttcttcttattaatttcttgcattcgtgtcttcaggatttttgaacgtcgatgatgatgaagtagatgaagatcatgaggaggatgacatacaatatgatgatgaaactcgtcttctagagaacagtggatggtcttctcgtactaggtctgtacagtttatgacttgctcagattttagcttctatcatgtgagagacgtaagttatgggcttgaattatgaaagcttctgattctctttacttttagggctgtggcaaggtatctccagacgttatttgataaagaagccgagaatgggaagaatgttcttgtggcagacaaacttttagctgggaaaacccgtaaagaagcatcgagaatgtttttcgaaaccctggtatgtccataacacaaccgtaaactaaaaaaaaaactctgatcttgaatctgtcttattgttttgccaattttgcaggttcttaaaacaagagattacatccaagtcgaacaagggaagccctatgaaagcatcatcataaaaccgcgaccaaagctcaccaaatccatcttctagatggagaagatcagtcatatagttgcagataggtagtttggtccaatccgagaatatcatccgaaatgattctacttctccaaagttaatacactttccctttttaaggcaatgtagtagtaatagtagtatcaatggtgttgtaggctatccaagtagctggagattggtgtttgtcattatttacctttatatataatgagttgttgttgtatgtgtatatattggtgtaaccatgagcaccaagtttaaatttgagagatgctaattttattttctttggataaccaaagttgtcaggtttgtgtgatattgaaacctgagaatactgaggaaacattttattcaataaatagtacttttcatataagataaagtctatacgttcttgtgaagtgaaatggttttcctcaaatcgttttctagtaaaatgatccttttccccattattattattaatgattttagagttaaaactacacgaattcaagaatataagtttcaaatgtacgttgaaacaaggaaatggcaattttttagccatttagtatatgtatatttttttctttgtagccatttattatattagattgtacaatgacgtgttttttcgtgttaaacacccgattttgtttaaattttacgagaattaatgataatactcacatttaacccattatcaaatgcaagttctgcatttccaatttctcaagttatttttttttctcttttataaatcagataatctaataaaataaacgaaagaaattaactcagctattaaaatataaagtataaaacttaaaaataggccagaatatctttttattccacaaaagattcaaattttttaagaatgaaaaattaatctttttctgtttttcctattagaagcatttcttgacaacaacttactacaatcaaaatttgaaacttcagacgtaaagcatacagaaaccatcaaaatgaattcacagaggacaatgactgacacatcataatagaacaattctcatgtttaacaatggagacacacccaatcattagagagaactataaaagctcactcagactgaagaacagtaaggtaataaggataaccttggcatgtccctgatgatgttgcactttcatgctcagagagctcccagttaagttcatatgaagacagatcgtagatacctggagagaaaactgatatctgcagcggtatttcggttgtggataatggctggatttggatctttgtggaacttaaacctgaccatatgaaaggaggtgagctttccatggaagatggcggttttcccagacggcttcccatcacatctgaagttagtttcatttcctctgtgatggttggcacgtagcgccacccggattggtttccagaggaagaagtaggtgctgctgcgtctggtagacaatcattcgtgttgatggtcacagatgatattccatcagatgtgtttc

SEQ ID NO: 30219 - DNA, 3763 bp, Arabidopsis thaliana landsberg
  unsure (1)..(3763): unsure at all n locations
cgttctccgtgctctcgcaggagctccctagatttgtcgttacatcatgaactaagagccttacgattttcgtgcgggaggatctagggatctcgagacattcttgaagatcagcatcacaagctattaaaacccattcgttatcatcgtcaagatacttgatatcgaacgttcctgcatcaactttcagcctcttagccacttcatccttcaattccattatacctgaacccgaggatattctgaaccgtattatgtcgtctttgtaacttgctttgattgttaccgttctcatttctgagcctgatggttcgcatgcaacatttgcaatggcctcttcctttgggggagcgtataagttgttgttgctattattatcattgttcatccagtttgtgtcttgaaacttatcgtcaaatgctgcagtggggcagagatttctcagatcttttgaacttccagcgtcttcaatgagcattcctcggaaatggtctatagaaccaagaagcctgttcggcattgcgaaggaagctgcagatacatcatgatctctagaataaggtggaaaaaggagcccgggtgatccaccaaccgtgaagagcggatcttgatttgggactttcggttcatctaattggttaccgtcacatgagccatgagaggttggagtcccagcgctctcatccaccgttcgtgatcgcttgtgaccattgcttggtggtaactcaggcgaaccatttggctcgttcggactgtgatcacttgaccaatggttaggtgaattattggtgtttggtagctcaggtggtttggaaccattgggtgagtttagtggctgtgctgatgtttgaccgtgtgtccaagggatggaactaacggccatggaagtcaggtcgaggcctccatcagtaccttgaacagattcgatgactcgtttcagctttgtgattgaacgattcactttcttgatcttcctcgatggccaccgcgagattccgtgttgcctgcaaattcgcttcattgtcgtcgggcaaactgtgacaagaacaatatagagttcagatgaaatatctctagccagtaactaaccaaaacatgaaaagtaaatggatagacctcctaggctctttgcagcgtctttgagacttccagtgaaatactgctgaagtacatctagactgattgttttctcagtcttcccacgctttttctctgttttcttcttctccttaaccacaccgttaacagtggccacgttgattttctcatttactggatcagaagactgaaccacaggctgaggaatcaacatcgtctctgttgcatttgacttaaaaccagaaaagggaactcgaatggattctatttttgaatgaaccttcttgtccggtaatgcttggatgatctcgaaagacaatttgtcgtcatcttcaccaaagtcaaccccagatgcaaccctcagactctgaaaatgttctttcattgtcaccaaaatagaacccaacagcaaatcttgctcttggtcgtctgttatactcgaaggaagaaaaaattcaagaatgtaactgtcgtcgcccgtgtaagagctctggagagatattgcaaaacaagtggtcaacttgaacatgagcgcataatggactagtgggtactgcgttttgcagaacttggtgnnnnnnnnnnnnnnnnnnnnnnnnnnnnnnagaaaagctcgtccagcgactccctggcctttctggagatggtgttcaagacaggcatctctaaagccccagacatgagcatccacgacatagcaggccatgtcggttgtagacatgcagatttgacccatgcagctaccgtcaaagctggtgcagtttttctttagaccgccaccattggcaagaacgctcccatgctgacatggaacccaagtctgagcgagaggcaagttatgggtctcacatacaactgtcagcacttcgagaatctcagcaagcgcgttttggcgactctcattgcatatctgtggatatcaagttaactgaaaacagtgagaaaccagtgcttaaatggttcttggtaatccacaaaatgatacatgtagctaacctgtgttgtttggtgatcaagtatttccgagcttttcagatttaccgcctaaaaaaataaccaaatcttgttatcattaataaggtattagaattatatccctctgtacgaaaaaatacttcaaagctcaagcaaatcacaaaaacacagaactatttggatacaagaaaatgaaagatattaaaaaaagctataactaagatagaagctaacaagatactgatatcaatttgttgttattatcaaagaataaaccatgctttgaatagaaagagcttcaaaatagcaggccaaatgatgagcagaaaccttttattaacggttattcctcaatataaccggcaaggcaaaacttgcaactcaaaaatctaatccattcacaccaagttctaggaacaattcagagaaaggataaacagagtaaagggtggagtatgtgtagtagtgagaaaagagagccagacctcaagggctttgcaaactttgtccacttcgggtgcatagtgaatcttctctgaggtcattataagttccacaacacctatgcaggactgaccagagggattaaagacaggcaaggccagtgtaccacgcacgttgtagtgcaaggcgtgatcaagccgcgagaattctttgctggaatagtactgaacatttggagtccattcaggcaatttctgacggaaaactcgacccgggagtccgagctctacgtcactttcactatccacagaaaacatatatgtgagagagatcatcctgtattgattaagcccattaccattaggattaagaacaaaaggttgacccaaagtcgtcagcaaatcacgaccattctttctcacaggagcccagacctgagccaaaacgtgttgttcggttgattctttgaagtatcgaagcgcctgagtcatcctctctttgatcacacagtagttgtctgtgttctctggtgggactaggctcatcaatggagacggaaactggaaactgttatgcttctctgttgtgttctcagctgctgatggagaagagtctgcaattaccaaaaaattcacaccttcaagatactatagtaccaaacttgacttgcttcccactccttttatagaacttaactatttttggcaactttatgattttaccagaaatatcgatgtgaactaacaataaagtctcaatcaccataccataaataaacacgagaaatttcaaacactttaggttcagaattcgcagaaaattaaggaaagagacctaaataacgtaattgacataacctcctaagaagggacaaacaaagtcaaacgcagaatcaatcaatcaatcaatcaaccaaaaatctatgttcaatccttaagcagctacctaaatccaagcttaaaccattccattagcataacgaaattcaaaaatccaatatacgatcaatatgtatcgcaattccgataaaactaaaaaaaaaaaggcttaaaaggtcggcgagactaacaagggaggaagagaggatactcggcgagacggaaagaaggaacaccggagacagagctgatcttctcatcatcgccaccggaggttgcgtggtgaaaaccatttcctccaccgtcggagaaagcccagagaggcgagcaaggctgctcagaggaagaggagacaaaaatcggagaaa

SEQ ID NO: 30220 - DNA, 3172 bp, Arabidopsis thaliana landsberg
attgttgcgaattgcggtgactcaagagcagttctttgtatgaatggtaaagcagtacctctttctacatatcataaggtcaggctttatctctttctaactctttcttgattcgttcgatttagtggattttaactcttgtttacgtttgaaaatgaacagcctgttcgtccggatgagctggatcgaatccaagaagcaggaggacgagtgatatactgggacggtgcaagagtcttaggcgttttagccatgtcacgagccataggagacaattatttaaaaccgtacgtcacttcggagccggaagtgacggttacggatcggactgaagaagatgagtttctgattctagcgacggacggactatgggacgtagtgacgaacgaggcagcgtgtacgatggtgcgcatgtgtctcaacagaaaaagtggtcgtggaagacggcgaggagaaacacagactccggggaggaggagtgaagaagaagggaaagaagaagaggagaaggtggtggggtcaagaaagaacgggaagagaggagagatcacggacaaagcatgtacggaggcgtcagtattgctgacgaagctggcgttggcaaaacacagtagtgacaacgtaagcgtcgtcgttattgatctcagaagaagaagaaagagacacgttgcttgacactaatctcctcatcactcttactccaccgttttttgtgttgtttaaaatgattcttttaccttgggacgaaggtagctcaaatctttgaacccaaaagagagaaaaaaaaagcattaggtctaaaaaaaaaccccggtttactgaaagcggttaaaccgggtatggttgggtcttttttgttctgaacctttttttcttgccttttttcggtgtgtaatgaacaaacagaaaaggaagccggaatgtgtcactgtctaggtggaatcagttcagaattcaattaataaaaaagtatgtattatgttttcttggcttttaaagcaaaccaattaactcggatacgcgtggtgatctttgagaacatcaccgggaattttcagtttgttgataaagattttaaaatctctataaacgagtgggcctttttggtgttggaagaaattcaaaatctcacggaaacgaaaagagagagaagataattgggaagaggacggagtacgtgtcgaagaggtaaaagtagaaaccctacaccacgtaaagaggatgtgacacaccggaacgatgcatatgttaatatgcgcattcgtacgtgtcggtgtcggtgtcgggtaattgattgagatctgaatatgaacctaatcagactgttttatctaaacatgatcactggtctgatggaaaatcaaaattaacttacctgtcatgtaatgtaagaattttattaagaaggaaaatcgaaccaacactcccaaagcatttgggccgagaattttggggtattatattttcatctgaatcctataaggctataacctacccaaaaatttggtagcgcaacatctaaacttgatacagaaaaatgagacaaggatatattaagcttcaaatagatgacccatacaaaatgttttaattgcccaacctaaacacatactgagttgaagtaccatatgttttttcaaataggccacacgagcagcaattctagtcagacataataaactaagacacatgagcgttgcagcaacctgaaagcaaaatgttaaagaaaaggagaggttgcagaataagacctctctaagacaaatgtactctgcaatccaaagtggcaatttcacgtttgtttcatgtcaccgttttctttaagggtcttcagtcttctgtaccccttgtcagtaccaaagatcctgaagaacaccagagacgaattatacactggatattaatatcaggacaactagagatctgttctggaaagcgaagagatattaaacaagttcagaggttcaccagtccatatacacaaaagttgaagagtagtttccggactttgtgtatagcagtcggtgatggtagtcatggaagtcagcactgtaaccaaatcacaaaaataataatagtaaaatctattaatacaaatgtcttatggttttaagtttcaaaagagctggctagatgtgtgatcttaccctccatacagaggaagaaaatttgagaggctccatgggaaatgataaccacaatgtgcctcaactgtctccagcactctcaacaccatccataaccagagagtaattaggtgagggccagtaagagctggaccgactatggtagcaaaacccagaaatagaatctcagcggggtgagcatattctgatgtcaaaccaaatggtgtggcatatctgtgatatcatgaaatggttgcttttcagaaactcacagtttcaagtatcaagactgaaaaaaaaaatggtgaacattgaaacttactcatgatgcacactatgcacgttcttgtacagccattttgaatgcaagatccgatgaccccaatagaagacaaaatcctcaatgataaagtagaataatatctgggcagacacttctttcctgcaggaccatcaccaaagagggtcttatatacctgatcaaacatgagctcaggttctttcatgatgctcaacactgacatcttttgattatgtttttctttctttttattgccaaatggacgagtttaagatcaataccaggacggcagaggaaaactgcttcgcattcccatggctcggaagacagggtaggaggccaacatcaggggcaagtttacggagaaatgataaagcaacaggcgagtaatacattttccttgggctgcaggtgtgttattttttgtctgcatagggccaaaagaaaagtatgtgttgaccataaagggtaagagaagcatagaaaagggtcatattcacaattattagtaatcgctgaaatggacatcagcctgtcataagaaaacacttttcacgtgagactgaattcttggggatcaacctctagactatcatattcaaaccatcacacaaagctatgattgcatacatagaagacacttgtaaaagataaataataagaagagaataggcctgaattttgtacttgctgagaaagccttgcctttcaagaaaaatgaaagggagtccagataaggaaaacc

SEQ ID NO: 30221 - DNA, 2639 bp, Arabidopsis thaliana landsberg
  unsure (1)..(2639): unsure at all n locations
ttatctcttaatgctgggaactctttgagtatctgaaggaaacgtagaagtcagtctcagagagtctctagagcaaacagagcaaggaagcatagaggaaattactttttcaaaagatatatagacatgaacaagagttatagaagtgcattttcacaagagtagagatgatattcagaagagtagcacaaatgaaagaatcacggaaaattcaaaagaagattgtttctagatataccagtgaggcgtattgtaattgttttctcattagcagagcttcaaatattaaattgggatgctcatgaagcgaagagcatctctgttgccaaggaagtggtaatgcagctaacactttcagacctaaagcccaagaattaagccgggcgacttccaaatccgacagattgctatctcttcgcttgagaaagaaatggacctacagaaagatgaaacaaacattttcaaaaacccgacagaaaaatatgaccttgtaacacaatgaaaaaaaaggaaaataaagttgttaccaggagctgtttcgaccgaaggtcaggtaataattgcattgcacccataaccactggtagagcatcagccgagtcttgaagtgaagataaaaaccgagatgcttccgccggaccaccaccattgagtggatcagtggttagaagctttacaagctgccgtccttgtaattctcttctaagatctattgataatcctgcactttcagccacttctagcgcagcggaaacagctcctttcccagccaatcttagagccaagccttcagggtcttctttacattcggcttctacctgtttcccatttagatttttgagagtgacacatcgagcataccaagagccaaacatgatctcaaacaaaaggaagaaagataacctcttgccagctattatggcgatcatctgccgaaagtatgtggctgtacttctgcagagcttgtctcctatgcaacacctagatgcacaaagaagaatgagaagttaggtctcgattgactgattacaggatgactgtaaaccaaagttacatgcaggaatctagaactgaaagcaaaactcccttatacctcaagactaattggatcgctttctaagagatgacaactacacattgtaagaacatttaaagctgcctcaagctcccacgtatgcatatacctgaaccaagacataacagagcttcaaaaccaatccactacagaacaaaactgcatgtagccgtttgaaataagacaaaaaaaaaaaaaaaactgttttctcagtttactaacataagcgtaaatcccactatattgtgnnnnnnnnnnnnnnnnnnnnnnnnnnnnacagttttttttttcatggttgttacttgttatagaaattataagtttacatacttaagagccagtgttgctgccagctgtttgtcctttagccgcaggcaatactgccaactgttgctctggcctccatatccctgagatcgtcctgatgttgaaggattttcttctctacttttgattaggagctgaagtaaccaatcagaagccccattccgcaagaagcggtccgaaagtgctaaagcatccattagttttccttcatcaattagtctagcaaaattccaacaaacgaacacttaaattaatctcaagacaacaaaatccaatctggaagacttttcacaagctaacaaacaaatagaagatgcagacatatgagataaactgccatacctatttacagctttctcatacggtacttcattctcccaatcaaaagaaaggaaaacggtaggatcagttctacaaactccattttcaaaggatccaccatcacgagcactgccgtctgtcaatgctggttgaatgttatttttagaaaatgtttcttctgtatctgactctgagtcactatcatgttcaagaagtctcttgatcccagttctttcatcaggcttaatccgtgtgtcatcaggtttttgcttcggtgtcacaacaaattccgaaactcgatgcagattagtctgcatctgtatccatcggtttaaagtgggatacctatgaagaaaaagtaaaatatcactgaataagatggaaaagaggaaccgagttgatttcaaattgaaaggaggaaagaactctttggcttgacagtacctctcagactgatcaagagaaaattcataaaacaatctgtctgcatcaggagaacttggaaactcatcgttcaaggagctagatatgatagaatcactgccattgtacaatatgctcccaccaaagacgcaagctaaaactgctcgtactggtgaaatttttaccaaatgcctgataacatccaactgaagaggatacagagggacaccaggtgttgctgaggaacggacataacagttgggtttagcctctattgaaggagagagcactttaccctctgagtgggaacatggagtggttggaatgacgggaatacaagcccacccatgaccagaacgtgggggataaactgggggaacacatgctcctatcacttcatgagcaaaatcagcagacataacctcagcaacttttgcagctgcatctgtgctacttcgatcaaaaaccagacgcgtcaatagctgcaacatcg

SEQ ID NO: 30222 - DNA, 2429 bp, Arabidopsis thaliana landsberg
agtaatcttcgaattcattgccgtttgtagctgtcacatcctgcagacaatatggaagacattgctcaacacgagtttattcaatatcctcaatattcataattcctacacagaaaaactcagaagaaagcagccataccgctgtctgataacgagtatcaggaggtggtagccttaacgtagccttccagtcttgaccactgagagtaaccgagaatccatgagcacactaaagagatataacttaacctcaaaataacacatacatctctaacagcacaaatcattactcaatgcaaacaaaatcattcataataactactccagcatcataatttgcaacaagacgtattcaggaacaagaacttacttagcatcgctgctagcttcaggctgggtcgtctgctgaaccacctcattagcgttactagcgtttccaggaagctgagggcgtcttgaccactgttgctgctgctgttgttgttgatgttgttgctggagttgcatctgctgagggttctgagaataaccgcgttgaacatactgctgatcttgaggtggttgttgctgccgatacgactgatgataatctggattcggaggcgcaccacgacccgttccaacacccggtggatatcttcctctgttagtattcatcacaaatctctctcgatctcgaaaactagacacagacaaaccctaaatctaccgaaataccttttacaaaactacaaagaatagaacgaaagagtctgcgataatctggagaaacagaatgcttgtgtaaaacctagggtttaaagaaactgatcgtggaactcagggcaagatcgggaatgttcaaataaaaaccacaaaaccggtccgccacagaagaacggagaagaaagcgaatcgagagttccgattggaattacaacaatctaaagaagaagaagaagaacgaaagagagattaagaaaaaatttcgtttgagtgggttgggttacaggaaactagagaaagtgacgaatacactcgccggcgtcttttgttagggcgtcaatggattttctcctctttctttttttcagactctcactatttatcaaaatggccttttatgtttacgttaaataaatacatgacccataagctttatattatttacagtataactcggatttacttttctttcaggtattcaccccatgttgtattgtttttgtcattttagacccccagattctttgcccgttgattaatgatatctaacaaaacaaattatgcttatgattattaaaagctatgcttaaagctatgcttaaaaggcaatcttgtaatgttagattaggtgttacttattttgtataaagatccttataattgtgtatatgaattaataacatcttaaaatcggaagctaactatatataaactttgcacctaatcccttggtttacacgatataatttagaaagcaaaacaaaaataagtgttaaataaaataaaatatagccagaaatagatttagaatgtagaagaacattttaagggctctcctcatttgaatctcaaccatcagaagaaaattttacccctaaaaatctcaatccatgattttgatataataaaaaggcagagagctcatagatgatggcaaaacaaaccttgattcgtgtctaaacgaacaacaaaaagaagaagaaaactttgatccatcttccaacactttcgtaatttgaaagaagaagaagaagagataccaatggcggcgtttacagggacaacagacaaatgcaaggcgtgtgacaagacggtatacgttatggacttgatgactttggaaggaatgccttatcacaagtcatgcttcaggtgcagccattgcaatggcactctcgcggtatctttctatcttccttttcctccattgttccctcatgaaaaaaaaaacacaaagagaacacatctttcttctccttttcagatatgtaactactcatccatggatggagttttgtattgcaagacccattttgaacagctcttcaaagaatctggaaatttcagcaagaatttccaaacaggttgctaacaaatcctctgtttccttagctctgtttttttattaacctctcttgaaaagctaacaatctttgctactttctcttcttggtcttttacagctggaaagaccgagaaatcgaatgatgcggtaagcacataattcatcaacattcctctgttttctctttttgttttctaatctgatttcttggtgtgatcatttgcatagacgaaggctccaaacaggttatcatccttctttagcggcacacaagacaaatgtgcagcttgtaagaaaacagtttatcctctagagaagatgacaatggaaggagaatcttaccacaagacatgcttcagatgtgcacatagtggttgtc

SEQ ID NO: 30223 - DNA, 656 bp, Arabidopsis thaliana landsberg
cccaagaacccaacacttttcccctttgcttggatcgaagctcctatttccaacacactccatatgagaacactcaaagacatacctctaattcactcaagagaataaacaagaacaaacttaaaatttgcaatacgagaaaagagatgacttatctaacagagggagcaatcaacaagcaagaacattttcttatgttataacatgcacacgaagtcaaccacggtaccaatgacgaaacctagccttaacgcagaagctgaatcatgtattaaaataatgaaggctttttgactttcaacaagccaaaccaggaatcaaaagcgacagtatctgtgtatgaagagaaatgtcgacatattgacacaaatacacgaatttcacaagacttttgagaaaatcctgaagaatactctcagcattttccaggttggtgtctttaaaggctgcgttaggttggcttacctcagtgcaatcctgaatttttatacagttatgccactagccgccaaaacgacctgaccccactgctaattaagtaagattaatcacaagaattttaagagttcattaaaaatcactataggcaatccaaggtaacttcttccaggtggaaaacaagtcttacacgatagtcttgactagaaatgtaagac

SEQ ID NO: 30224 - DNA, 3430 bp, Arabidopsis thaliana landsberg
  unsure (1)..(3430): unsure at all n locations
tatctctatttaacctcgtagtagatattatctatgaccaaaaagaaagtaaataactaaaatgaggaaatgaaaaccacgagctcccaaatttcctgcggcttctttagcctcttgtttcgtttatgtaccactttctcgactccacactttataaaccaaatcctccacgaaactccaaacacattgtccaaagatcaatacacactgttttaagaagaatttgaaaagaaaaagaaaaaaagaagatgaatgccggaaagcaagcttcgtgggcggtggcgacggcgatcgcagccgtggaagtgctaaaagaccaaggcgttgctcggtggaactaccctctccgcttactccacaaagaagcaatggctcgcgtccgtaccattacagtcccatctcgtccctctcctcctacgtcttcatcttcggctacttccatcagatccaaacctttgtccaccccaccctttgagacatcctttgagaaagctatgggtcttagctgctttggtcccaccaccgttagattctagatctctatgtactgtgttgtatgtacgcaaatcagaatgtgcatgcgtctatgacttgtttttgtttacccatcacatcattagctaggtccactaaatgttgtacttgttggagtcattattctaacattttgttttcaatattgaaataaatctggttttatatagacataactaaaacaaaccggagtgtttaagccggtttatatttataccacaaagaatcttaatccgctaaatttacatcaccgaaggatggacccttgtgagtcacacaattggtgtgcaaattagaagaaaaacatcaattcattttttattacatggaaacaattttagaattttttttgctatgatacaatgttaccaacccatcattatttgatttatgataataaatttcattatgtaaattttacacatgacctagtgtataaaatagacatactagctggaccataatcagacgaacttaatatcggttaatacactaccggttcattaagcatttagacaaaaaaaaaagaagaagaagtccatatacatgcatatatacgaaagtctcatcagaagatcagacatacaagtacaacgactagtcagtggacgcagtttgttgtgtggtgggacaaggtgagaatatgcccacagatatcgctattgctctctttaaccattttggtccaaaacactttgccaacttttttaataaagactgatacaaattttcgattgatacaacttaacattaaaaccacccaaataaaacttcttaataaagatatgcatcattgtaccacaaccacacaccaagccaataagtcaacaactactcctaacccttttaaacctaatcaatacaatttaatattagaccgactacgtgatggtgcatatgcttctttttaccaaaacatatatattcaagcaacaattaatacatatttcgattctcaatttaatcaactgaagaaatttcggttactttgtgtaaaatatttttttgtaaagcttctaacttttagttttgtaccaacatttaaaaatcaattattttggtgaaattaagatgatagataccgtcaacctacttttgttgaccaaacttgattctaaagaaagaaagcaaaagagagagctaaaaaagaagacaactctcatcttcttttctctttctttttcctctttctccagagcttgttgttgattgatgatcttgaagcaaggatcatgagattccttcacagatttctgttggaggatannnnnnnnnnnnnnnnnnnnnnntctctctgtaaaaataattgcatccaagagttgaaaactctaggatactgttcatcctattgccttgacgagtgtccttccatctgcgagatcgtcgtaatttcaggtctttcaccacctgcagagatccaccacgacgacaacttaaagaggatcttgatcatctctgcttcatctatcatcacaactctgtttctccttactttacttgttctctgcttcaagttttactataggaggagaagatcaataacagcatcaagaagatggagtatggaagaagctaggaattgggattttgatggaccagcacctgttattgttgatcatccgatttggcatatcagaaccatagggttgaatccaacggttataagttccatcaaagtttgtcagtatagtaaaaaagatggtgttgtggaaggaactgattgctccgtttgtttaagcgaattcgaagaagaagagacgcttagattgttaccaaagtgtaaacatgcttttcatctttattgtattgatacttggcttagatcacacaccaattgtccgctttgtcgtgctcctatcgttgaggccaacacaatgattgatgatcatagtgaggggctagaggagataagtgtgatgattccagaagaaaatggagatgataccgatgaagaaatcgaggaagaaagagatggctttgttagtaatattagtagagatcatggtgagtcacaacaacagcgagtgagacgatcagtgtcgttggattcgttatcgggtttaagggtaagtgaagttgttgtgggtagagaaaaggagaagttcaagagaggcaataatattggatctgggaggtcaagtttattgaagagatctatctcttacagtggaaagtagtactagctagcttcagtgctaataataaaaacaagaagtccataaagtaagtaagtttcttgaagaagaaaatcaaatcaaacccaacaagatatagattgtattcatatgtatgaaggtgatataagattacgattatcaaagctagtcactcttgtaaagttaaaagagagttttgacaacttctactactctgcttagatactctggatttgtggattaagtataaatatacaccaaacttcgttttgtatgttacttatttattgttcctcaagaaataccatctggattttaattatttttagattcaactgtcttatgtgaatggatttacatttggcgttgtggatctctaacactaactatatgaaacgctgcgtttcattaaaagaaggtaaaaacgacaaagagaatcttcgtcttcatcgatcattgttgtgtaaaactcttgttcctcttcctcttcaacgtgaacacttctatttctcagagaacattcacctatatgtctttcttcaaggagaagtcttcctctttccagatttaggttagattcatgttataactttttctaagatttctgatttccgaatttgaattttgtttatgatttagtgtcggtgtagaactgaatgatactaatgcaaatgattgagatcgatttgatgtaaaattatcaccttttcgtgtaatttaaaggtcgaatcgtccggggt

SEQ ID NO: 30225 - DNA, 4679 bp, Arabidopsis thaliana landsberg
actgaaacacgtgaagtgtttgaagagattagtaagtattggaaagagagaataacggttccgattattatctctctgtcaaagggtattgaaactgctcttgaaccagttccacatatcataactccaacaaagatgattcatcaagcaagtaagctttttcttcttccttttgctccttttatattgagtctattgacacaatcttgcttagttttcttgaattggttcttactttggtgtttgtggtagctggtgtgccgattgacaatgtcctgtatcttggtggaccaaacattgctgctgaaatttacaacaaggaatatgccaatgctagaatctgtggagctgctaaatggaggaagccactagctaagttcttaagacaacctcatttcattgtttgggacaatagtgatcttgtgacacatgaagtaatgggaggtctcaagaatgtctacgccattggagctggtaagtttctgtatgtagacacggatttgagtgataattatcaagttttcacactttgatccttcttgttgtgttcaggtatggtagcggcgctcactaacgagagcgctacaagcaagtcggtgtattttgctcattgtacatctgagatgatatttataactcatttactagcagaagagcctgagaaacttgcagggcctttgctagctgacacttatgtgaccttattaaaaggacgtaatgcatggtacggtcaaatgctggcaaagggtgaaataaatagagacatgggtgatagcataagcggcaagggaatgattcaggtacttaatctgttagaacaaagccttgaaagaagtttgaaatgttttggtatctgttttgcttatgaggatgtgggatttttgttgaatagggtgtttctgcagtgggagcattttaccaattgcttagtcaatcaagcttaagtatattgccctctgaagagaagaaacctgtagctccggtcgaatcatgtcctattttaaagacactttacaagatactcatcacaaggtagataatatgaagtctgaaaagtttatacttctccaaaaaatattgaactttgctcagtcagatttggtgtgacatgatgggaagttagatatctagttttcaagaatgtcttgggactttgtgagacatcaaatcacttgaaacttgcttcttctattatctaataaaattgttgttgttctattttgcagagaacaatcaactcaggccattctgcaagcattaagggatgagacattgaacgatcccagagaccgtattgagattgcacagagccatgcattctacaggccttcccttcttggtcagccttgattagtcagtcatggcttttataagagattcaacataaattacttctgcaagctgcagatgcttcattcaaaacattatagctttaatgggaaggggtagtttcacatctgtcataacttaaaatggattcttgttaagtctctgagtcaatgcaatctttgtactgtatcattttctttatgatcaatgagagctttatttgctccaacaattttagtaaaagaaagaaaacacagattttagttactaagcaaatatcaacttcattatctcaataagcattctactttagactaatttgaaacgctgcactctaaagccaagcaacctccgtatgattactcaagctagtggttgtaccatagagacaaagaaacaaaagagaaggactgttgtgtaaggcctaatgttaactataccactgagatcggttatgactccattctctgctttgtacaatcggctaactgggggtttagttgattggttatccgttgaagcagatcttctttcttgagcttatagtaatgttgtactttcagatccttcgctatgcttcttaattccttgcctgtcttcttcttcaactcacttatggataatgatatcaatgagccacttacattttttccacctctctggatttttccgtccatggaagaatccaacaacgaatctgcatgctgtgtgggaacactcgaacccctgatgatctttggtgtcgactgggttgagtttttaactggatcaatattaatctcaccagctccaccttgtactttctgcttgatgtttctgataaaacttgtgttcgcgcctttattgtcactgctattagactgtctctgtctcttctttataaggactgacccaggattcttgctctctgccttttttcttgcctcggtaagcaagcttatgatcagctcgtctttaactacagtcttcaccacagcttcaggatgtgattttttgcttctctcaccacatgggatatctctgcctttgtccggttcatcacacatttctaagagagactctgtggtaaaaggttccgaaacagttacaatgtcttgcaagctatcgttttgctggtgatccttcaatatatctccatcttcgtctgtagtatttgccttctcccgggtctctaaatgcaatggtctcagtgtggaacctccaatactctcacggcttatagcagatgaagatttgttctcgagggcttgctttataggatcaaagacttggtcagtaaccaaggatgaacaagaatgttcttcaacttcgtcaatcttgctttccaacacaggggctagaagaggtatctgcatcttctgcaacctatcataaaaaaaacacaaagttccatgatacaagattcccatggatgcatgacaaaggattaagaaaactcgacagacctcaactgttagtggatcattagctgctgtctcatgaggcatcaatcttgtttcaggctctatatcttcagtgtcgtcgttactagaatctctgatctgaacagtttgagcagtctgagcatcgctgatactagaagtgttttcgtcgtcatcaagagccagtttagcagaactagtatcagaatctggaagagtagtactgagagtcttatcctgtagaagacataacaagttactcctagtcaaaatctgtagtgaatacaaaatcaaaatcaaatatttcttaaagtctcttacagaatcagaagagtctatctcatgcaagtcaccaccactcccagaggaagccgtatcattttgagccgatactgaaactgaaaccctctcaagctcagcaatttcagtaacttgcctcttcttctctgtcaatatcctccaaactagctcacaatacttttcgttctggaaattttcttcgagcacatctaaaaaaagcaacaaacgattgttctcaaaagagaatcataacaacaattaaaccaaaatccagtgtatacctgttctgaaatcgaaccaaaattcacaacgacgtacggtctgtttacgaaaggtatcgtcttgcacaactacaaaaactaaaagaacacaaactttgcatcatcaagaccaaaaaaaaaaaaaacagtagataccataattgatccaaccagatttacctcgtggcggaccccagagatcatcatcatcatccatggtggtcactcactacgataagcctcaaaattcattctgtaaaaaaaaatcagccttttcacccacatttccaaaatctccaaagcaattctcactaagaagcacaatcacaagaacacccaaagttctaaccataccgttgtgagcttcgtcgatggatcttccagaaattaagcgtttttctagggtttgaagaaggtcggcgagagaatttagtgagagagagaaaaaaaaaggctggcagtgaaagcgacgaacaaaacactctgcagtatttagagtagagtgtagagagagagaaagaggtcggttcaaacggtgaacgggtttgctacaaatggataaaccaacggaggcgcgtggataccaaactaagccgttttattaactcatggggaccactcttcgtccaactgaaaatctcaaccgtcagattcattgacttttatttgactcgtactgtataaatgcgaatatatgttcctgtgttttcgagttactgtacactctccagattctgcctttttcatcggacggctaggagtaaatgacgagtcagatggcacaatcgtaataaagtggaaaaccgaagggtcccgctattcttttgcttattgaacttaacatctgagagtgacgtccgtacagttattgcttttccaaagatttcatacgcgtgaccaacttctttaacttcaataaataaatgaaagtgtcgaaaagtttcaagtaaattatgcatgaatattttacttttataaaagcattttaaggaaagttggtgttcttttttgtttttgttaaagtttcatgtattggagaagcaaagttggtgttctttccatctttttccgatgttttatttacgtgtatatacagaaacgaaagcttcatgtacattgatgtgagatagaggaaaattcttctattttattatgctatatgatttgatttaacatgtcatccagagaataatatgtcattcgattttcgcaattgcgttttattatgtttatcctttacgtaggcgttctgattcatcattagagactcacctcccacaaggataaatgctggcattatacatgtctaaagtctaattagatgctactatagcttttatcaaaaacaatatagattgatatttatacg

SEQ ID NO: 30226 - DNA, 3144 bp, Arabidopsis thaliana landsberg
actcgtgttcgtgagaatcacagaaacgttcctcgtttatcaccacaaggtacggacaggatgggagacctttttgacctgggtattcgctattcaagtcttgtctttaaggaagttgattggtcgttttccggctttttttggccgaaagtgtccattccttgtctttattttgcagccaaaggtaagtccttttgttcaagcattttgtacagttctgaagtaaataaatgtttactgaacttttgctcgatcttctctgaatgaagttgagatcacgtatcttactctagctgtaacctttcattcagtctcgtggtcaggcagttaacattattattcattttatgaagcttatggtagtgacagagctcggagtcgttctacacattcgaaatctccagggagacctcgttatagtggatgggataagccgtatgataggcaaaagcctgaggtgagtggttataggtctgaaagatgggatcgagagagaatgggtggctccagcgatattcaggtgagtcatcagtttgaacgccctcctttcccacaaacgttagaagaactagaattggaatatacgagggatgcattggagcttgaaaagaaacgcgataaggaagaagatgaggagaacaacaagcatcgtgaggtaagagatccagtgactgaatgtgtttttcttagattcaaaaccgagtataggctggattgaattctatcacctcagaaatcgcaattcctaggagttccaactatgaaggtttcatgtttttttacattttagttgctcatagtattggatggcagtggatctctccatatgtaatatagtccccaatctcctagtgaaatgcaattcctgttgaggaatttcagcttctgacatcaatttgtgcgagtttatagacaatccgggaactgagagagagttacatgaagaaactgcctggactaaggggtatgaatgctaaacaatgggatgacttccttcaactcgatgctcagagacgtcatcagcaagcacggcagcaaaactctggtctgagttatggtaacgtatagacagtttcctccttatgctgagtttgatgatggctactcttcaaatcctcctccctatggtggaaacaatgtgccaatggattccaagggaagatatccaaatcatggagataactattcttcaaggcatcaagacaacaattatggtgggttccaacgccagagacgtgaagaatatggaaaagcctacaatcgttattagatgactgtagtcagaacttgtttggtaagttgtttctcatctatgaagatgaaagttagtaatgtgctgttcttggagtttatggttttgattgagtagcagatcgaagtgtacattgtggatttttgaagagttcatctttgtctctccctactttgtggcctaaaaaagttgtttgaaaatttcagggtctgcgactctgctgaatatgtgttacgacgaacgagcaaaccaagggttgtaggtaatctgaattcttattaggttgtacacaatgtggcttggagacaatgagcaaactaagggttgtttccttgctgttacgtcactctcatatgtagtaatgttgaataccactatcctttggcttttgtttttaaatatctaaagatttcttgtttaagagtagtgataaaaccattatgattgtactcgtagtttagcctttaaagatattgttttctttgagatatgtttcatttgtgcatatgaatctcttttgcttctgtcaaaatggattctgtctggccatggtttgcaagagttctctgctttccaggagctaacgtctcaaaacttgatcggaagaactttgtttaatactaatttcaaagtttccccaaatctcgttctgacgtgcattagttatgttttgactcttcgttttcctctccaaaagttgcgacttccgcgcttcccaataaagatgcagagcttggttggaacttgaaagaactttgtggtgacattaataatgcagagcttggttggaacttgaaagaactttgtggtgacattaaaagggtcgtattgtctcttcgttttcttctccaaaggtgcgacttttgctattccctttacgcctatataatggcggacgcatctcccaagttttaaacatatatcccattctctccttacctttgagagatgtcgacatccactgtagaaactggatatggtggtcgcatcagagtgacagtggctagaaatgacagagacattaccagtgaagtgagaacatttctgtgtaataaagaaaacgcgaacaaaatcatcggtctggatacagaacgatcggttgtaggaggcgatagcgaatacccaccggagagcaagctcgtgattctcgagctcagtgatggccagaattgcctaataatcccgcttccttatgtacaaggtaataagctgcccgtttctctcaccaatttcctcaatcttccagatttcacctttacaggtgttggtataaacaaggctttgaaaatgctcaagagcgagtgtggtttgacctgcaagaatgccgttgatatcggaccttcgtcgtgggcctctctcagctagattcgtggcgagatcaaacttcatttcagtcattgggtctcgttttggaaaccaacaagccctatctatgaagattgggacaatgacagtcttaccgaggatcagatcaatcttgcagcagcgaatgcttacttggctttcaaagttgggaatttgattagagaagctatgtattgagtcatgcctctgtttgtttttttgtttgtttcggtctctcctatgttttgtcttgttttgctcgtcaattgcctgcagttcaatggacgattttgtcaccatcttaaatcattttggccccaaggtctaatatttggtaaggtatgcccgtatgggattgttacttgttagaaacttcatcactttgcaacacgcgacattcgtaaatcgcaacccccattactttacccggctaccaaagggttgaatcttctcaccaaaataatttagtccataaaaggtacatatattcggcttgtcatctcgttaattattgggctgggcctgaaatttaaatcctattacaaatc

SEQ ID NO: 30227 - DNA, 500 bp, Arabidopsis thaliana landsberg
aactggtcccgacagagaatgtgttctacatgtggacacgaagcttgtgcctttaaacgtgaagaagtgttcatcatatctgtgattagaagaagactaaacgaaatatgacaaagagacaaataaaacctgcgaagaaggaaacgtaaagtagattcaaagcagagagacagagagcgaatagcgaatagtgaaggaagattgtggcaagtttagggttttttgctttctttaattcattacatagaaattgtcaattacgtacaacggttagatattagtaaaatggaaatcggatctaattcagatttcctctataatcccacgggttagattaataaatataatcccaacggttagaaccaagaaccttgtttgcttattatcatcaataaactctcacgcattctcttcttcttcttcttcttcttcctcttcttcttcttcatacttgagaaatcaaaattctctattcacctacttctttcttatttttcttc

SEQ ID NO: 30228 - DNA, 1310 bp, Arabidopsis thaliana landsberg
gccacaagcactctagggcagggaaaagtcaaggaaaagtcaggagcaaagtataacgaatagaagaaaaatactttaactggaagttctaagcattcaggaccaagggtcgggaagtcaggagaaaatgttctcttaaataaggcagatgaatcaaacacatctgccatgtctgacagtgagagtgaaaatgatcctgaaatgctagaacttgatgtaagtatgctgttttgtctcatattaggaagaatgaaagaacacatctattttgttggctgaacttttgcctcttttttttttttattaatgtttactttcatctcctagtgacaaaaatctcaagttaaaatgttctctatgttgttgagcaggtaaaagtatgtgatacttgtggagatgcgggtcgtgaggatttacttgctatctgtagtagatgcagtgatggtgcagaacacacgtaagcctgcttctgttcatgggaaagaaaagatcaagtactttttgaagagtgatcaccattgtctctactaagtatatagttgtgttttcttttgactcagctattgtatgcgagtaatgcttaaaaaagttcctaagggttattggctttgtgaagagtgcaagtttgctgagaaagcagaaaagcataaactaggtaaagatacatgttgttagtgcaaaacattaggaacttgtttttttaatttttgtctaacaaaattgagttgaagcgtgcagaaaccaagcgaaaaagagagagtgaagtaaacgttaatacacagatctccagcaaaaggcacatagataaattcgaggcagttcctgattctaaaagattggcagttggggctcaaataggatcacccaagagatctgttctcccaagaatgtccactttatcccgagaaacatcatttaagggcttagagaagccaacgagaaagctagctcattactcatctttcaatagccactccagtgatgacacagaaagcacacgatctactgactcacagctccagtcccctaaaggtaggacatatgatacaatttctctccaatgcagttcttccttgtttaatttgccgtacttctggtgattttgaaggttgtataatattaccttgttttttatttgtataggttcgtttttgaagtccaattcgtttaattcttcgagctctagatcaaaagtgagaccagtggatgatgatatgctttcacgacagaagactgggaacgaaaattcttcctttgaagctaaggaaggattttcaaaaaaagtaagcaaatcaatgtcaagtagatga

SEQ ID NO: 30229 - DNA, 2139 bp, Arabidopsis thaliana landsberg
tctgctatttttggaccctttctgaattatggaaagcgaactgtcctttttaggctgtttattgttcccactcacccagccaccaaatccagtaaatacctttttattttgaaagattagtccacaagctaaattacgaattgtcgacaatagaaaatgatgatacaaagcttgtatatgatatggtttaaagaatcttagctatagagcttgtatatgatatggtttaaagaatcttagctataatcttgagagaatgatgtacgttaagttttacgcacggctaaaaaatgaagtgggcagctcaattctcgtgagtgattgacgtataggagagacctacctgaggaaagaggagatcaaaggtttgataagtttgcggattacgctccttctcatttttttctatgtgatcccttttggtgtaactccgcataattagtaatttagtatagtaatatgaacgtgatctaggaacttcaacaccataaacatatctttcgcgttatgtttacgttaacatgacaaccatagatctttgttaattcaaagcattaaacaaactaaacacaaacttttcatatgaattcattcattgaagggtttgcgacatggtatcatttcatggtactctaggaacttggaagtttctcgtattgtactaacttgatagattcccaaacggaataacacaccaatccattccctattgataagaaaacgacctcaaaacgctttctcatcgccgttgcatcgttggagagttgctcgaacccggctcccttcgagttcgagccattgctactaagagatgaagagaaattgcgggttcgctctaccttattttatgtttcatagaaatacaacttttgttttgaaaattgaaatacaagcttattaagaagatttattcattttttatatggaagcaagatgaaaattctatttttggctttgtgccaaaatattctaaattctagcatcaatatcttgcaaaataataatatggaaaaagacatgagcgattatattttgtactatctctctcccaaaaatataataaaagaaattaatttttgtttcatcaatatgttccaaaaacttaaatggttaatggcattgatcgtaaataattatgttactgcaatgtgtttttgatagtaaataatcgacttttataagattgattctaacttctaagcactcgaaatcaaaaatgactttccgattactgtttaggagaaacttctgtttttccatgtttgttggttgacatgattacacccggatttcgaatactgaaactccaactttgaagtctctctagcacactcttggtattcttgatggtgatatcacgaatgaaccaagaaaatggcggtagattaaaaggaggatatggctgaaaatattggtccattgtcactttcgatgcaatctttccttgtccgccactacatttcttgtattcatctacactcttcggcttcttgttcttgcataagcgtactgaatctacgtatacaggctccactttatagctaccctcgaatactttcatgaacatcattttctcttttttatatttcgcctgtccacaataagcaagagaaacccaagttaagtttcaccaatacaagacaaaacgttcattagttttaggggtgtagagaagcttcttacttcaaggtcttttttgttttcgttgacaattaaattaatggggagagatccagagaaccaaaggaagtcccatgccacagctttcttcaccttcacggtctgcctaggtccatctttcttcaaaatctttcttgatttgtttgcctttataagaaacaaatcacactctcaagtattgctataattaataccacatttgaatcatacaatgataggaagaaaaccagaagttgtcgccctgacttgtctataacaaagaatggtaagttggttggattgatgaaaagttcgtatgctccatcaggaggcactcctaatgtcaattctatgttcatatggcaaagaccctttttcattgtcaccttcaaacgcaaaaatagaaattttttatagacctttcatctctactcttattcttaaatctaaaagtattgagattttgttagctgatttgct

SEQ ID NO: 30230 - DNA, 1757 bp, Arabidopsis thaliana landsberg
  unsure (1)..(1757): unsure at all n locations
ataccctctagtctaaatgtagcttaaacacaaaacactatttcgaacctttccaagttttgcaagttcatcagagatactatccagtggaacactaccatccgtccatttccgttcatgataagtgataccaagtccttcaaaggctgagacttcttctaataaactactctctgatgaacacgacttcgctttctcttcacacactgaagaagaagaaccactctttctcctatttgcatcactgagacgcctcgtcatagcagcctacaacaattgtacattatcaatttcaatccatcacacataacaactcaaatttcattcaccagaacactaatttgttcatcaaactaaacaaactttctatatctcactgagtaacaaagtttttagtacctgagtacgcaaaattgcttggtgatcaggcttattcttagcactaccatcacctgctaatggttcctcccaatttttccgattaccattcttagcagacgaaccgactaaagcttcagaaacttttgagattccggctgcaatcaccgccatcttcttcttccctgaagaatctccaaccattggagtcatctttaaacnnnnnnnnnnnnnnnnnnnnnnnnnnntcgacattcttcttccactaggagaaggattcatcttccttccattaggtgatggctgtctataccttgacggcacaacaatcgatggctctcgagctactttcctattctcctcacgcgccgccgctaagcttggcacaacgcattttgacggcaccggagacgcagatgctcctccctttaccagaaaccacaggtgacggatctctctccaccnnnnnnnnnnnnnnnnnngaacagttcttcttccctgatgagactgatcgtttagaagatgctggtgacgagaatctctgtggagtcgttttcggtttctgatttcgaatttggttacgattctcttcgttttggttcaccggagcaagcgcttgtctcacattaggtttcacatcactgtcaccgtcgtcgtcaattcttctattgttcaagtaaacagcgattggatctaacgagtactcagaatcagaaactggctgaataacgaaatctcgtttagatccgttagatactcttgcaatcaacggctctggttttccgacgaaggcatgacgaccagcgacgggacgaattcctgcggcacgtgggactggagtagcgaattccaagcgttcgaggtatatgaattgacctaactggagacggttactgaggattagatctgtgtcgcgttcggagagagagacgtaagtggaattgagagaatctgagatttggacgtagaagccttggttaggccatagatcggagccggcgagagctgggacgattccggtgacttgtaagattgcagatctgtgatctccggtggggcgagtgccggagttcatgcattgaaggagttttaagagaattccgggagcaagagaagccatttttgtttgagctttgtgagtttgagaaacacagagaagaagaagaagaatataggagaagtttattgaagaagctttggccgttacaagattcaaaatttgaaatcaaactttattttggtttttaactttttatccagaattagtacctacggtaacggtttaatatcggagttttttttaacataagtaaacaataataaagaaaaaaatattaatatttaagtaaacattttctaaaataatatgactggaaaaa

SEQ ID NO: 30231 - DNA, 1306 bp, Arabidopsis thaliana landsberg
aacatgactcgtaatataagtcattatgatctcctaccaatcctaggatctaatctatggtaatgcagatccaagaattgtcataaaattcaaacatgaattcatacaaaaaagaatcatatcattacattgcttcagtatgagagatcaaagactctatttaaaaacgcaacccaaatcaaaccaaatcaagaataatagcaaatccatatctcatcaaaaacaaaatgaaatcaagaaatttgggagaagaagattacaagagttttggattcattagccttctgaagctgctcgttccatgtctcaacggtgtggcaggcgatcacttgtccttcttccgaagccatcttctctctttttcttctctgttctgtttcttctcctcttgtgttttttttttcaattacttagcatgcgcgtcacctaccaatcccaattttgcccgtcaatagtttttctcttctcctttattcgacgcgtgattttgtttcccataattacacccaccaattgctactttccttctttacccaaatcataaatattcacacttttactcctcaaagttttacttgtaacaaattaaccacacacaaagcaaagttgtaaatatccatcgtaaaaagtaaaaaacattttgtagacatcatttgtacattatgattcaaatctacagctgaatcagtttcttgaaacaatacgttccaatgatgaaccacccggtaagcaaaaccactagaatcgagcaggaggcaatgaaagtccaaccaccgagtaagattcctatagtgtagactatgagtggaggcaacaaggactttactatagccgttttgttcacccaacgtcccttgaaaagcactagtgtcgcgagattcaccacgttccatccgcttgactttatagatagacggttcaggttgttggctacaaaggaatgacagttgcatgtgagtatgttatatgagtgatgttggtactcttgcgtgctttttctcagtgcatcatcccatgttggctctttctcatgactatcttcttcttgctcatatctcctctcaccattgaacataccagaactggaagaacgagatgactcctgattcaaatccaaggccaatatgaataaattgttactttgtatcaaggttgaaaatgaaagccggcatcttgcaaacgttaccatttctttgttgatttgaatatatcgagaaacagctccaaatgcaaaattatcaacacagacaaaattaggtcctgcaaagtcgaggatgacaccgtcttctctgcagataccgacgtg

SEQ ID NO: 30232 - DNA, 2573 bp, Arabidopsis thaliana landsberg
taacccgttaattgaatctttaagaaaagatgtttcatcattgttaatcaatgagagagttcaacatctgtctgaatttaggaatcttgtttgcttccacggccatcactaaacccatcagctgataattcttcatctgcgagcaaagccaataaaaaccaaacatgacaagccagaaacaataaaataaaaacaatgtgtataagccggagagataaacttacttcttgggaagtaacgagctgtgagcgcatagggaatgtgaaggaccaagagctaagctgcaaatgcagtttttccaacatatgttcagagattatgtttatctatttcacacgggtagtcgagtcaatatatgtgagaataagttacctcgagaaagagttcatcttcaggcttaagaaatactgtgtcttcaatgtcttcttcaccatgtcgaggttttctctgcttaggattcttcagctatataaccaagaatacatatcatattgttaaaacaaaaaggctagacaatataaaaccttagcataacacaaaaattaccttgtaaatcttggtaactagaagatatgacttaaaacggaatgatcttcgaagcttttctgtaggctatatgaacaaacaaaaaaactttaaaactgttatatttgtattgttcataaaaagttacatataagtttagtttacaagatcgaacctcatcttcgattgcccatgagacttcatcgaacaatccatcataaagtggaggaagaagttgtggaggaagattcatcactctttgagataccaataaaccaacatcttgtgcctttttctctaagagcatttctagattattcgctatattcttttcagaacaaactttacgaagaaactcttttaactctctaaaacacttgttgtcctgaacaaatgccaacacacacattctatgattagaattacttcaacaagcgtaacaaaatcaaacaccaagtttcctgtaagaacaaagcatgtatcgagtgagttttctagtgacttgcctatctcttgccatgttaagagcagtgacaagagcaaatactgactcatcctcatcatcagctactttcacaacagttcctacagttgtttgctccaatatgcaatcaacaaaactgctcaaatcccactccttgtcatcgagatagttttgtaacaggatcttaacaccatgaaagtctgtaggtttaggatcaaagaactcaaagtctgcttggacatcttcctacaaagatcaagcattgaataaaagacgaatttatgatctttttcatctacaaaaccaacagaagaagagtaaattaatcccttacctgagaatcttcttcatcagacgagtccgagacttgttcttctttcccttttcttggtaaattagggatcttttgcttttcatctacaaaatgagaatgatacatcactataattacaatgtttgtgaaaagaaaagtctcaatcaatctaagtggtttactcaccaaaagatatatcttcatcagaacattgacaatcttcaggatgagacaaatcacgcctagccattgaagcaaaggaaagtaaccgcataaacggtgaaaatgttaaaggctgatgctttaacactcttcttcctgatgatggtcttcgaggcatctgtttcattcaattcacagctgattaatattcagactaattcactaaaacctaagatataatcagactagctctatgaattgagttcacggaactgttaacaaagaattggaagcacaccataaacgattaaaggtccttaatttaagttctctaatcaaaaaccagaaaacgaaaccaaacctggaaaagctgattcaacagtacgcaaaagccaaaacaacaaagttcacccttctgagatacgaagatgatcaaacactaacgacccggaagccaaaacctctctgtctctcaaaacccaaaacccaacaagactgttcgcgagacttcaatctatgagcgtgaagaaagcaaactgcgtcgttttgtaactaaacgaagccctaattaaaacgccgtcgtttaatcatcaaaccaaacagacacaacgcgacgtcgttttttatgtcttcatcagcatattgtctcatcttttgtcgaccaattgaatatgagttataatatgtttgtagctgaaatattcatgatttagctacttcactcacatttgtagttttgtgaatatgtaaacctatggttaggtgaatttcaacaaaataacagagttggaggagatgattaactgttgctttatttatagtacaagtacaactagaaccgtatacaaactctgtaatatataattacagcccaaataaatcgaatcaaagaatcatatcttataacctcactattctacttctcacgtatatcgtaaaaacatgtaagaaaaaaataacctcagttgaaacgaatatatatttactccaaaagattttgaaaaaatgatcagattaaaacccgaactaaaagaatatcgcacgaaccaccatgaatcgtcttcctcaatcaatctttcgggtgatcgg

SEQ ID NO: 30233 - DNA, 4477 bp, Arabidopsis thaliana landsberg
cgactctgatgaagacatcttcgagcgttgtgtcggcgagcccccatgcaaagactgtgaagttggctttggccttttcaacagcgcgaaacacctcagcaattcgaacctcttgctttgggagctcaaatttctgagtaccagcaaggtgatatatcttcttggcgttgggagagacagattcaaccaatctctctacctcttcctcatgttttgaagatgttgtcattgtgaagacatatgatccaccgtacctgctcttcagttccttggagtttcctatgcattgcaagcctccgtcgacaaaaattcctaatctgtcgcatagaaattcggcttcttccatggaatgagctgaaaatgttgtcttaacgttaatattaagtataatttaggaggcatactcaatcacattccgtaagtgaggaaactaatatatgtatacttgtgagaattattgctgtgttttgttttgcacgcttgatcacattccataaattctttctcgaggctggatcaagtcctgtgcttggctcatctaaataaaccaccttttacaaatcagacaatggattcgttaataaattcgagccattgcttacaaaatcacataacatataagagaccaggagttgtacctttgggttcccgataagcgaaatggctacactaagccgccttttcatacctccgctgtattttccagcaggtttatcggcaactcctccatcgaaaaggctgacgcttttaagagattcttccacagccttaaaaaatgtatgatatccaattaacattgtcttatggggtaacatacatataaagaaatcagtaagtgataaacttacttgcattagagcagagcccttgatattcttaagcctcccataaaagagaagatgttcccttcccgttagcgtcccccagagcaagctgaaaccaagataatgacagaaaaaaaaaaaaaaaaaccattccatcaattgttccttatttgtatggtaaaggaattgataaaatgttaattactcatgttgcgggcagactcccatgcttgtatatactttgttcatatctttgcatatgtccaaaccttgaaccaacgcagttccagatgttggtttcaggagcccagtcatttagcgcagcagaacaatgtcacaaaactcaaccctgaaacgtaatttagagtaagaatagtggttttgcaaaaactcaccatattgatgaaagaggtttttccggcaccattaggtccaagcatgccaaagcattctcctgaaggcacgtcgagatataaccctcttactgctagctttggcgggttaccatcgctacctggatacaccttcttcaggttgtcacacacgatcgcatgccccgtggtcccttctttcctcaatttctcaactttttcccgctgaatattttcaatttttatcagaacgacttgaagttggagtcacatggaaagaaaataagatttttgtttttcatacctcctgagtgacatctgttttttccatgtcaatgagaacgttttcagagttttgcctttgaacactaggacttggtagggaagatgatttcttgaagaaaacgaaagggcttctccctgatgaagaaagaagatcgatagagtaggccacaatgagaatcacaaaccactccacagacatgaggtagaacagcttatccattccgctttccttgagatctttccacttcatcccgtttccccgggaggcatattgcgcgaactcatacaatccgcggaataaggaaaagccgggatacaactccaaagcaagaatccctttttctgtaacatagatatatactagttacttaagtggtcacacataaacatgtgtattcgttcttcaaggtattgattttgttaacttaccggggaatgtgggagattcaagcagttcaccaaagagaaacattcccaagagcccacttgcaaacaccaatgtataagcaacaactacaattataagccgatttttttttatcatgaagccgttgatatataacatattcgtgagatgattcaagaaatgtgatgttagtacctgttgcagtcttaaactttgagaatatggaagaagctaaaaaggcgaaggagatttgcagatttacgaagataaaatagaaaatgaactggacgctgtagtcattgagccggaagtacctgagtcctatcgctgaaccgaagatcaccaaagaaataacataaaacatagatagagtaagaaaataggcataggaaatcatccaatatggaccaatgcctagcccgtgcattttcattataattcttaggcgctcttgtttctcatacaccaatgatgtcaagatcacctgcaaatattatatacacacaaccacataatgtgatgaatactttgttgagtttagtacttgcaatggcataaagtaagaaattgttaaataacttacggggaatagaagaagaacaacccaagtgaaaaaaagcgggcctagcatggaagcgatatcaagattgaatttagtttggtgtttaggaacttctttgacaaactcgaataatatcctcgtcccggggcctttaagaaacttaagataagcatttgatacctgcaagttttgcacggtgtgaacattaattggatccgttcaataacagaaacatgtaaaagagtactacagcgtgacttagattcataccagattgagcaagcgaggaactcgaaccaaaggtgcccttgaagggtcatcaatgtttgttgagttataccagatcgtcacatcgaagttgtttctatccgtattcaagagatcatatgctaaagacaacaaaaatacatcaacagtaagaaatcacagcttgattcttaagcatatgtatatagaagaaaatgaaacaaacctgcagcaatctcatttgtcatcctctcaggatttcccttccaattacccttgaaaagctcatcattgacctctacagagttatttctccatagagacaacccttgaagacacgtcactgctgagataatattagacacaaccactaagttgatcatcaaagtgaagaaaaccacatttttcactgttcattttatcatctcaagctttgaacataaaaaaaaaaaactacctgtatgaatttttccaaatgagagtggccatgtagagtttggactgcactgagattggatactgtagatgggaaaatccgactcaatcccgggatctgcataattgtttgtgcctagtgctagtgttgaaccctgaagtcactcacatgcacatgacctctagttaaaaatctaaaacagagagataaatgtttgcacttgcttgattgaaagaaatatcaaaacgtaccaagacattataggctaaactagacaagaggtcagaggaattcacagcaaacgaaccaccaaacatattcccagataaagctgtagtagaaacacttaactgataagttacataggaaaaaatagagagtaaatgtatcaaagaagcgcatataccttgaccaagggaatggttattcccagtaagaagtatagtaacaggacaagttccagtttttctacaagacttatcaggaaggtcattgtacgaaaagaaaccaccgctgacagcacgagattcaggttctggaatctgtaacaggggaggcaacagtggagggtttgggatgggacaatcaccaatagaaaaatcatcttgacttccacacttagtcaaatcagcggccttattcaccacaacatcaagcaaaagttgaatccctaggagaaataagcaaaggagtagtggaaccaggacaagcctaatattcgtccatatgtgtctcctctgcacccacccaaaatgtcatataatcgattcaaaaccatgttttcaaacaacgatcgtaacaattttgtcacacatacacatacctggtaggttaagttctttctaagtaacgcatttgcttgcgcccagaaactggcttgactaggatccgccattgatgaagaagaaaaagagctccgttagtctttaaaatttttcttactgacaccactttttagtattcttctccaaaacgcttctcttctaatattttttttttagggtttttaattaatcaaataatagttgatgaaaatccaagaaaaccctcttgattgttgtatacagtgtaacaacaatctgatacattacccctttgtaatgatggattggatacagatagtcttcccaagaagtcaataaatactaattggaaacatttcaaatttaatactatgtagaaacggaaagattaaaaaaaacttaagtgtacttacaaatacagaaaacgcgtttcctttaactgaataaaatcatggaaaaaactaggaaaaaaactttttaagaattaacaactttcaaaccttttttagagtaataaacaaaattactttttgtttttctctag

SEQ ID NO: 30234 - DNA, 3585 bp, Arabidopsis thaliana landsberg
  unsure (1)..(3585): unsure at all n locations
taaggacaaacgacaattactctttttacctgcctgcgaattccattctcggtacgcttattctctctatctagtcccgcctctttcaaagtattttgatgttgctcttcttccatgtgtgatcctttgcaattcgatgactgaactgactcttagatcgatatcattatccttttccgcaatcatccattgactttttttggagttcttattacgtattgtatagtgatgtttaagaatgccaaatttggttttgttggaacaattgaactatccattttttcttatnnnnnnnnnnnnnnnnnnnnnnnnnnnnnnnttggtgagatgtaatttccattttacgtcactcgcagtgaagaacaagtgtgtccttaaactggtgtgatctctttacctttccaatacatttgacaatgaactttcttattcagcttttctaatggactataccacttggacgacaaaattagtagcagtaatggtgtgaggtatgtgttccatatcacaaattgaggacaagatttatttttatagaaaaagtcagtgtgatcgtaggcattcaaagtttaaggttataatttagttcgtttcgtatgtgttagattgttagtctagtttgagattttgtctgttctacattttcaggtctgcctctatagacttgattacaagaatggatgatagttctccaaagcccattgtaagtgaacagctagtactgtttcttttcttttttcactttcatctatccgtgtttctcacatacattgttttcttgtagctgcgatttggcgtgcaaaacttttcatctacaggtattcattgattgttatgtcatcttatggaataatgatcttcataaatgagtcaaccaagcaattccattatagaattactaaacgagttgattatgggactttcatctgatttgagcaacctgtcggcaattgttaaattgttttagccataagacttaccaacacagatgttaagtgggtgataagaataattaatggaaactttcgcttaacttgtagaaaaatagaaatgttaattgatgcaggtgcaaaaacttccatatcactcttttctctgatgtttgtgcttccatcataccttagatacagcgacaggagatgcaatcaattatacaagattcttccattaaattattattttctttgggttgtaggacccatatcacagacggttcttgcaatgccagccttgtctcctactatggtaggaaatttgacttcaatcttgtaaagaattttggcctcctccaagacatttggacttcaatcattgttttatgtttgttgggcttttgcagagtcatggaaatgttgtaaaatggatgaagaaagaaggtgacaaggtgggttatttcttatttttggttgacaaaatttcagtcgacttttatgattttgtctactaatgatcattatacaagaaagacgataaattgataatttagctggcaaagaaaatatagaatgtggaaattctcagtaacaggtatgaatttggttcttcctgacaggtagaggtgggtgatgtactatgtgagatagagacagacaaagccactgtagaatttgagagtcaagaggaagggtaattttgaaaaagacggttcatgattttatgttttgatttgtatttttatttcattataccttggtaattcaaatatctgactccctataagtatatgaaaatgtcaattggcttactatgaagcatggttctgcagatttctggccaagattttagtcactgaaggatcaaaggatatccctgttaatgaaccgattgcaataatggtaagcacagtggctgtcttatacatttatagaaaccaagtatgatctcacaaaaggtgatgcatgcatcaacatacgcttattaggagttcctgtttgtttatctagtctgctcttggcctctttcactttctttcgtttcctgggtttacattctggaagacttgacaaatcatagagatgtatggtatttcgttgtcaatatttattgtggaaaaatgtccaagatccaatctcatgctctcttcttctaaatatttccgtttgccatactgagttgtcatgttatgtccccaaacatgatatatcgtagggtttagggtgtagcgtatattggttacagttttggtcaacatcttgctacataaggttgatggataagagtttaatcttatctatttaattgtaaccaaggttgaggaggaagacgacattaaaaacgttcctgctaccatagagggtggacgagatggtaaagaggaaacatcagctcatcaagtgatgaaacctgacgaaagcacacaacaaaaaagttccattcagcccgatgcatcagatcttcccccacatgtcgtcttagaaatgccagcactttctcctacaatggtatgaaatttcatattttatgctagctttttttggaggagaaggcattcagctttctatcctaagactctgaattatttgtttattgatgtgcagaaccaaggtaatattgccaaatggtggaaaaaagagggtgacaaggttagtttctggtgacccgatgagtaaattggcattgtaatttcaccacaagaaatctgatgtttatgcacttgcctgtgttgattcttctcatttcatgaaacagattgaagtgggtgatgtcataggtgagatcgagactgacaaagccactctggaatttgaaagccttgaagaggggtataactaacatcttgtcgtcttatttctttttctaggcagtatgttgatgttcattctatatagcattcactatctgtggatattgcttcttttcttgtttggttaagtgagaagtaaatgttaattgcaaaaagtaaggtctctccaagtgttcccccttgaactgatagtgatttaaaaggttgatttcatgtttcgtagttttcatatgagtatgggcttcctctacaaaaactgatttcctggatcaaatgagtgaagttatataatagattctataacttgatggatgacttttgtgtaggtacttagctaagattctaattcctgaaggttccaaggatgtggcggtgggaaagccgattgccctaatagtaagtcttttagttcaaaagtacattgactgaattctttatgccagaaaactgtattacgactggtatatttaatccatttgttttactagcctgtgtgtaatgcattttgtgcataaattggtcgacactcttctagttccatgctacgttatatattgcctgaagtaaaagttatgcctgcacaaaaaatctttgaaaatacaattgcttgcagattgggggatataataagctaatcgttcttctctgtaggttgaagatgctgaaagtattgaagccatcaagtcttcttccgcaggtagttctgaggttgatacagttaaagaagtccctgacagtgttgtagataaacctacagagaggaaagcaggcttcacaaagatcagtcctgctgcaaagctattgattttagaacatggattggaggcatcgtcaattgaggc

SEQ ID NO: 30235 - DNA, 3393 bp, Arabidopsis thaliana landsberg
gatggcagaggcggatcaatggaaacccgattcaagcgtataagcagtcagagccatagagaagacatacattcagaatgagctaagtgtaagggactctaagcattgcaagggatcatatcatgtatagctaaaattattcgccaaagtaaatatagatattaccaactacgaatcagttttcatatcgaactataaggaaccgggaactaaagccatggagagtatgtgtagctttttgttaccataattttgccaacacaaatagaaaaagcagtggttcacactaacctgactggctcattgggctttcaggtgagttcatgaagtcgaccacaaacttctccatgacatctgtgtcataatccatcttcggcctagcagagtaaccaagaccgggccaatctacaatagttgctcgccagttgacgtctccatcgcgctgcacaatgtctttagctacagatctccactcctcaacggtgctaacatcggaaattgttggtatcattagaatattcttagccgattcacacttctccctctcatgctcttcatagtatataccaatcgaattgcccttgaacttccactgccagttgcttgtctaaaacagaacagcatcattacattaaaagaagcccagaaacgaaaggattatcccagaagagccttacttttcatttctggttttcagaagtaagaaaacaaatctcactttgatcaaattctacataaaaagagtacagctaatatagtaagattgtgaaacaaaactcaatagaatctcaacatgactaatacaattttgtctaattcattctccaagtcaaaggatcaaaccattaatacaaaacaagatactagtaaactaacctttgtttggactggcaatttttcatcgatggagatcgaggacacagaagctcgcaccgaaacaggtttgggatattttggagtaagcaagagaaatggtctgcgaattttggtggtaaagggtacaaaaggtggtgatgaaatggagaatgcagctgaagcagccatggaagcgaaattatacaaaaaattagggtttttcgaagatctgaagcgagaaagaaggaaacgacgattcaaaggttgagaattttgaaccagaaccacgaagacgtgcttgatatttctcgtcaaagtttggtagaatctgttagaaatttacaataacagtccaaaacaatttcgtatattacgttctaggccaagaagaatacaaagtatcaaagttacccacagtcccaaggcaatgtaaaccacaaacctcgcaaatgaagacctcaagttgtagagagtagagagatctgaaagtttgtgttgggagtgaagcttccattggtgaggtcactagtggatgcattagtccacaaaatgatatatgtgtggtgtacatctatccacaaccttttaccagtagtcacggcatgagcaagaaccgtccttaaatgaatgaaagcgatttctgtctcggaccaatatttctaccccataaaccttcgacgttagcttcataacagcgtgacaatctctgcaaattctcagattctttactatcctgatatttgctcctttggacaatctagctagagcaaatgcaagtgcaagcttctcactgtgtttactcacttgatcctccttttcttcctcttctacatcatataaagcacttgctacttctggggtatatccagcttcatctttaagcctcaagattatttcttttagcttctcgtgagcctctatatcgattcccttctttttctcgcctgcagtgaacttgtacatggttttgccaacttcaaccaagctccaagcagttgtcttcttgattctctggacaatcattgactttctgatagaagcaacatccttccatttacctgcagttgcataagcattcgacagaagtacaagatcccctgagttatttgggtcaagctcattaagcctttgtttcacttgctctgccaattcgatattcccatgactactgcaagccccgagaagagtccgccatactatggcagttggcggaattggcatttggcatatgaaatcataagccttttgcagttttccagatcgaacatataaatcaaccatgcaaccatagtgttcaatttctggttcgatgtggtaaactctcattcatctcagaaaagtaatcttcaccttcttcaatcagtccagcatgactgcaagcatgcaaaagtgaaatgaaagatatcccgtctggtgtaacaccatacgcggtcatttcattgaatagtctaacagcttcttctccttgaccatgcatagctaagcctgctatcattgatgtccaagatacaatacacctcttctcttgcataccttcaaagactaacctagccattgggacattaccacacctagaatacatatcaataagcgcattgttcaccgaaactatccaactataccctgctttctctacaaacccgtgtaatatcttcccaaactcaaatgacccagattgtgaacaggcagagagaactccggtcagacttacctcatttggactcattcccgctcgttgtaactccctgaagtacaagaaagactcattgaaacttccattatgagcaataccaacaatcatagtactccaggagacatcatctctgtgaggcatttccgagaagatccgtttagcactctcaagctccccagctttaatgtacccagcaagcatcacgttccacgacgtgtgattccttaccagcatcttatcgaagatttccctcgctcccgcaacatcattccccctaaaacaggcggtgatcacagcattccaagcaaccaaattcggttgatgcatttcatcgaacaccttgcgagcaaactcaacacacccacatcccccatacataccaatcaaggtagtgccaacaaacaaatgcgactcaagcccatgctttaaagcttgacaatgcatctgaaacccagttcttaaagaccggaaattctccaccgccttgatgacaaacgcgaaggagaaactatccggaaagacgaaacctttcctcatcatttcaacaaacaccgcaacggaattgtgcggctcatcggattcagagtagcctcggacgagagtgttgaacataaacgcatcaggttcaggaaaacagagcaagagacgacgagcgtaaggtaaagcgtcggatatagaaatcgcacaatgtaggataagttttccagtgaagtaagaatcagtgtcgacgccgtatttaataaacaagccatgtatttgtgttaaagctcttaagatcttgcagctattaaggagagagagacaatggtgaattgctatagtcatcgtcacaaaccaaaaaaaat

SEQ ID NO: 30236 - DNA, 1767 bp, Arabidopsis thaliana landsberg
tcttctttcacaaaattgaagattttgtatataactcctccttatgatttttaggccttttcatcgtattcttgttgttttcttgttattcactcgagtagttattttattatgtagtaaatccaacatcgtttttttatacacttctctttgatgactatgtaaacaacaattggtaatcttaaaatgaaatccgatactagacacatttatatggaagaagaaaatatctcgagtaagttaccgacacaaacaatcgcccttctcttgattgtcacatttaacggaaaaaacaaactaaagactttaaatacactttatttgatgatgtaagctttaaaaaaaaaaaagactgacatcgaatacactttattctattagacatagatacaatcttgctagacaaaaatccatttacgagaagggcgaattattcagaggtatgcataactcttttcttaagtctttgtgttggttcactgtaacagagttgctatcctccgccaacgactttttcacaagattgtgtgggtttgagagtaaagcttcctaaacactttcattgcacaattttagtgagtgtctctaaaaaacaaaatttacaaaatattaataatcaaatatgaaggatatttaaattagagacatcctctcaaaaatgtctctacttagacatttaagacaatgtgtctttactttaaaaacattcaagaattaaaataatatttattttgaatatattatattttaagtgtgagaagacactcaacttatttgtgcaatggagttgctcttagcatacaacatttatataagactacgacattacccctccctttagctataaatagcaaatcaagaaacctttccgcaattatacatcaatacattgtggataaatatataaacgagaaaaaatgggaaatatgagaagcttattgaagacgttaatggtggttctatttcttggatggattttggtttggattatgatttcaactaatctttttaaaagcaaatggaccccgaaactctccaagtatctcaatactacttattttggccctcaaggtattaatttctcgatttaattatctcacattttaatattttgattcctttattttgagtattcaagaattatatcttgtatgtctaggcacgaatcttgtgcttctcacggttcccatgatgttcattgcggttctaagttgtgtttatttgcatatccagaagaaaccaacccaacctcaaaggtacaacttgttatacttttatttttattgacaacatgtaaatatttgcaataaattatcacaatcctatttatatgaatgcagagaatggaagctaaaaaggataatggggagggtgattatggtgatgaacccattggggatagtgacagccacggagttaactttttctctattgtttgttgctcttttggcttggtccctctacaattatctctaccttagctatcacgtccaccttcataacgacgacaacgcaaaaatgtaagcttctatttgttttctacttccatttgaaaatgatttatcaaaatatcacatggagataattcaacactatgttttatataaaagatatgaacatctcacttattactagatttgaattcgataagtcatcattttcacatggttacgctatagcggatgaaatagaccaaaaacaacggcgcattttttgcactgccattattagtatatcccatccatgcatagtaccaaaatatttaca

SEQ ID NO: 30237 - DNA, 1588 bp, Arabidopsis thaliana landsberg
cgctatcccaatcaccatcgctattgttccggccagattaggcacatatgttgcattccatgcaaacgtttttacatatttaagaaatcgtaaaaacaaatatcagttggaataaaagaaagaatgaaagttttgttttgttttgttttaaggataagattaaggtagatgcatgtaacacggacctccatcaacttattgaccatggcccagtagataaggaaaacgactgtgtgaacgaggaagcaaaaatttgagacatgtccaagccaaatgtgatattttatgcttgactccgacgttaacccgacaagtggcaggatcgtagaggctcttgtcaccgggaagaacaaaaaggcccagcagtagtggcctacgtaacctatcctcagtccaaaagccctaaactttgcctgccatctacacatgtcacgcaatattaaatcaactcccataccctacggatttggtacctagatactccaaatggtaacttgggagtgaagcaattcatcaaggtataaaaaatggtagtgccaaaaaatgcactagaggttttggtgtgttccatatgttatgtttcacatagtataaccttgtgagcaatcatgatcaacgagtggagagacacatatcttatatagatagatgttatgtgggatattccaacaaaccattcgagcatataaagttagaagtgaaacaaattaagaagcttacattttggcgttgtcatggttatgaaggtggacgtgatagctaaggtagagataattggagagagcccaaactaaaagagccaggaacaacagagaaaaagtcaactctgtggctgtcactatccccaatgggttcataaccatcatcaccctccccattctcccttttaccttccattctctgcacttatacaaacaaaattgtgataattttgtaacaaattttacaaatatatatcgtcaataaaagttgaattataacaagtggaacctttgagtttgggagggttgcttttgggtatgcaaataaacacagctcagaaccgcaatgaacatcattggaaccgtgagtagcacaagattcatgcctacacgtacatgataaaggaatactcaaagatgaaggaatcaaaattttaatgcgagaataaatagagaagttaataccttgaggaccaaaataagtagttttgagatacttggcgagtttgggggtccatatgttttggaaacgattagttgaaatcataatccaaacgaaaatccatccaagaaacagaaccaccattaacatcttcactaagcttctcatattccccattttgtcttttatgttattatccacaatatacttatgtaagtgtgtgttttatgtgtggaaagctttttggatttgttatttatagcggattatcagggcaataacgtaattgtttaattaatatgtaacgtgttatattatacatgtctaagacgtgagaatggcttccctgcttttattttatatcttttctcccaaaaatattttgctgcagagaactttcacaatgtaatgtatattacatatacataactcatatatcatacat

SEQ ID NO: 30238 - DNA, 3164 bp, Arabidopsis thaliana landsberg
ttcttttggggtaaatttgataagttttctttttaagaaattgaaaagagtttttttcttaattgcatgataaagaaaagttttataaaacatttaattagtcacatactttcagtattttcccggtgctttggccgattccggcgctgtaacactctttccgattccccattttaatggtttggttttatatatcaattttttttttatatgtcttataaacccattgagatatgtactgatacaccgtagggttaggatactatatgtataattttaaagtatcatgtattacttgtgaattgtgattatattttaggaattttgtgttttcatgatttcttataaatatgtgatttagatttatattcttttatattttgtttttattttttttattttttttgacactgtcatatcctaattttattttattttatgttgaattacaaaacaaaaaggttttcgtattattcacgtttaaataatctggttgatagacgtaaaaaaaaaagatctggttgatatgttagtgcacctttctcgctcggttattattatatacccactatgcaaatgagccacgccacaatcacctgcgtggccagtggccaccacttctgattttcctttaacatgtccgattaactttttatttgttaattaaaacacctgaataatgtgaaacctacactatacaataataaaaagaacctctaaaatacattaacccagtttaatatctatagaagcagttgttgaatgttgagttggggtccaaaagttaaagtccaaaatggctgagaccactagtttatgttaaaaaggttcagataacttaaagtaagatcccatcagagttgttataccaagtccaataaatcataattttttacacttctttactaatcttattatatatgtaatctcgttttagtggcctttgatgatcactcaccataacgtaacaaaactaatttgtgcggatattcctgaaagttatttttaatcataattaatcattgtagatattttcaaaaaatatctttaagcttccaaaaataagcctaaacattggtttgaaaatctagattattaaaatacaaaaattgaccatatcgtaagagaaaaaatcaatattgctttgctacgccattattaaaatagaaaaacaactattaaaaaaaaaaaagtttttcttacataaaatgatgaaaagaaagacgaggactgactcacgcgttgtttcggaactcttcaagtaaaattttggatttatggtctggcaaaattaaaaaatatccagatttataaaaaagcttcgtcactttcctctttgtataaaataaaataaattctctctttctggtctgaagaaaattacgattattttcttatgtctccagttgaacccgccggtataatgaagaaatctcatcgtcagaaatctcaggtaaaccaaaaaaaagaaactttttgtgtacttaaaaagattttgttgcctgaattggattaaaagtgtgtggattatattatataacagagactatgggcaaagctagtgatgagaaagtggttgaacataagtggtagagatcctgagtatggtgctgatactgataacgaatccgaaaacgaagatgctcgtgaagacaacgatgactctagctccgatgaagaaggttactctcttctctctctctggtaaacaccggttcttcttatttttacggttaattagctaaccggtttataacaggtggtagtggctcgagaggaagagaatcaaaagtttatgagaacgcggaggacgcaatcgcagccgcttcagccgttgtagacgcagcagcagcagcggcggagtttattagcaatggtaatgccgaaattgcataggtagttatgagattcactgtggggtgtttctgggtttttatatctattttgagatccctttgttgaatttcaaatcttttttttttttataactaaattattcaactttaaaaaaacaaagtatacgaattttgtgaattttatgtatttttattcttttgtttggggtggatcagatgctccaatgaagttaagaagaaggaattcagaaacattaagagcacagtacattaacaacaaagaaataaggtacaattttgtatttttatattttatatatagtagtactatatagtaaaagattcggatgttatcatagtctttttcaacatgtaagttttttttttggttgggtaaaaggagacctaacatgtcggaattatgtatattgtagagtttgtgttggtacgtggaacgttggaggaatctcaccaccatctgatcttgacattgacgactggattgaaattaaccaaccagctgatatctacgttcttgggtaaaacttgacttttctttgtcagcgacatggacaaaactaactctgttcagatatgttctttgttagagatttttatttatgttttgtttttgtttttgttgggtgtgaaggttacaagagattgttcctttaaatgctggaaacattcttggagctgaagatgatcgtcctgttgctaaatgggaagaagtgattagagaagcattgaacagagttagaccaaaactctccggggttaagagttatagtgatccaccatctccgggtaggtttaaaccttttgaggaaacacatgatattatagaggaagaagtagcttttgagagtgatagtgatgctggtgttgagattcatccgattgacgaggaggaagaagaggaaaccgatagactttgggcgttaaaacatgacggtggagttatcggcgaagttaagactcttgttgacccgaataccggtttgccggttgttgagatcaagagacagttttcgattcctaagaagctagacagacaactttgtttacgtgctgatagctttaaggggataagcgacgatgattctactcaaaccggtatgaaaacgataaaccggatgttaagcgggaaagaacggatcggtttgagttggcctgagccaccattgaacatgttaggaccttgtgttctcgatagacaaccgtcgataaagacagtgaagtctttaaaaacagccaagtctttcaaggctatagttcgtttaagtctgtagccgggaacaacaacgg

SEQ ID NO: 30239 - DNA, 2834 bp, Arabidopsis thaliana landsberg
tctacttttgacatacttgaaatactgtcattccttgattagtttttcaccttttgtaatatcaaaacacatcataacgtttgactttgacttactattagatagttttgtgaaattccagagaaagaatttagtgatacattcatttgcaaaagactagagagaatcaggcttttaatacatgaggacaaaagccacaccacagctcacctgccctcgtggccagtgcccacttactcttgtaatatcttctctcaccgtcttaatagtaacattaaagattcgtgtcctaggctgtgaaatatatcattcatcatctcgctgtaaaacatacatagaaaagttcttttttgttttaaaaagcaaatagttctccaaagagtttaatcatgtgaaatttagctgtttatatgtaatatgcccaattaattactgttgatctgaatacttaattctcctttgtgtttggttggttacacacaagaatattgttataatttttttgcaaagaataaataaatacgctgactttatgaccaaggtgaataaatgtacattatgctaattgatgtataccattatgtacattgcaactaccatttccaatcacacattttatatgcaacaaataagtgacagacattttctatttacagaattagatatcaataattgataggagagaatggaatagaatagaataggcacacaaatggatccttcctttattatttccatacagattgtataacttgtattacatatttgatttctctaaactcctagaacttttttactcacccccaaataacaaacttaatcaaaatctacgtatatatatatttatgataataaaaaaattacaaatagaacatgcaaataacaacgaacccaaaaatcacatcatttacatattcaactctttcttttttttccacatgtttacagaattaagaatttggaagcttggaatttttttttgataacgtgtgaaatcactgacacggaataaaccgtgaccccatcattctacaagctacctccatcaatttacctgcatatattatcatatcatcagtaactttaatcaatgattaagtgcaaatgaatatatgattagaaacaaaacccaaaaataccgaaagaccagaaaaaaaagagtttggtttgggttttagtgaaaatttagacaagctgtcgttaacgaccaatgtgtctcaatcacagcttgtcttttataaagaacaaataaaaatcattttccttaatttaatgataaaatatgggattattcgtcggtgggttaaagaattaaaaagaataaaagtaagcggaatattaaaaaacaaaatttgttaagagagttttgtcttcattctctcacaagtctctactttattccaaatcccacatgttttcttacttctactctcattatacgaccaaattcatggctgctaagtgctaatctatgtgattaatgtttcattccacacataaagtttagtacagtaataaactaataaatgttagaataagaatttttgacactcaatgacacaaaacaatgatgaatttttgtgtttagatgtcaatgtcaaatatttattgaccgaataattagcgtctaaaaataatcgtaacaaaaagagtaaagaaatggaaaatttatctttacctcttcttgatttagaaactttcttaacgaccggagcagctggtttaatctccgtcgccggcgtttcctccttcgggaacaagactccatcaataccctgaactgaaatccgaccgtccgtgtagatatcaggatcaaacaagtaagctgaaccatcaccgtgtccgaatttgacagatccatcagcttcttgagccaacactttatgtgggaatctcaatgaatcatacttcacttttccgaatctccgaacagcgttgtacatactctcctctgtttgatactccggtatgatgtggtaatacataatttgttcaggagcacctggctcgctaagctggtccgttgtgagcttagccatggcttcgtcgttaggagcaagaacggttaaaacgtagccttctgacacgagtcgacccatctcagtggctaaagaggttaagttgacgagtatatcagccatctcgttgtagccaccgtaatgcaagagagtgtggatgaaatctttaacttgagcatcgccgttgaaatggccacgtggaccaccgggtccgggagctggagcaggagctagggaaggacctggtgacatagcgtcgtagattggaagaaccggaggagctccggcgggaacggcgggagatggtttcttgagacggtgagttctagggtcaacctcaggagctccttctggtataacggcggagattgaacggagactacgacggcggttaaaatcttcttgaacagagcgagggatgagaagacgttcgatgccgtgaatgataccatcgggtctaatgacgtcatcgggtcggataatctcagcggaatctactttaagagtgttgacgtcgacggtgaggtggagatggtcgttggagagagtacggtggtgatgagaaagagaaggccattgaggagaagtgattcgtttaggaagaatgtggaacattaataaagattgtaaagatttgaggtttcttggttcgagcaagaaagatttgaagagtgggtctaagtttcgttccaaggcatcgttgcgtggtgcgaagattgtgatcttgtgtttaccaactgcttcttcgagggtctggagaaggagagctttttcgactagttctgctagctctgtgaagtagagtccaggagagct

SEQ ID NO: 30240 - DNA, 3545 bp, Arabidopsis thaliana landsberg
aattgttgcatagtgctacaagaataaatgtaactgaatatatgaaaacaggaataaatttacttcagcctaattactgcacttgcatgtcatatcccagctgtatgatctgctaaactgattttttcctgtactaattgctaagataactcgaacttcgatactagttctcagaatttgagtatacctcttgctgctttctttcaattcttgtatgacatctaaaaccatctggatcatttaattatatcttcccctgacaacagaggcgtaaccaaaagcttctggaagaagcaccttctccagcattgaccgctgaattgcgaaaagccatgggtgatgcagcagtcgcagcagcagcatccattgggtacattggtgttggtactgtggagtttcttttagatgagagaggttccttctacttcatggaaatgaacactaggatccaggttgaattttattatgactgctaagtatatttataagcatctgaagtatactgaatgcgaaccatttcttgaatctaaactcaggtggagcatcctgtgacagagatgatttactctgttgatttgatagaggagcagattcgtgttgcaatgggagagaaacttcgttacaaacaggtttgaatagtgttgtatatgatgttttgagtggataccaaaaaagttatttcaaaatttaattttgtttgtttacaggaagatattgtgctcagagggcactcaattgaatgtcgtatcaatgcagaagatccatttaaaggattcagacctggacctggtatatttcagtagacttttatatgttaacgtcttcgaattttagcagattggctttctttacaataacgtcactcttacaacaacaggcagaataacatcatacctgccatctggaggtcctttcgttagaatggacagccatgtctattccgactatgttgtgcctccaagctatgattctcttcttgggaaggtaatatttgtcttttactttctctggatagccatttagtatctgtttggttatttaggaacaaattttgtggcttcatggtaaaataatcactcgggtgttttggaatcttaaacaaataatggaaaagtcttcctggtgttgttcatttgcttctatagcagcagcttactggaacttatagctgatgtgttgacacactaaatctcttgtagcttattgtgtgggctccaacgagggaaaaagcaattgaacggatgaagcgtgcgcttaatgacactatcattacaggtatgtcgagtactactttttgttaattccatattgtttatgcttcttcattgtctgttttgtttttcttttattctgtgtaagatgtgacatttcgttacattggacatctggtggaatgtaaaatcaaatttcgttttcttggtttcatcaggggttccaacgacgatcaattaccacaaacttatccttgatgttgaggtgtgtgaaataagtaaagctatagtttagcgaattttgtaatgaaaatgttggcttttttgtaatccaattgttgtgttggtcacaggatttcaaaaatggaaaagttgatacagctttcatcgtcaagcatgaagaggagctagctgaggtaaattcgaatgtctctgtggtcggctaaagacacgggccattggatgtattcattttatatgcttctaagtccgtgggatatgaaaagaatgaactgagactatatatagaggaagacaaattaaattgtgtttgtaatagttaggttggttaaaccaaatggtgggttctaacatggttatattgtatatgcagcctcaagaaattgtggcagtgaaagatctgacaaacgcaacggtttagaatgatacatcagctctgaaagaccacccaattattgcaatcttcgtctccttttgtgtgttcattggtacaaacttcggtaacgataagactgttttactagagtctgtggttttgtcaatgttcttcttgtatcataaacaagaggaaacacttttgtttgtagtctctatgtcaagatttttcaataattttcatatatagtagagattatatgaacaaggcctatcactattaacaaagtaaccaaaaccaaataaaacaaaagacaaaaataattcacatttaggcgatctcatcgcgggccggacacttcctgagacgctatgtaagacgcagactgcctagagccgccactattagagctctctcgccggtggaagaccatagtttcactctccccattttgtccttcaaccatggaagactccgcaaacctcagcccataaaacctcaagaagttcaacgactccatcctcgggttccccaacggtatgcttccttcgaacatacccactaccgctgccattgttggcctcaacgccggctcctcgtggacgcaacacaaagctatccgaaccaacttctcagcctcttggctcgttacccgaccctctagcctcggatcagcgagctccatatacctcccttgttcatgcatatccaaagcgtacaatgggaaatacaccaaaccagtactagtggtcgtagtcgacgagtggttctgattattatcctccgtcacactgttgctccgagatcgaaaagaacagtttttcctaccactcactagctctaacaaaaccattccatagctgtacacatcagctttctcggagatcgctgcgtttgttatccactctggagctaaatagcctcgagtacctctcatcgtagtgaacagacttgactcttcttgattaagaagctttgataacccgaaatcagatatcttaggttggaaatgatcgtgcagtaagatgttctctggcttcacatcgcagtgtatgatcttctggtcgcaaccactgtggagatacgcgagcccgcgagcagtcccgagcgctatatcaaacctttcttgccactcaagcaccggaccattcccactaaacagagtcttttctaacgagccatggttcatgtactcgtagactaagagtaactgcctcccgcgagcgcaaaagcctcgcagtttcactagattcgtgtgtctgatatttccaattatcgcgatttccgtacaaaactcttgtctaccgtgaagtccatggtttgtgattttcttgacagcaatgagtgtttcatctgggagagttcctttgtagactgatccaaatccgcctgatcctatctgcatcttgaaattctcagttgcttgttccagctcctcgaattcgaatttctgaggtaaccccgggatatggaaagatcctagatctcctgattcgaacgacccgggtctagttacttgcttctcacggatgctactgtatctcatcactgcacatctacgccaccagagaagccctaatgcaatcaaaaggaagaaaccagagcaaggtaagagcacaagtgcgatcacagggaagctagatcctcctctgttattgtttcccggaggctgagcgtttgtttttctgatagacaacttaacgtatccaataagatca

SEQ ID NO: 30241 - DNA, 1239 bp, Arabidopsis thaliana landsberg
  unsure (1)..(1239): unsure at all n locations
cttgcaaccttctttgtgtgaaaaagcttactagaagagtagtacatttcttattgaccttaaatgggaccctagagttctatatatacgtaagtcagaaaatttcccaagtctctcaaaatagcttcaggatgggaccaacagtatatataataaatgaatacaaagtagcttcttgaaaccacaataaatttgtgtgtcctactaactacggttctaattatatacaaattcttgatttatgcttacaattcttaggtacaccttggatcaatcttcactctctaataatatttcttatatgctcctcaggatgttgttcatataagactannnnnnnnnnnnnnnnnnnnnnngctttcatcaatctgggcacagtccatatctcctgcaaatacaccagacaattatgaggcaattgctaacacctacagtcttgtattgttgttctctcgtgttaaggtaacatattcatacctcaatatctctgcatctgactgtttcttattgtttttatgatctatgagctaagtctcactagatctccgtatgaattatttgcttccaactttatgttaaacattcacaaaatttgaatctttcagaactcaagtcatgacgctttgattcgaagtttccaaatggcactttctttgcgagatatttcattgatggaaggaggtgagcttccacatgttttgattcctccctgctagatatttatccttggtttttggtttggaaaccctgatgtagactcttattgcaatttcctacgagacatatcatgtatgcagtaaatggccgtatagaaattatgtttaaaacgagggagagctatgtttgaacatcatctaaaagaaacttagtcattttgttcctactatttcaggaccacttcctccatctcgacgaaggtcactttttacactggctgcatcaatggttcttttttcctcaaaagcattcaatcttttttctctggcggattttacaaaagtaacacttcagggaccaagggtacgttgatcattctagtgaaatatcacgcaactcaatttgccaaaaaagactattatcgtgctcttgacagtcgccccagacttctatgttcaatattcctatgatagcctctatacacagagagaaatttacttaccatttttcattaacttcttcttttgcctgattcagcttgacccattcttgaacttggttgacgatcacaagttgaaggct

SEQ ID NO: 30242 - DNA, 2224 bp, Arabidopsis thaliana landsberg
cagtcacagccgccgaaccaaatcactatgacccgagcttaccattcatattttgataaatcaattgatagacacagtagactaacaaaagttaaactgtttccagtctgaaatggacaaaatgcgagagcagttgctcacagaatttatgccagatgatgcatgtccacttggtacccggtttttagaagatacccacaaaacctatcagattgattctggtgatgttaaacctcgaaaggaggtaacttccttcttttgcttcccataatattctctgaaaacctcgagctgaacataagattgaaatatgttgcatctgtgtcttcaggacgcggaggatcaagagtttggagatggcaccgaaaccgttacaaagaacaatcatgtaacattttctgaaatcccagacctcctgaccgtcaatcaaattctagaatctgtaagttacatttttcagcttcctagaaactagattacaaagtcttcatcaaaagtaacagcacactataaactatacttattttgtattgtttgaaggtcgtagagacaacacgtcaagtgggtagaatttccttccatactgcagccgatgcttcatacaaagagatgacgctgcattgtgagaatctgttaatgggaaaacagcagaagatctcgagtcttttaaattctcagctacgacatgagagttctgttaactgctctccacgacaacatgatgaagagatcaagattgcatcttttcatcctatgatcaattcagcatttcatactggggtatgtatgccttcgctatgaattcctgtggatagcctccggtttcatattccaagataactgtttaaccatttttgtattgattactgaaatttgtttaggtcgaagtccctttactgtcgaaagaattcgacatgaaatcgccaagaacaccagtgggaactattcagtcaccgtgctatgcagaactacaaaataacccacaagcatttagactaccagcctcaagcccttacgacaacttccttaaagctgctggctgttgatcatcggcaggatccaaaccatgtttggctttgaattccagtcaagaactcaaacaaaacataacaaaaataggtttgcttggttttcaaagtcttgggttacgtttttatagattctttagcatcataaatcggaattatctccgtcgtgctataattagatcattcctcctaggtttttactcctatcttctcttttcacttattcttttgtccaattcttgtttctttttggtgtgatgtgtaaaaaattgaaagaggccatctggttttcacatggtattgtaatcttaagattctacaacagatgctttgttgaacagtttccctcaagatgtacattggttcttctatgatctaatttataatttgtgtcattggataagtaaatcaaccataagcggatcaattttatcataaaaacctatataatacacagaggagaagctcgcatatataggaatgcgttttcttttgtatatgaatgtcacaagaggaaactatatattcatttgctcatttgatttgcttaacctcttgaagcatttcaactactttcttcatctttggcctttttgcaggtgtgatgtctgtgcaaagcaatgcaactttcagagctgcaagcatctctctcctccaagcaaaagacacggtgctaagcttggcatcgagtatctgttccggtgtttctcctctcgctgaagctccatggacccatttcaccaaatctactccttcaccaaactcttcctccaccggcgctcttgaggttagaatctcaagcaacacaactccataactgtaaacattccccggagctgtaacttgcattgtgtatgcatactctgcagaaataaaccaagggaaagtgttggattttgtataaagttactggtaacaaaattaagactttatacctggtggaatgtagccaaaagagcctgcaactgagctaatactcgcggtgcctctagagggatctagaagtttcgatatttcgatttccccaagcacggctttgtaaccagagtctagcaagacgttgctagaggaaacgtcgaggtgaatgatggcgacttggtggagaaatgctaaaccttctgctgctccaacagctatggacagtctcattggccagtcaggttggtactctggtttcttggtggactcatgaatca

SEQ ID NO: 30243 - DNA, 2343 bp, Arabidopsis thaliana landsberg
ggtttagcacgtttgcgcttttgttgtttccttggtacttctgaagcatcatggccttctccttcactgccactcccttcctagaagaaatatcatatgaatgagttacaaatcggtccacataactttatcaaacatacaaactggcccaacagataggccagatagggtacacaaaactcaaagttttcaatgtcattggtgttactgtctactcacgttaacaattaaaggtttttcaccaaccacccacattttcaaccaagaaatttcattttctcatctactggcaggtcacttcacataatatcctttgtgtggcagccttaataaaatagatttctcaccatgacactgtaatgatctgtcatcatcgcaataaggccagctacagaggcagttccctcggggagagataaatacgcctggaagaagaagcatatcttgtgaatgcaaagttatgtaggttttacaacatctaaactaaagcttggaaaagaaacttgccacatcgatactaactaaaactgaaacatagcatgtccttactcatacccgattcatattaaatagagcttccaccatgtcaacagacctgctattccgaattgcagcagccacctatacaaaaaacagtctttaagaactctgattgccactgaaactcacataaacataagtgagtgaaacagctatttacccttctccactcttgtccgtgcttgcggtaagcatcatagaaacgctcaagttctaatctggtccactgaggtccaagcttgtcagacaatttcttcttctatgataagaaaaagaacgcacagaataaatacatgagagtaacatctcattcaacattcaagaaatgaagaccaatttactcacacgtagcttattttttttcgatttcccagcatcttttcttggggaagtttcattggtgaaacgcttgttcacactcctcgacttcctaactggtgccatttgcacgtatctctgcacaagtatattcaaatatatagttagaaaccaaaaaatgcaattgtgacaaaagacacactttaaactgatacggacaagatacgacactaagtcgataagcaaatttggcttcctctaagacatgtacaaactacgaatttcaacatttcaccaggggaaaaatcaagacgtcgattaaagctaagaaaaatcaaaactcacgttttttaacaaaagagtagaaccaattcttggatcagtaaaaagcagtgttggggaagataaatagctgcagtaatcgagatgagaggaaatatttacgaaaatcagaatttgggtattttaaaaaacacaccaatttaaggaatcaattacccacagtggcgaaacacgaacatcaggagctttgaatccaaaatttgagaaaatgtgttgagaaaattgtttaaattttagatagtaaaacaaaatcgaattcgaaacttcaatcgctaacctataaatataaataaaacgcagattctacaaatctgaaactgattcctcaaaaaaaaaaaaaaaacttcaatcgagtgagcttccaaaaatacccactaaacctcagctgagaaaaaacggaactcgagtcaaaagaaaaagagctaacacagaaagtgttaaagaatccaaaaaaaaaatccgggaaaattttgagagtcgaaagaagaaaaaatttgaaacggaaaaaggaaaagccttttaaaaaccctaatcgaagcagatccactaaccaattaggtgacttgaagagtgaatagagagatacccgaaccaccggtgggttcgaaagagagatagagaaagctcgagcctttagtttcaaaaagagatcgatgagaaaatatttgaaacaagggttttagagagagagaaggcaaattaaggaagaagaaagaaagattattatttgtttaaaaacaaaaaaaaaaagaaagtgagagaaagagagagagatatagaagaattagggaatgagaaaaatgagaagagaggtgttgccgcgaaacttgaatacatggacgacttcagccaatcagctttcccgatttgtcacttttttccattttttcgatttatttcttccttttattttgtttcactcttaatatctgaagctagtgcatgtgtgatcttgaacgtccacgtggattgtgaggttgtttacatcgttggattgttttagtttcacttgtgtggattctggtatcggtagcagaggattatatttgaaattactggagttttataaaccgaaaaatataaataaaataataatgggggaaatcagtttcttgaagatcttactaattgagtaattatcca

SEQ ID NO: 30244 - DNA, 2758 bp, Arabidopsis thaliana landsberg
  unsure (1)..(2758): unsure at all n locations
atttggtgttcttaccaagttagacttgatggacaaaggaactaatgcgttagaagtaagcacctcttcgtctcttttggttcatgtgtcatggtccactttaatgattatacatgactggtattatgattggcaaaccaatctagggatgataaagtaactaaatctacagcgtgctttccagttcttactttttttagttagaaattttgatctaacattcagaactgcttgccttaataaggttcttgaaggaagatcnnnnnnnnnnnnnnnnncttgggttgggatagtgaaccgttcacaagcagatattaataagaatgtcgatatgatgcttgcaagacgcaaggaacgagaatattttgataccagtcctgactatggtcacttagccagcaaaatgggttcagaatatctggcaaagctgctctctaaggtattcaatcaaaggctgaaatacttgagactttatcggattgtttattcattgttattcatttgatttatggtctttgtttttttatgcagcacttggagtctgttatcaggacccgtattccaagtatactatccttaataaacaaaagcattgaagaacttgaaagagagttagaccgaatgggtcggcctgtcgcagttgatgctggggtgagagagtacaattatgtgaaactatttcttcttccataaagtttcacgtcttttgatatgtgctaaatctgttggtctcattctcaggctcaactatacactatattggagatgtgccgtgcattcgataagatattcaaggaacatcttgatggcgggtaaacatctttgctaatcttcctgtggaattttttttgcttacgttgttgattgttggttaacctctttttacattttatgcgttctggaggtgaccgtatctatggagtgcttgacaaccaacttccagctgcacttaaaaagcttccttttgatcgccatctttctctacaaagcgtgaagaaaatcgtgtccgaggcagatggttatcaacctcacttgattgcaccagaacagggttatcgccgtctaatcgaaggggcactgggttactttagaggtccagctgaagcttctgtggatgctgtaagttcttctacagtgtctcctcacttcactttataaatacaagaccgtaatgagaatggcgcaaatgcaacaggttcactatgtcttgaaagagcttgtgaggaaatcaatatcagaaactgaggtaagttcactattgatttttcttatactggtagaatgtactacacgggtttgactggatctcccttccctggtggcaaaatgcaggagctaaagcgtttcccttcactgcaagtcgagcttgctgcagcagccaacagctccttggagaaattcagggaagaaagcaagaagtcggttattcgacttgttgacatggaatctgcgtatctaacagctgagttcttccggaaacttcctcaagaaatagaaagaccagtaaccaacagcaaaaaccaaaccgcttctccttcgtctgcaacattagaccagtatggagacggacatttcagaaggatagcatcaaatgtatctgcgtatgttaatatggtttcggacacacttcgtaacaccattccaaaagcttgtgtgtactgtcaggttagacaagccaagctcgcattgctcaattacttctactctcagatcagcaagagagaggtaaactgaagctaaaatagaatgtctcaaatatttcatattatgtggtatgcgcatcaaatcttatagttggtcggaaaatttctcaggggagacagttgggacagttactagatgaagatccggcattgatggaccggagactagagtgcgcgaagaggctagagttatacaagaaagcaagagatgagattgatgctgttgcttgggtaagatgataaaacctaaaagtgtgtttctggtgatggttttagagaactataaattcgtctgttgtttaagttcgttgactatgtctttgtatgtatgtatatgatcatcagaccctattgagagagacttgagacgttttgtaataaacttatcattactatttaaaaacgccatagcgtgtactttccgtctcgcttcactttagagaaaaacgtgccgtttaaaacatgcacgttgcaaccgttagcagactacacaccgtttttcttccataatttctctatcttcttcacctgaatcttcttcgcctggacttgtcaaacttgtgcgtgattcatcgtcacatcgccttgatcatggaaactcctatcgatgctccgaataaggtgttgtattcacctgtctatccaatttcattatcattgtaactaataaaaatctggtatttttttctaaattctcgaggatattatttggttacaggacgaacatgaatgccctaggtggaagaaatcaactgtagtttttgtgttgggtaataataactccactctatgtaatcatatgcttgaaggttaatttttgtggtgttgagtggtttgattgattctataggtggtcctggaagtggaaaaggtactcagtgtgctaatgttgtgaagcactttagctatacccattttagtgctggtgatcttctcagagcagaaattaagtccggttctgaatttgggtaagtacatgcttcagtgagtctcaagaaactaactaattgttgtgtaaagtgaatcttgttctaatcttatgatatggttttttg

SEQ ID NO: 30245 - DNA, 1526 bp, Arabidopsis thaliana landsberg
tcgagacagtggttagagatttttttacactcatttttatgttgtaccatgtacgttcaaataattatggtggggtacgtacataatattagatttatgtgatttagacaatttgaagatgtaactatttggagcacggtcgtacatgtgaacgtgtatctcaatattattgtgtacgttaatttacaggtttagtttaaaagcttatttattctcaaaaatttgaactcaccaacaaagatgtatgtacattattatacatgtgcgtaattaacatttttcaaaagtatgaggaacaacaatattttgacaatatatttttatttaattattatatatgaatagatttatgcggaaaacctaaaaaatatatcatctaatcgaaataaccaaaggtttctaatgtacaaactcaataaatattgtatataccgcttttacaataaaacataatctaacttatttacatgttcacatatacctacaccctaaattatatatatatacacataagaaatttaataaatgatataattgtaatgaacgtgtatggaattctcatcctttgtctatctatcctcgtagacaatggatggagattttttatactcaatttaatgttgtaccatgtacgctccaataaatatttttatggacatacaaagtataagacttatgtgatttaggtatttttcggatgtaactgtttggagcagtcgtacacgtgtatgtgtatctcaatattatcgtgtacgtctatgagtttagtttaattttttatctattctccacaaataatatcatataacataacgctaactaaagattttaaaaataataattaaatagaaataacaacatcaagacaaaaaaaatcatatatatcgtactaaatatataacatttggctaactcgctgtatgcaccatagtagataccaaacattacaaagattcgtaaaatgaccataattatcttcaaggccgtcaaaattaatagttaaagcaaaagtgtggccagaaattgtcaccctcaaaatcatggattgtagtcgggtagccggcaatgatcattatagatagataactgcatcaaacttaatcccaaagcttgtaggaactacaaatgggtcggactttgtcttcataatcttccatatgactcatgtaaagagaaataaccaaaaccgttacgtttgtagtggaaactcgaggacacaattcctttaaaagcaaaatatcttaacgttgaaacctcctcttttttacacggtcatttccgcaggaccagttgaggagggatggcgaacagtgcaattgtcaagggccagttccgggtcctaatatttaaggaatccatttaaagaaaaaatttggaaaaaataaaaataagattgaaaatgtctcacactaaaaaatatatgattattttctggttacaaatttacattaaaaattacaaaaaaaaagttttaaacactttttctatagaaaatagtcaaaaaaaatatatatatagatgcagaa

SEQ ID NO: 30246 - DNA, 3163 bp, Arabidopsis thaliana landsberg
taaagaccaaaccctatatccatttaaaatcaatgtaagctcattggggaggttctaatggattctacttgcttaatccttaattagtgtaattaggctttcaaaagaggccaataacagtaaatgaagagctcatgaaaagaaagcattattaccttgttcaagttccaaatcttgagcatggttttgccatcatgaagaggatcctcaaagagacggtcacgagttgggagagcatagtactcacacctcaaaatcgaaccgttgggcaaaacaagacgcttcaagagatcaaaatcatgcttgcccacacaatcactgatgtaaatcggcccaccggaaatggcccgagaagcagcatggaactcagcacaaggatgtgtggactgaaacatgtcccaatcaggctgaatgaaatttcccatccagagactgttgtatgcacagtggaccatgtgacatccttgtagccaaaatgtaccgtttggatcgcctgatggatccgtgcaccaaaagtcatcacctaattccaacaacaaatccaaatgaatcattagtttatagtataaataatttaatatgaaaattttgaaaatagtctttaagtttcattttaaacagaaagtaaaagacttaccgacacgaccaagagagatggcttcagttccaaggaacataaagtcattgcaatgctccatgctggcgataacgccgttaccgttaaaatgcttattcactgacgacgttaacgccttgaagtaagctttggccaagtcaactctcccgccatatttctggcataacatctccaatatctgcaaattaaaaaggccacgtgtcaaaagttaatgaataaacggaaaaacaaaacaatccgttaagtcagacggaaaacttacgtggatgacatcaactttaacaccgtcaataccggcgttttgaagatgagagtgaagaccttcgtagaactctttcgccaagtccggcgaggcaaatccgattccggtctctatgatcttatcgacggcgagatcttccattgttagtttaagtcctggagagagctcgggccggataatggtcgacggcggcagagccggagcttcaggacggagacctccccagtaaccgcaaagtgcgtgccaaacgtagatgtaatcaacggtggagaattcatctttcagatctctgacgaaagctttcattccgacgtcgttttgatcttttggagaaacgtagtctttgaatttgtggttctcttcaaacttcagaagcctgtaaaaccagattaaaccggtgtgaggatttcaataatcaaacagaaattccggtttatagaatttggttaaactgagccagcacgaaatctcggttctcactacatgtggactaaaaattaaaatcaaactaaaccgttttcaaggaaggccaaaaaaaacagtgcgaggatttcaacatctaatcaaagtatcaaacgtatcatagcatccggttaaaatgtacaaaattaaaccggttcactggttcaacctaacttaaccgtttaaaacaagtcagaattactaacaatcgataaaattgaaaggctaaaccggaataaaccaacctgcaaggcatttgttcaccggcgacggtaatattcatcccttcgacatcaataccatcggaatcatgtccaatcgattgccaaccgtcgtcgataagaaccaatcccggaggacaaccaccgtcgacgagacacttaacacctttatgaactccgtcaggattcaccgtcaagtaaaaagcatcccaagtgcaccacccgaatttatcgacaattcccggcggcgatttctcttcaagaagcttgaacgtactcatatgaaccctaatcactttcatggcgtctttcacgagcttgaacgggtcatccccggcatggacatacacaatctgacgaaactccgacccggttacttcggtcgacccggattcgacacagaccgccacgtcatcgtcttctccggattggaatgatgaacggaaggagccttcaagaagaggtagcaagagaacataaggacgacccgacccggatccggatccagaatccgacccggattgatcaagaatgatgatttgagtctcgttctcgatgtcacgtccgtttgatccgacccaatgagtagtccaccaaaccttgaaacggaatatgctcatgaaacgaatgttcttgagttttccgatggatgccacgtggtggcttttgggctctccgtcgaggttaaacccgatgaatgaaccggcagagacgtcgagtggtacaccgtctttgtcgactaagtaaggtgaagaggtgagagtaacgttaaccggaacatcggttaagacgacttgaccattggctaagagagtggaatcttctaaccggaatttttcggtaaagtcaacgccgttgataccggaatcggacttggtcaaacacggcgaagccattttgccgatatgcaagattttggacaaaggattgagaatgttttttaggttaagatggtagagagtaatttatagagtttatgaaacttaaaaactttcccgaatttgattatatgataagattatggattgaaagaaagataggaaatgtcattagatacttatagaattattggtcgacatgtaaggaatgagtaagagagtgaaacctatactttcttcgtttttgttaatttaattacttctttatatattttgatatatttgtggggctgtttgatttgctacctttagatttggtcgttggtgatttaatacgaagggaaataaaatattgtatacatggttctagtcacatggctcttaatatttctaaatttttatatattgcatcataattgcgcctttaattgacctaccgacaatgtaatttccacggatcgaccaatgaaaatcattccttattaatttaaaaatatccccactcaacttgttatattcattttagttttgatatggaaattagagaaaagaaatgtgacgatgggtatatatatccataatatatttggaaaagataactttattgtctgaaaatttaattgattcggatggttaatgttttgaaacgttttaggcattagatgatgattggcttatatagtcagattcctcttaagagaaa

SEQ ID NO: 30247 - DNA, 4612 bp, Arabidopsis thaliana landsberg
  unsure (1)..(4612): unsure at all n locations
gaaaagggaattaacaatgtcgacattagtgtatggagaatggagccatttattagccattagtgtatctacaaatcatatataacgtcacagtttttcttgccagaagaatgaaaacaaaaaaatggcatctccttccgtaaaaaactcaatctttagataaaccaatactatcttttgctaagcttataaatttcacacatagatacaaaagttcggcctcgatcttcggatgtgacgctgacacatatcttttattaattcccacgtgctagaatcataaggtctcaccaactcattgtcaattatctttctaaaacgaagtccttataatcacatatacaaatccattttcattttttctcggcattaaagagcaagaaaatggaatctcatgttgttcataacgcacaaaagccacacgtagtttgcgtgccttacccggctcaaggccacatcaatccgatgctgaaagtggctaaactcctctacgctaaaggctttcacgtcaccttcgttaacactctctacaaccataaccgtctcctccggtcccgtggtcccaacgcgctcgacgggtttccttcattccggttcgagtccatccctgacggtctaccggagactgatggcgataggacgcagcatactcctaccgtttgcatgtccattgagaaaaactgtctcgctccattcaaagagattctgcgccggatcaacgataaagatgatgttcctccagtgagttgtattgtatcggacggtgtgatgagttttactcttgacgcagccgaggaactaggtgtcccagaggttattttttggaccaatagtgcttgtggtttcatgactattctacacttttatcttttcatcgagaagggtctatctccttttaaaggtactaattgtttttctattactactgattttaattcatatagtgtaaagaaaaatcgcccgtaactaatgcatctagcatatttatctgtctttagcccaaagttgtaatatgttgtatactttaatttagattactaattataacggtgtgtattgtacagaccaaagttacatgtctaaggagcatctagacacggttatagattggataccatcaatgaagaatcttaggctaaaagacatccctagcttcatacgtaccactaatcctgacgacataatgctcaatttcatcattcaagaggtggagcaatccaaacgcgccagtgatcattctcaatacgttcgatgatcttgatcatgatcttatacaatctatgcaatctattttattacctccggtttatacgattggaccgctccatctcctagcaaaccaggaaattgacgaggttagtgaaataggacggatgggattaaatttgtggaaagaagatacagaatgtttggattggttggacagtaaaacgactccaaacagcgtcgtttttgttaattttggatgcataacggtgatgagtgcaaaacagcttgaagaatttgcttggggtttggcggcaagtaggaaagagtttttatgggtgatccgtcctaatttagtggtgggagaggcgatggtggttcttccacaagagnnnnnnnnnnnnnnnnnnnnnnnnnnnnnnnnnnnnnnnnnnnnnnnnnnngagaaagttctttctcatcccgcgataggagggttcttgacgcattgcgggtggaactcaacattggagagtctcgctggtggtgttccgatgatatgttggccatgtttttcggagcaaccgacgaattgtaagttttgttgtgacgagtccccagtgggcatagagattggtaaagatgtgaaaaaagaggaagtcgagacggtggttagagaacttatggatggagagaagggaaagaatatgagagagaaggcggaagagtggcggcgcttggcgaatgaagcgacggagcataagcatggttcttctaaattgaactttgagatgctcgttaataaggttcttttaggggagtagagactagtaaatatggatttcaagaaaaaagggatttaagcacacaagagtagaccattgctcacaaagaacctctttatttcccaaattaattactcatttactcataatcaaataaacatcttcttattcatcacaaaccaataaaacttactttcctcagttcaaatatttcatactattagactttgttttgataaaaaattgttctactaatggtttaaaatttcatgttcagattttttttttttttttttttttgtcggtcatgttcagaatataatacttggtttccttaattgtctttataataaatgatttttttgtaatgattaatacatatagagttatgagtagatattttgtaacgctaattaatttgtcttcaaatgaaaatagcggaagtactttgataagaaagaaaagatacacctctaacgagttacaatgttgtgacacctctcgagtcatttctttagcatcttgtacatatataaacgcctaccgacaatggagtcgtgttaacttccatcattatttttctcttgtggatacgttttttttttaaaatggcatctcctgctgtccatagcaaacaaaaaccacatgttgtttgcgtgcctcacccggctcaaggccacatcaacccgatgctaaaagtggctaaactcctccacgcgagaggcttccatgtcaccttcgtcaacaccgtctataaccacaaccgtctcctccggtcccgtgggccttacgcactggacggacttccttctttccggttcgagtcgatagctgacggtcttccggataccgatggggataagacccaagatatccccgccctttgtgtgtccaccatgaagaactgcctcgctccgttcaaggagcttctccgacggatcaacgatgttgatgatgttcctccggtgagctgtattgtatcggacggtgtgatgagctttactcttgacgcagcagaggaactcaatctcccagaggttattttctggacgaacagtgcttgtggtttcatgacttttctacacttttatctcttcatcgaaaaaggcttatctccgtttaaaggtacaaattattttcatttttatatattattgatttttattcacatacattaaaagagaaaataacccttaataatgcatttgccaatttacactagcaaagtcgtgtaactcgtgttgtatccaatagattactaattaatattgatggtggatttgatagatgaaagttacatgtctaaggagcatctagacacggttatagattggataccatcaatgaagaatcttaggctaaaagacatccctagcttcatacgtaccactaatcctgacgacataatgctcaatttcatcattcaagaggtggagcaatccaaacgcgccagtgatcattctcaatacgttcgatgatcttgatcatgatcttatacaatctatgcaatctattttattacctccggtttatacgattggaccgctccatctcctagcaaaccaggaaattgacgaggttagtgaaataggacggatgggattaaatttgtggaaagaagatacagaatgtttggattggttggacagtaaaacgactccaaacagcgtcgtttttgttaattttggatgcataacggtgatgagtgcaaaacaacttcttgagtttgcttggggtttggcggcaagtggggaaaaagtttttatgggtgatccggccggatttagttgccggagagacgacggcgattctctcagagtttttaacggagacggcagaccgcggaatgctggtgagttggtgttctcaagaaaaagttatttcccaccctatggttggagggttcttgacgcattgcgggtggaactcgacactcgaaagtatctctggtggtgttccgataatatgctggccgttttttgccgagcagcaaacgaattgtaagttttgttgtgatgagtggggagttggtgtcgagattggtggagatgttaagagggaggaggtcgagacagtggttagagagctaatggatagagagaagggaaagaaaatgcgagagaaggccgtagagtggcggcgcttggcgaatgaagctacggagcataagcatggttcctcggttgtgaattttgagacggttgtgagaaaggttcttttaagggagtagataatagagagtacaatgaaactgttattttaaaaatgtaagatggcttatataaaagtatgttatataactctggacgagtattgttttcagtcttttcaatcgtatgttgtgataacctacatgctcataattttaggtacatatgggaattacaatttacctggaaattgtggaattgttttgtgatattgcaccaaaatgtgaaattgcgtcaaccagtcaagtagaaatgtatgtgttcttcttgcatcaacctccaaaaacatataaaagtaatatagctagctgagttatatatgacacagaacattaaaatatctcaatgtctactcttttttacctttatatatggcatggaattacaatattacactaacaagccacaaattatctatataaaaaaaaggga

SEQ ID NO: 30248 - DNA, 797 bp, Arabidopsis thaliana landsberg
tgggcgtagaagagcatcgcgatggtcaatcttagggaaatagacctcaaattctttttcattaacttgaaattttccttcccctggatgaatccaaacacgtgcaatgctacattttcttcttccagttccataggctctacctgtttcgtcaacttgtctcacccgtgctttggcaatgtcctattgcatctggagttctatctcagctcttgatgacttctttgaacttttctcacgacgcaggttttcaatctcagtcagaggaggcaatccttcgaccccttggaaatctttcacggctattaaactatctagcatttcatctgttatacctgacttagcaataaggtctccaaatgctcgatcaggacctgcaatagtaagttctaaatcaattactctacttctggcgctgtttttactagcagcagaatccattaccaatgtgatcaaaatgacagattctgctataacttgtgctgagcatggttaatagcaaacaaacataagcgctcaactgttcgtcagcgtcagtaagcacatcactatcctcttcagactcaagtctttccaccgcgaaggcttagtcctgttaaacatctgagcttactccaaaagagatcatatcgtccactcagcaagcatgcctatcggtagattgattagacaacctgtgccccttgacttaatcctgaaaaccaaatctaaccttaacaagagcagtcatgagaacaaagctgatacccatttgtgcgcttcattcgagaactacacacacctcgaaagtgcgggtg

SEQ ID NO: 30249 - DNA, 2990 bp, Arabidopsis thaliana landsberg
  unsure (1)..(2990): unsure at all n locations
tgcttttggcacaaactatttgttcttgttgttcttgaacttctaatatttcgggtttttgtaaaaccatggcaggccctaatttagagcttccagcacatttctccccaatttatttcccgatgggaaacgcagccacaggattctttgtgatattcgcgttgctagcgggagtagttggagcagcttccacaatctcaggccttagccacattcgttcgtggaccgtgggaagcttaccagcagcagccacagctgcaaccattgcctggaccctcacagtcnnnnnnnnnnnnnnnnnnnnnntgtttcacaagcaaactcatcatttttaaagacatcgatagtaaaactaatcatggcttttcaacagtttcgcttggaaagaaatcgagctacaagggagaaatgcaaaactggtgagacttttctctatttcgaaccttatagacaaatttggaaatcccaccattgttgccttcatgacacgtccattttctgtcatttttctatgtagagaaccatggaggcgttcttgatcatactctcagtcacccagcttatttacatcgcagcagttcatggcgtgaggagaccttaaggaatcattcatgggcgtcgggtttcttttcttcctattgtggcaatcatccgaaactcgggattgtgtgtgtgagcgtttgtatttgtgtgagtgtgctttattttcttcataggaagcttaagataaattcatgcattctttatgtacaaaaggattagatcttgttttgtgtgttgtcgctttgtgttcatggaataaaatcgaactttgaggcttggttccggtcatccctctatatataatctaacgaactacagaaagatgataatagatagaaaagctaagaatgtatttcaaagaataatctcatgttctaaaatccatttgatgaacaaaagaagattgtatttcaaagaataaaaagaaagtttaccctgttttgcatatttggtcttgctcgtacgttgctaaaagccgcccacattattatctatcgaagatataatgtacagagaagagtatacagaccatgactcctaattttcggttgtctttgagttttgactgtcaagcgcatccacctttatctagctccagctcatctgcagcacaatgcagagaagacacgttaatacaggtttaccataatagacaatgtagttaaaattcacacaagaaaaacctcattgatatttttagaagattttgtgacaacccaaaataaacagcgtcaaggtggctcttagctatcaagactttcatgttctgatgcataattgtgtcttgcacatcattctgttcttcgataatttgatagtgttttaggtagctacgttgattctaaccaatttcggtaaccaagcctctcggagaaaggtttcaaagtggataaactgataaaaactctgaactaaaccgtctacttaacaattcaagattctaactgcaattcaaaatgtttaaataattaagtgaagttcttaattagttcacaaattgtaggccatgtgagttcttagtaatcaggagactcaaccagataaagtacatctaccaaaaatcataaaccaagactaacctgtgtttatctatcagatccagtcatagcatcaaacaaaccgcagcagcttagccatgaagtccttcggacgactggtggaccaggtagcaaaagaggctgcatacatgcagaagattcagccaactgaaaagagacgaaaaacacatgtatgcaaaaaggagaatagagatgctaccttttcctcaggggatactggaacttcagattttcttacgctctctacttttttgcttgtttcaggagcagatcttggaagcataaccaccttactattannnnnnnnnnnnnnnnnnnncggatgatactcttcatctttctcagacttctttttgaccaaatttgagtgtgttgaggtctcaacaagcccactcttttcagaagtcactgttttggagatagaaaccacaggtttaacagaatcaacaactggagtgatttctgtaactgaattaccacaagctacatttttggcggagcgagtacgggtatcagaagaggagttagttgatttttccacaatagcattgccagttgtgggtcctagtccctgagtaacacctgcatctctagatatctctttagaagcacctttaccatgcagaagatagaagagcagatgaatctttagtcccaaattcttgatttccttgagaaccaggagaactcaaactgctatcacttcccctcccatcttggcttccatgttcatcatttcctgagattaaaaaaggaactactaagaacacaaaaagacttgcaacttccaaaaatgataggagaaaacaatccagcatttgatcagagttataaaaaaaagtcttgctaaagtcatgaatgaagcattgttagctcgaaacagatattgagagaagtaatcaaacagatctctctatacaccaaccacgaaaatagttaatttctaggcgagaaactatactaaaatccttcaacaccattcaagacataatctatcgacctaacaaacaaacaaatcctgaaaccaaaatcgaactacgaaatgtaccgttgatacttgttccaatcgcttcctgttgcttcttcttcttcaacgcctttcttttcttcgcaccggacggcatgatcgatcggaaaattcgaattcgtcgccgcaaaatgaaactgtttcttcacttcaaacttcaaattttgtctcttctctctctctctcttttttttttttccagtgtgagttggtgtgtgtgtgtgtggactgcgttttcctttttgtcactatgttgggcaaaaccagaatctcccacagaggaaagagataaggattctcctttttttaattttaattatcactgccttaattaaacttattctttattcaacgacaattca

SEQ ID NO: 30250 - DNA, 3405 bp, Arabidopsis thaliana landsberg
  unsure (1)..(3405): unsure at all n locations
tagtttgagttatataacattaactataattttatgttgttgttgttgttgttattattgttcttcagatcgcaccattgttgtttgtagcttattcaacgatccttcaagtctcacaagtttcgtacatcagtagggacggtctcatgttttcttacattgcagaatcaaacacaagtgtcgctgtttttgccaattcctcgtcgaattcaagtcgtggagactacacttggtacactcaaaccgtggatcagttaactggtcgtcttaacgggaactcaacgaaatctcagtcgttagatgtaacccatacagattggttccaagcagcacagagtaataactacactacagcctttgtaggaacgagcttgggaggagaagataacgagactctaatacagagcgtggttagcttgtacagcaagaaaggtcttgtttctttagggtttccggttaagactttaaccgaagttttgaacagtttgaatctacacggcgaagagctttacatgtggacaaaggacgggacggtgcttgttcgtgaaggttcactgaatgattctttcttcatctccaatggctcgatttgcttcggtagagaatcgaactccctctggtctcaatgcatccctgaaaattgcagttccagtggctacgaggtggagatcaaaagattaagataccaagctttttgctctgttattgaagtttcgggcgttcctctggtaaatactgaaacatatttcactttgatgcagtaaaaatgcatcgacttgttgtttctcagcttcttccaatggttttttttttgccagagatacacactcatgtttcccaacaaaggaggagcaacacgcatcaagcaccaagcggaaaaggcaaaatatcaacttattgtggttatgatatttcttggcttcggttggcctgtatggtttgtgtggtttatgatgcaagcaacaaggagagagatgcatatgcgtgcaacgctgataaaccaaatggaagcgacacaacaagctgagagaaagagcatgaacaagagtcaagcatttgcaaatgctagccacgatattagaggtgcccttgcagggatgaaaggtctgattgatatatgtcgtgatggagttaaacctggctccgacgtagacaccactctcaaccaagtgaatgtttgcgccaaggatttggttggtaagactctgtttctttagctttctcttcttatgcgttttcttcactttctctctaacagaaaattcttcctcatgttgttaaaattacagctctgctcaactctgttttggacatgagcaaaatcgaaagcgggaagatgcagttagtggaagaagatttcaacttgtcgaaacttcttgaagacgtcatcgatttttaccatcccgttgcgatgaagaaaggggttgatgtagttttggatccgcacgatggctcggttttcaaattctcgaatgtacgaggggatagtggcagactgaagcagattctgaacaatcttgttagcaatgctgtcaagttcaccgtcgacgggcacattgcggtaagagcttgggctcagaggccaggttccaatagctctgtggtccttgcatcatatcctaaaggtgtgtccaagtttgtaaagagtatgttctgcaagaataaagaagagtcatcaacctacgagacagaaatatcgaattccataagaaacaatgcaaacacgatggagtttgtgtttgaagtggatgatactggtaaagggatacctatggagatgcgtaagtcggtatttgaaaactatgttcaagtaagagaaacagctcaaggacaccaaggaactggtttagggctcgggattgtgcagtctttggtaagctactaaaacagaacacgttctttctcttcacaagtaaatctagatggttttcatttgtggtctattattataggtaagattaatgggaggggagataagaatcaccgacaaggccatgggagagaaaggaacatgtttccaattcaatgttttattgacaacattagagtctcctccagtgagtgacatgaaagtgagacaggagatggaagcaggaggcgattatgtatccacgccaaacctcgggctgactataaacacttcacttggaggtagcatgaatatacgtaacctgagtcctagattcaacaactgtctcagctcaagtccaaagcaagaaggttctagagtggttcttctattgaaaaatgaagaacgcagaagagttacagagaaatacataaagaatcttgggattaaagttacagtggtggagaaatgggagcatttgagttatgctttggagagactttttggattttcacctcagagttccatgggaagagcagagtgtagtttgtcatgtnnnnnnnnnnnnnnnnnnnnnnnnattggcatggacggtattgattcaagaagccaacttcctaaaaggagaagcatcagtttctctgcagttgtccttttggtgattgatgcaaaaactggaccattttttgagctgtgcgatattgtcaaacagtttcgtagaggcttgccccatggaatatcctgtaaagttgtttggcttaacgaatcgagcactcgtgtaagtgagagaggggacattagttgttcgagacctttgcacggatcgcgtcttatggaagtcttgaagatgttgcctgaatttggaggaactgtgctaaaagaaccacctactgagctgcaaagggaatcattgctgagacattcttttgttgcagagagatcaccaaaacataaagtccaagaagaggggccaagctcaatgtttaacaaaaaattaggtaagaggataatggcatcaacagattcagagagtgagactagggtcaagtcagtgcgtaccggtcgaaagcctattgggaacccagaggacgagcaagagacttccaagccgagtgacgatgaattcttaagaggaaagagagttcttgtggtcgatgataactttatatcacgtaaagttgcaacaggaaagctgaagaagatgggagtctcagaggtcgaacaatgcgacagtgggaaagaagctttgagattagtcactgaagggcttacacaaagagaagaacaaggttcagtagataaacttccgtttgactacatattcatggactgccaagtaagtttaattgattaacaacctttcataacacaaaaacaaatagttgagtcctaataagtattaatgttctgcacagatgccagaaatggatggctatgaagcaactagagagattaggaaagtggagaaaagttatggggtgcgtacaccaattatagctgtatctggtcatgatcctggttcagaggaagcaagagaaaccattcaagctggaatg

SEQ ID NO: 30251 - DNA, 1820 bp, Arabidopsis thaliana landsberg
cccagtagaagagtactcctttacaaaattactggaattgttgtattcattcttatgtaaattttcctctataacaattttagaactgatcctcgtagtcctgtcatgcccacttctgaactctctctggtggtagatatcctcattcacaaaccttccaccgggcggggtacgttcatattcatattcatatttccacgttttctctctgtctactccattcctacgagatctgatataactatgatcatcttttcctgtatcaattttttgccatctgtctgggatgaattcccccttttcaatttcatcactgggatctctccatgatctgaattctctttcttctttacctcctttccagttcttatctgctgaaaaatcccttctctccacataccctttatgatattttagatgactgaactcacccttggtaggttcatctttcttccaactctccccaacaatctcgcccttttcaatctcactcttctgcaatgactttactggagagatttcaccgttctccaaatcctcatgaagctttaacgtacctaattcaccctcttccacttcatccttaaacccagaatctccaccgttttccacttctttactcccactagttcctcctttaaactcactcttcttatcctgctctttaatctgcaactgtgattctgcagggagttgcactacctgggaaggtggctggtctttcgtctgctcatcagcttgtttctgaggctgcttcggtctcctcttaaccactttacgaattaccttaacaattctcttcttcttaactggctgagacgacgctgaaggtttattagctggctgagactccggaaccttggttgcgatagatgtgtgaccattttccgtagtagcagcagtcttgctttcattgcctccacaaagagtcgtcttctccacaattggaagcttttccatgatattcagtagaggcatgcatgcgacacccccatcgctcatggaaacccaatccaatttctctctagcccaaacttccctaactctcccctttcccagggaaatcaatactcatactttgccaccgccaatttggtcacccgccggagtaaattaaacaacctgaaacaccgaaaacacaatcagtgacaaaacaaaatgtagggttttcttcacccgacgaaggagaaaatctcaaaaccctacaagacccaaattgatgaaattagaagagacgaagagacgcgaaaacaaacgaattgaagaagaaattatacccagaggaagaaaacgaaaaggtagagaaacggatcaagaaccctagaatggagctaggagagatatgaatgaaggtaagaagaagggaaaatttatggagaaggaagaggaatagatcgaggtcaaaggaagataaatcgagaagaagaaaaccctagaaagctctctcactaaatctctctctgtatattattattattcccgtttcgccgggaaatatatctgtcgccgtgtatgttgtttctctctgcgaccttggcttcgcttctcttctgtatcgttctctctctctttctccgtttatgttttttttttttgctgaaagaagaagccgtcgtgttaatactttttttttgcttactggaaattattttctcacactttttctgaatttaattaattgagattctgatacctaataaattggaaaaaaattgtattacatgacaaaaggtagaaaatatttatatatttaccttttatgataagatattagatatatacttgtataatgatagtacacttatatattatgataaaaa

SEQ ID NO: 30252 - DNA, 2992 bp, Arabidopsis thaliana landsberg
ctttcttccaccccaacctctgcagaccgcggatcatttcctctgcaccaatatttgtataaattgtaaatctcatgccgatttagaagaatcaatcaaatgtttgggctaattctacaccttccacaatttcatgatactcaagtgtgttctgagggctaggagagctttgtgcggcctccttggctttagcagcttctggagggaaatgggcaccatctgatgaaacaggtggacagtattcaacatcaacaacatgcttgtatccatccagagaccggcgtgaaggctatattaaaacaggggaaaaacatatctatcagatctcactcgtgacagctaaataattttcaaagtttcatttgactggttacaagccacagagagcttcttgcacgaagctacttgagataaatgaattgccgaaagtatttttggtgattctctacagacaattgtttcatttcttagactctttacctctatgaaactttccctctatgattactcataattccaaaattcaggataagttagctaccgttagcatttcacagcaagctaactatcaatatcgatgaccccatcatctagctagtgtgtgctacacgtttcagagtcgaaatcaacttacataatagaaggaacatgaaaacaagtggggtaatattaaatagaaaggttccattgcttcatatagcatgaaacgtaccttgataagttcagtttctctcctaatggaagatgtacgccaaccaaccatgtctacttgatgtcaaaggaaacagttcagaaaacaaatgcagacacagctaggcacatctgtactagttaaacagcaacagaaatgcacaggatacggtcataagaaacgtttgcatatataatgcgacttcgaaatgcccccagcgccgatctgccagacaatgaaatgcattaggattacagataagtcattaaggggtcgaatgatttaaattggtaagagcattactcacaagaatttcagatcttcaccatcagatgccatcctcaaaagaagaggtggtttatcagctttaccatcagtgaggaacaactgactaccagtccgaccaacaaagaatggagctattggtgcagcaagtttctcaagaataggaactcccaacagaaaaggcagctgatacaaggggttccagaaaaagaggagagaatgagatagaatttacagggattatcaattaatattcatcactcatcagtctagacacttaggggaccaaatagcaaaaaacgcaagacagttttgatgaaacttatgatatctgtctgaacacaaggagaaggtagatgaaatttacatgtgaaaaacgactaactactttcttaattacgcatacaccacatctacgtacaggtactgcgagatatatatgaaactctttgattccaaaattccaattatgataagtagagaagaagagaacctgctttctgcctctcactcctagatgaggtgttgccaaagtgatgaaattaatcggttctagccccgcaatcctacctcgcagaagatttgaattgccagattgagagacagcaacatcacttacttgtgccattgctgctgagtaaagaacagcaacagcatgtctggaaaataagccaccgagggagtgggctaaaaacgaaatcttctttaagctcttgctcttttggacaacttgtctaacctattcctctctcacatccagaatgggaacagaaatcagctcatgtactgaagttaagggctagaaaaccaagacctacctatacacgaggtgcaaatgaagatattaaaactcacctcttctgctagtcgttttccagctccatcgatcccgccaaatgttttagtgaaggtattggaagaacttgctgtgaatgttcaggagaaacagagtaaattaaaacacatcacgtgtgatccattccacgcatagcataaaagcacatgagtattataataaaatacaaaactaaagaagagttgtggttccagacgaaaagatcttaaatttttcaagaaaatgtatatttcgcctcttgccgctaaagattatataagaccttgaagtgttttcaattttgtgcccagcacatgcattcaacttacgttaccatttcattcccaaaaattctcttctattatacatacaatccaacaactactcaactaaactaatagatgataacaatttagaacaagatgagcataccataaatcaagaatcttcttccaaggcgtcttttcagctcagcttctacgtagagccagtcgctgggactgcaagtaattgtgtcttagtaaatttggagtctataaattattcaatctgaaaacaaagtagcagaaatgatagacataactttctttcttttttttgacaatcatagacataactttcaaattcaaatacttgcaagtttctatccaacctaaaacaaaaccatgagggtttcccaagatgcaaacccagtaccattcaattgatgaactacttagaaataatacctggccaaaataccatgtacaagaacaagaagatgatcaggttcatttttgtcatcggagtcgcctttcgatagcgaaaatttccgttgggctgtggaactcattgcctgaaccctgcgtccctgttggttccagcttctgtttgacccttcttaaagaaaaatcaaacaaatgaacccgcggaaaaagctataaagaacagagccaattcttaaccaaacaaatcatactatcaccatttctacttagcttctcacaatcatttaacatgttcaagcttattttcgatcgcagaaacagggaaaaatctgtttaaatagacaccgaaattgtgagctctaaatcaaaagaaaaacagagccgattcttgaccaaacaaaccatactatcactaattctacttggcatatcacaatcatctaacatcttaaaatcttctatctcttgcagaaa

SEQ ID NO: 30253 - DNA, 1541 bp, Arabidopsis thaliana landsberg
gtaacttaacctaacttttggtttacttttttcacttttaatacactataagcctttgtgattgcttaggaaatgaaaacaaagtaatcaagaaacagaggaagttgctctatcacatctccaaggaacaaaggttgagaaaaaaaaaagtgccaatttttattactcttctacaattctcttacgagtcttacataatccgaaaaactcttagatatgttcgagaaaccgaggattagaaacatctccacttgcatgaggagtcactgattaagattttctagtgaaagaaacttgtttggggtaagatggttaccggaaaattcaccggaaaggctgaactgtaataacttcatagtaaaaacaaaaagtaaatatgtaaaaaaaacaacaacacatgtttcgtcatactaagcatcaccagttataacaaaaataatcattcttccattttaagcaaagttagtgctagtcgcgctacacttcgagtctggtctaaaagtggagcgtgattagcactactctaaagacaaaacaactaaagagataaataaaaggagaaaccagaaaaatacggttggattagtttagatttcggtttgacttttgagatccctcgattacatacaacaacaaaaaaaacgcggttggatcattaataaattcagttccaccaggtcttcttcttgcgtctggtattggcagcggtagcggttgtagcggcaaaagcgttttcatggaggaaatcaagaagaacggtgcttttgcatttaggacatttagggtcatcatcagaaagcataacgtacataaggcaacgagggcaacccacaagaaccattgaggttattgtctcgttctcctcctggttagtttcagatgaaacgcatgagcttggtgaagtcgtgttggatcggtttggtgatcgaacaagactcatctggctggcttgagaaggaggcggcgaaagattcagcctcagctcgagcttagggccgttcttgttcctccgactcatctctctctctctctttctctctatgtgggattgagaaagaggttttggttttattgagaaagtcgtcttcttgttggttatgcttatgccattttataaaacaaacataaagttggttagagggagagagagagagatatattcattaaggcctaatttaattatgataggtgaaaatatataaataatactccaacgataatagctagagagactagctagtctttaactgcgaacaattatagtaactttttacttttgaacatcgcaaatactactaagattcaaataataaaattcgaatgaaagcaaaccatatggtaaaaaagaaaaaaaatctcaagtccgagaaattatttttaatatcctcgacaaattttaactgaaagtaacagtacttttaagtctttaattgctctgttagtctgttgacaaaagaagaaaagaaaagaaaacgtctttaattgttctagacaatcttcattgacacggaactagtcgagcaatatacgtgctagatttg

SEQ ID NO: 30254 - DNA, 3427 bp, Arabidopsis thaliana landsberg
cacatgtgcatccgaattcgtgaggcaacaatccgttttaaatgactgttttttacatacgataaaaccagtcattagtcatacactaaatgttgtaactaagatataatcaagcagctatatgggattatggtttcattatctttcaaactaatgactaaccttggaaatatgacctttatagacttggagtagctctcctgtggtcctgtagttttaaagatattcataagaattaagacaaatctgcaaagggaaatttagtttagttagaagatacaatttggtttagtttcttttacctgtcaagtagacgcagagtagaatccaagcaaccagctaaaacgcagtttccatcatttgatatcgatatacagttaaccggttggcctaggttatctgacatctccctgatttcaattaaaacagaaattcccaatcaatcccagaagaaagaaacattaccaaattttatctcttgtaatgagttacacatacctaccgatacgcatgtcaaatgtgcgaactgttccatcgacactaccaccaataatctcagtctttgttaaaacaacagacatgactgtatccaaaaatgtatcaatgatctggaaaacaaaaaaatcaaagaacaaaaaatccactttgatttagttcttaacttattacatattcccaggattttgaaacagcaaaacatgaaaggagtaaaacctgtactggctcaacactgtgagatctgcagtcccatacacgtagcgaacgatcgaacccagctgatacaaccacagacgacgaatcattgaacttcactgcattgacctggtaagatcattgtcattaaaaaacaagagatcatcaatatacctaaggaaactaaaccctaagcaatccagattcctcgtttttgagacatttacctctccatcatgaccacggaatttacggattacacgtccagttgaaacatcccagtagtaaacttgccgatcaccaccacatgagcaaaattaggcattgtctctgtgatacaaaaatcattgaaacatgaataaacaaaaaaacacattcatcatatcagcctccaccacagaaaactgcaattagcttgacattaatgtaacacaaactcctaaaatttgaaatctcgtgtctaattcgatcgtttatagctgcaagcaagcaacaaaaatcattgaaacaacaaaaagctcgggaatgtgagattcgttctcttatgtactcaatttaagctgaaagcaacaacaatcaacacacagaaccagaatccaataaatttggactatctaaacttaaacttaaactgcacaaattgaatcaaaatcacgaatagttcaaaagaaaaaacatgagatgagaaagagctgatttcatacgaagtaacatgaacgtcgcggacttcgcggccatgagatttgtaggtcttgattaagattccacggtgcgggttccagaggcggatagttcgatccttgccacaggtgagagcgtagtttccgtcaccgttaaacctcgccgctaaaaccgccccctcgtggcctttaagtatgtgtgcctccttcgtcggcagctccgtcgcgctcatctctctcgcctgaaacttacaatcacgtttccatagaacgggcttatactaaactaaacataataattaatttattttaatgggtttccataaagcccaatttagttggcccaatagcttgcaaaactgggcgtaatggataatttaataaagacacggtaaatgcttagatagaggattagagggtaattaaattaaccacgatcactgtgataattactacaaacattaaacgacaaaaaaaacttttcgtctccctcataatcttctactatatattcgtcacatcacactcataatctcttacaaaaaatccataacacaaaaagaagcaatggctactaaatctacttcgaagcctcttctgctctcatttctaatgatgtcatatctcatatcgacctttcatgtcatcactgtcgccgagggaaggactctccagttcacgaagatggctacggatcattccggcgccggaaacttgatggactgttggaacgcggggttggagcttaagtcatgcaccgatgagattgtcaagtttttccttagtcaaaccggtacgagtgaaccgccggttaaaggtggaattgacaaagattgttgtggagccattgggttggttgtgaaagattgttggtccgttatgtttacttctttagggcttacgactatggaagggaataatttgagagagtattgtgagtttcaagctgagaagtcggaattatctccttctccggcgccggaaactttggctttgtctccggttgagataacgtatcccggacttgattattgatagcttcccctttatatttgaagttaataaaagttaccagtgaactatgtttcctttttatgtgtaacattttctgatttctctttgttaaatttgattaatcacggtctaaatcgatttaaaatcgttttggtcaattaccacggtttttacatagaaccaatcaccaaaccgaagctccaccaaaaaataatataataaaccggaatctttagcctaccgttgtttgtttcccggttaaattaaacatcttcaatcttgaatcctagagtcacctggtggtttcttcctcaagctcatcaatattccctcaacaagcttatcttcaccaaaagtctttgcaggcttcctatcagtgtcccaagaacccagaatttgaagtaaatcactctctgtttcatcttctttcttcttcctttccccaccgctctgttttgaagaagctttttcctccatctctgagtcataatcttctccctctgaaacagatgactcattctcatgaatctttttggaaactggaccgagatcttcgaatgatgaatcagattcacatggaaccggggttgacgaagtaacaatgtgtcctgattcaatcctagcctcgggcatcatttgtatcagagactgcagtttcgaaaaaccgaatttacgatattctaaacggtatccaaatttctccaaaaaggctttcttgaatttagttatgctataacctccagcgttttcctctgttatcttctttatcagcttatgacaatccgcaattaccttgcttctcgatctttctttaggtttctggctcataccaacgttggtggaatttttatcaccatttgctccgtcacacagcgattctgacatattcacaaatatcgctctcaatccatccgtggtgcgagggttgctacgacaagagctttcctcagtgaaccgagttactctaaaaggtagagcatccgaaggattctcttggatccatttcttctctgatattaacatagatattaatcggagct

SEQ ID NO: 30255 - DNA, 2961 bp, Arabidopsis thaliana landsberg
tctgtactctacttgcgacttttgatatctttcaaaatcttaagtagaaccagtgagcggttaaacatttagttgtttctagatgagggtctcaaagtataacacatgctcgtatttctgagtacaaaagtatctttacatgttactagctcttttacatgttgatggatttgacttttctatctgattagtcttttgaggtgtattgtctcctagtcattgttcatgttatgcacaaagagtggcgtttttcatgtaatcatttccttgtgataatcatggtttgctaattttacctttgtttctaaggcttatggagactcaactaaagaaagaaaacgggcacagattgctcaaggttggccatttcttctttattttctacaataacaattttcttcagttattgtatgattaattacctgaaggaaccaagtgatgttctggaatactctctctattgcatgcttaaatattattatgacatgaaaagaagttatgacgagaacttatttcctgtttaatggttatagagtttttgttttctcttgctcagtatgtactcaaggttcactaattgtttgttctcctactcgatcagctgtggctgccgaggttaccgtggtaccaccttcacggttaatggctttgataggtcaggctttaaagtggcaacaacatcaaggtgattatctaaggaactgtggatgctaccaaacagttctgtcaaacttcatctcgttttcttttacttttttgcctacattactaatatatcaatggaatcaacatatgtaccctctctcatttcctaaaatttacatacacttgtgtcaggcctgctccctacaggaacacagtttgacctctttcgtgggacggcagctatgaagcaagatgtagaagacacacatcctaatgttcttactcataccataaaggttcatattcacactttaatagcttctttagcttagtggtctatgatctgttgctcatgattattttgggttttctcatcagttgagttcttgtctaattttcatatctttttccttgtgctggtgctggtgcagtttggtaaaaagagtcatgcagaatgcgctagattctcaccagatggacagtttcttgcatcttcttctgtggatggttttatcgaggtgagttgatccggaatctgtatgtatgataatacaagttattagtctttaaaataattctgtgactaggattgctcagacttgaaaagcattacaggtatgggattacataagtggaaagctcaagaaggatttgcaatatcaagctgatgtaagctctcatgtcttcttttcattttttaattctaactcagtacggggtcagatgagctgttagtacattttaatcaaatgaaaataatccttactgcatctgattattgaacgtgtgacaagtctgtgagaatgatatggtggattactttttgctttttattccaaaaatgtcgcccatgagattcctgaagcaccaagtatatggtggattactgttatctttgaattttaattttttctccaatgtaactcctaaagcaccaagtatctcgtctgagacttcctggtatacaaaatatcagttttggataaagagttcccattccatcctctttacttactatgattaatttctgacaggaatctttcatgatgcatgatgatcctgtcctctgcatagactttagcagagattcagagatgcttgcatctgggtcacaagatggaaagattaaagtaagttccagctgcatatgtttccttaaagttgaattttttgtctgaagatagactattgcggcagtttggtagatatatcttcttcctctcattggtcccatatgtattctgattgaatacaaatagaaaaactagacttagatgcatgtcacttttgcagatctggcgtataaggactggtgtatgcatacgtcgttttgatgcacattcccaaggagttacaagtctttccttctctcgggatggaagccaattactgagtacctcctttgaccaaactgcaaggttttattagttatatctttttttttattttgtacttgcgatatgaatctcgtcctatcaaaaacttgaggctttatatttctttgatggtagaatattcttttaacttttgattgcatcttttttcttcttgtttttgttaatattttccttttcatttggtagttatgtaagtttattggtagagcttctagtcgaatataatatcaaattcttattatatattttgctttattttatgcagaatccatggtttgaaatctgggaaattgttgaaagaatttcgtggtcacacatcttatgtaaatcatgccatctttacaagtgatggaagccgtattatcactgcctccagtgattgtacagtaaaggtaaattcttcggctttggctgtcagcagtatcattgtttctcatttggactctctgccccttctgccgtgtaataacagtcttgtttccttgcacaggtctgggattctaagacgacagattgtctacaaacattcaagccgccacccccgttaagggtatcttttcttatacagatttatgtacatcttgtaatactttttctgatcttctgtggcaaactctttggttaccaagtctgaattttgaaatatagggaactgatgcatcagtcaactctattcacttgttccccaaaaacacagaacacattgttgtgtgcaacaagacatcatctatatacattatgacactccaaggtcaggtaaattttccagcaacggtctcctgcaaatcagtgtcattgtcatgccaaaactaagattgttcacatgcttctaaattggaatccttttgcaggttgtaaagagtttctcatccggtaatagggaaggaggagattttgagcagcatgtgtatctgcaaaa

SEQ ID NO: 30256 - DNA, 2561 bp, Arabidopsis thaliana landsberg
caaatacgtaaatagttatgtgagtacaacatagatcattctcagttatattttaaaaagagttgtaattatagggtggagcaaaatttcatataaaaattagtcttaaaatatatatttaagatctatgattattaatttataatattattgggactataattttacatagggatttcaaaaaaattattatcttattatcttatcgattttggttaatttttacattgacccgacttgggaccggcaaaatttattaatttatcgtatttattaatttatcgagtattaatttatagagtttctactgtatagtgagttttaagaaataacttgctaaatgaaataatatcactcttgttggaatttaataatctataatattaataattaactaatctaaaaaaaactataatctatacaaaaactataatctataatatgtgctcaagctattaatataacacgtactttacaaaataacagagaacattagtcttgaaatagaaagagtagttcaaagtgtgtatactaaacaagcaagcatgtgagcaacatttaaagtttacaaagtctgtctaataccaaacagattaaccagaaaatcaaagctgtgttgttagtttatcgtcaaagcccaaaaagcaaagagtagtaaactgattattttacatatgattcaacaccaaaaagaagaagaagaaacaatatatctcaaagtcgaaacaacttatagaacaagaccggtttgtattgagcaaaggcttgtccgatccccagtccaaacaacactccgggtccatagcctatcgcagctgctttccagttcaacgcatgttcttgctttggtagttcttgctcttgtgtctgtggtgttgatggtactccatttccctttaaacaactctcttgaagaggaagaccacaaagattgatattcccttcaaaggaggatttaggttgccctccaatctgtgtactctgtggtatttggccggtgagtctgttatgtgacatgttaacatatcccaaaaacgtcagctctcttagctcttgaggtatatttccagagattcggttttgagatagatccaatgactcgagttgtttaagtttggccaacgacgatggaatacgaccagtgaaagagttgttagataagtccagaacaatcaacgatttcaaatcacctattgattctggaatctgtccttcaaaactatttcctgagaaatctatcgatgtgtatgtatctggaatctttcccaactctatgcttcgtccttttattctcaaatgaatggaaggataagaccaaagcggggtctcatatttagagtgttcatctcctgtgtactctggccaacgatatccttgtggggtattaaccaaaggtgcactccaattcgcaaagtaatcttgtggtaggctcccgttgaagctgttacgggagatatcaattatccgcagtgccgtaaatgaaagagagatctcaggagaagaaatgggaccatggaatctgtttgatctcagaacaatgatttcaagacgcgtcaaagccttcagccagaaagggaaagtgtcgttgatgtggtttccttccacatttagaaactttagggttgtgcagtttactagagaccttggaagcttcccacttatttggttgtggccaacgtcaagtagtactaaacgatcttctatgtccggaagtctcccagtgaggctgttgttactgagtttcaacgcttctagtccgagtgatacatttgtcaagcatctcggaattgacccactgaagttgttgtttgctagatcaaggagactcagtcgatatcttttgcagaatataagtggtatgcctccagtgaaatagttattcgatgcagccatgatgttgacataaggtggaataataggaaaagatcctttgaaggcatttgaactcaaatctaactccgaaatcgacgaattgaggattatttttgacgtaccttccaaggaatcaaaggagttgcgtgagagatttacatggagcatagaaggcagagtccataacaactcagacacttttcctttaattctattattggaaatgtctaaccaccataatctttgtaagtccttaataaacatcgggaactcggtgatgttgcagctcgacaagtctagatgtgtcaaattttccgaaccggtaccaaccacagacacactgtttccggaaagatccaaacgcactagagacttgaagagcaagaaatcaaagttgaatgtgtagggtgtcttctgaaaagataagtcaatttgtatgaggttggctaattttgagataggttctaggattcgatgactcataaggttataggccatgtctaaaattaaaagtttagaggttgcagaataatttatattttcaagagggtcactaagatggttttggcgtacgttaacagaaactaggaaaggcctggtgaagaggtactattgcatgacttcataacacctagtatctgacccccctatacccgttcaaaccggtctccctttcgcccgatcccccc

SEQ ID NO: 30257 - DNA, 1222 bp, Arabidopsis thaliana landsberg
aacaccaaatgtcctctcacctgagacgatcaaaaacttatttcatcatctaaagacagtacttcctgccatatatatcaatcataggtaacaaaatagtaaacgaacctgttggatcgacatcttttgcgagcttaattgcatctgatgtggcaatgtcttggttggcaggagatatagccaatatgatacaattgggctgcaaacaaacagaaattaagctattggaactactaaaaaagttaaccatctgcaactagaacttgagcatatagtttaaaagtcgtataaggtttttgcattttttttaaaaaatgaaagatctagcaattctcaccttatcaacatatgtgcgaaccatggattcgatatcctcagcaatggtttccggctgtccctctggaaatcagaggcagtatcaataactacatatacggtcatcaaataataaagaaatggaaacccaaagaagaggtcaaaagaaacataccaacagccactttagttaaaccgggcaaatcaatgagtgtcaaattcacaactgtttccataaaaaagagcaaacatcaatgttaaatcaacaaacaagaatgttacaggaatcagactgagattattaaatgataccatttggagagtagatactgaggtgaataggaactggagatatctgtccgcttttccctgtgattctatcagtctcatcctgaatctccctgcgaaccaaagctgaaacatcgaagaattttcatgcaaaaattcaatgaacactctcaacttaaacacacttgtagcacaacaaacatacattgatatacataacattgatagacataattgttaaggcacataccaatatctgtgatttgctccttgcgaagatgaaggaactctgcatactcctctgttccatcatcagtctttttaagcttcaacactaaaggccgtctcgtaaggataccggcacaaacaatacttgttcctcaaaaccaaagctcctccttgctttatatacaaacataagagaaaagggaaaattttcacaaaccacatcctgtaggaagaaaatctctcccaactatactctcaagaaccgaagatttcccagaactctgcacaaacccaaaaaaaaagtaagttgaagagtcaccagagagaaaacctaggaagaagtcaaagatatttcaaccggagaaatcacctgaccaccgacgacggggac

SEQ ID NO: 30258 - DNA, 1272 bp, Arabidopsis thaliana landsberg
tccatatatacgttacgtacccccaattaataataatgatgtacgtttcatcttaagaataatatattattataattaaaaaaattgctttgaatcagaataaacaagagagcttatgtcttcccaacttatagtgctttgatctgccgaagtacttgtggaggctcctgagaacaagtttacggtttcggcctggaaattcccgaaccactgattatcattacttgtgttaagcaatggagagtttgtgttggcgctcaagatagagttcatggagaaaccctctcctgatcctaagtggttatgattaggatctaacaagagttgagagaaagagagatgatcaaaagcgtttgtcattgaatcttgatgatgatgagggtttgttttctccagttcttgatcttcgatcttgaccatgttcttgatgagcactggcttaacatcttcttggtcgcaaaacgagttggtttgattcatgaaaagagctggaacttgaacattatgatgatgtagtggccatgtgaacattgtttggtcttgtctcatcataaaagaagtttggatttgttgttgttgttgttgccttttcatcatcaccatctcttgcttcattcgcgcttcttggaactctttcctttgtttgttcagaagcttcttcttcagcctcgtgttccaatagtttttgatatcgttgtcggttcttcccggcaattgtgcagcaattatagaccacctagaattaaacaaagatacatagtgagtctctaagtcaagaataagtgtgtcaattaataatattcatccatgcatatgatgatatatatgtaagtatatagtacctgctaccaatagtaacatagaggttacaaatgatgttgtcttcttcctcggagaagccaccatgtttgatgtttggtctcaaatagttgagccaccttagcctgcaactcttcccacatctccttaaacctataccatgtaaataaatatcatcaacacacaaatttaacacgaccacggtctcaaagtactatttggaaactctcagtgccaattttaaatcaaaagtgagttttaagtaatacataccaattttctgaggcaaagcaatccagttgcctcctgtgccactattctcgatgtaatctttgagtttggcgtcttcctcaggagaccaaggccctttcttcacgttggccttatcacaacacggtgctcttcccattttcttgattcttgattcttgatcttgttcttattaattgtaat

SEQ ID NO: 30259 - DNA, 2695 bp, Arabidopsis thaliana landsberg
ctatgaagctggttaataagttgatattatagtaatttgggttgactcaacaattatcactgttgaattttagaagatacaatgtgttttcatcaaatctcatcgaatgttgtttatatttcatatctcatatagtcgagtaagtaacatatatattttcctctataaaattatttacaacattaaaactaattagcttacctcatcagagcttccaaggcaagatttatcaaccattttcatgtaagacttagcagcatccctcgaagttatctgatagaatacattttcacttatgaaaaccaaccttatacaaaagacaatgaaataaaaatatatattctctaaccatctaaccttatcatacttcgtcaatatcttcgaaagcgccaacacattcaagaagctgcatataattttgataattcaaaactcaaatccaaaagaaaaaattattcagtttatctcaagtcggaggataaaaaggatacgcacctatagctcttgagataccaaagcttcctatggaactcaacaaagacgcatattagcttttcctcgattttccttagattatctctgctgaatttgagctctgtatggttcgatactttgagaacgcttttagtgttggactgaagagcttcctttgtgttgttgatcttgatgctatctaaaacctcgataaaagccgagcttgaagatttcatcttgctcaagttattggctggtgtgaagaatacatcattgtgatcttcttcgtctgtgtaatagtcatcttcatcggatcttctaccagctctactggaacctccttcctctatggcctccatatgaactttcactacaattaacaccagaagacaaaaaaggtcaattttaaaatttggcgagtttgatatatattgttactgttcatttgaatataactataaaaaaatatggctttactatgtgtgtttaatcagcttttgatagaggtggacaagctagaacttggaaataaaacttttagtatcaattcgttttcatttatattttgtgatgttacaagaattattttcttctcgtcctggaggattcatattctaacttttagatcgtttatcacttcagctgatattgtgagcttcattgcttcaatggactaaatattaaaatttgatatttttctgtttttctaatagagagttttacacctaaaatttgattttgcttccatgtttttcatctttttttgccaagtgacaaaattcataggttattcaatcatgtaaagtctaaacaatttcaatttcaatgaatatttacattattcgcaaaaaaacattttttgtcaaatatttgtctcgaatttcaaacacaaatgaatacatgaaaatcataaaaagtgatatctttaggagattttgatgatatctttattattattatcatatgttatttcagggcttttagattatcaaattttcgctttatttctatcaaatatttgatataattttttggtaaaaggttaaaatatttcatatttcgcttactagatggatttttggcgagctccgccggagaaaccacgccatgcaaggcaaagcgagccatctccactgtactctcttccttcatctttaaccgaaatgcgatcaaagcatccatctgtttgttaagcaccgccacttctttcaccacctcatccactttctctctatagaatttctccaccttgttgaattcatcgtctagtcgccggaaaaacaccaattcatactctcctcctttctcagccgtcatcagaaacgttgtctcgtaccgttgactcgccgtagaactcacctgaataggcgccgtcgttattccatcctcaatctcgaccaccgtcgacgaaaggcttatctgaccgccgtgaagattggttttgcgtttgaagcggttgatgtctttgacaagggttttgagatacttgtaatccacgtaagcttgttgccactctgacaccatctctgatgaaaaatcttttccaaatttcatttttgtttctctgtttttaatttatttaaaatagataagagttgtttgtgaacattcgtcagtgtgtgatatacatatttatagattgtgtcaaaatgttgaattgaccagacatactgaaactcttttagtgctaagtcaatgactatatcaagatgattcaagtccaatttgcgaataattgttttaccaaaatcaaactaaaacgtggtttggttccgtaacgatggaagttatgtctaagtacgatgtattcacaacaaactattatacaatgacattttgaaagacttgaatcgaaaatttgaagcactctatagagtataaagtataaaccattctgagcaaaaccagttgataaacactttattaattatatttttggtgttttaggtacttttacgaagtattgttattaggtttgtgtacctttagaaagtgctattaggtttactacttttaaaagagtttatcatctgaaagacaatgttttcactgttttaagtatattatgaagtgttattaggcacttttaaaaagtgtgattaggtttagcaagttttataaggtgttttaaaatttgatttcgtccacaaaatattgtaacaaataatatttcatattaaagaatacactaccatattaaatgttaatataaaaaaaaaga

SEQ ID NO: 30260 - DNA, 3462 bp, Arabidopsis thaliana landsberg
atttttttttacaaaagtctaccactaattatcgatcaataataataatataagataaaatatttcctttacatattttatgaaaataaattgctatatattactctacttactttcacaaattgctatattttgtttagatatacacattttgtattgttcatttcattgtaaagtatattttgtggtgaggaaaaagagcaaaccattttccgacaccaattaaacgatcatagtcagaaacattgatgaaaattcagatgttgtacttcaacataatgtttcatttttaaaacgtgtttatacattttgggtaagtttaaaacacaaatacatgatcttactcgtgcatttaattacagtaattttgtaattataacatttgtgaaataccttaaacacgagtgcctagtgtaaagcgcgtgagtaacgtgtctaagcttcaataagaaattgatgacgtggaaatacaattaataaaaaaataacaaaattaagtaagccgggcaacgggtagtagtagctaacgtcgtctaattgacggcgtttaccatcgcgcaggttttttttgaatacatcaaattatatccgaacctaaggttcagacttagcttcggttgaccaaaagtttcttcattttcttcctttctctctcctacccggaaaaaaatagaaagttgcagagagagagagagagaccttagctgtatagagagagaaagggattgggtgttgtgcactgagttcgatagagaagaagaagaagaagaagatgagtcagatcgcgagacgacggaggaaaggtcgtccgtcgaaggcagatctggcggcgcggcgtagtagttcatctccgcgtgaatctggttatgagctccggcgaggtcaaaggcagcgaaatgtgaggtataacttcgatttcgacgattacttcgacgaggaggaagaggatgaggttgaagaggagaagaagagacagaagaagctgaaacaagttcttaagctgaaccagagccgtgctagagctgaccctcctgttaagagtcgagcgcgtgtgagacacgcgtctgattatgaagaagaagacgaagaagatgatgaagcagaggaggaggaggaagaagtaagtgagaagaggcaagtcaagaagaggaaacttaaccgtcaagacgaagaagaggaagaggaagaagagaaggattacgatgtggaagaggaggaagaagaagaagaaggtcacgctgattctgaggaagaggatgataaggtactgtacggaaaccctagaaactgatgaactttatcagtgtctctgtctctctgtgtgtgtggttctttggtggcaatgagagtgtggggaatttggcagataatataaactgtcggggtcaactgtcaaaaaaactaacttatgttgtctctctctctcactcactcactctctctcttcccacagaatctgatcacacttcccacctttctctctccattaccattaccctcatctttatttactctttctctctctctctctaatgtgtgttgttgttgtctcacactatctctgtcaatcacttctgtcttttgtttgtttggcattggcttttgattcagttacatctttgaggttactgattttgattcagttacatttttgaggtttctgatatgagttctcttgtgaatttgtcaggaaaggaagaggaggagcgcttctggtatgttgcattttctgtgttactttgtgtttagagctttgattatcatgactaatctcatctctcagtctgctttggttgtcgttcttgttgtattagggaatcagtgtgatcattcttcagaaacaacacctatccttgacaagaagtctttggagttgattcttgacaaacttcaaaagtacacaactgaaattccttttctttctctcttttgtgtgattgcgtgatcacattgtttagcttatcttacttggagtctttgttttgcaaacaggaaagacatctatggtgtgtatgcagaacctgttgatcctgaagaggtaatggtggatttcctggagttatctctgaccaatctgttccgaaattagagttttaagctgttttatttgatttttctttgggattgtatttgcagcttcctgattatcatgatatgatagagcatcccatggatttttccacagtgaggaagaagcttgcgaatggatcatattctacgttggaagagctcgaggtgggtgataagtttgttactcaagtttacatggagagcttttacatgatgaactgattttgtagcttttcaggatatggcttctctgtagaataatgggttgtgataatagaactgctctagtgtatttgctaggatcatgtataatctataccgttgcttgacttcctttactaacctggttttggaactgtatttcttgaatgcagagcgatgtcttattgatttgctcaaatgcaatgcaatacaattcctcagacactgtctactataaacaggtaaatcatgtttttatattctcaccaattttctttctttgctaattagggtttacttttctgtctgccggtattttaaactccttttttttcctattaggcaaggactattcaggaaatgggaaagcggaagttcgagaaggcaaggcttaagattaaacgagctgaaaaagagcttaaaacagatgaaaaggtgaaacctgacagctctgtgaagaagcaagtgagacagccattcagtcgaaatggtctagaggccgttggttctgatttctcatctggggcgaaccttgctagtggaggagcttctcaaaacgagccggtttcaactcaaatcggcggacatgaaaagcacagctacacggatgtgctttttgagggcaacacatcattagtagacagtctggagaaagcagaagacttatcatctggtatgagggaaacacatacttcaattagttgtagatgctaagagtaatggctatttttttccacctcttctctttttctgatatatttccatattgtttcacttttcctagggaagggtctctttggtaagtgtgggaggaagctgtcggctgttgaggaagaccgccgtgcaacatatgaagattctgatcagcagggcgatagatcggagtccatattcacaacatttgagagtgaaatcacgcaggttgttgctgtaagggataattattatgcccaaagtttcattgtcattctatgattgcgcttaaccttcttgactaaatatttttcccgtatcatcaggcagggcttcatgcacaacatgcgtatggtaggagccttgcacgttgtgctgcagctcttggacccgttgcatggaaaatagcttgtcagcgaatcgagcaagcctacctgcagactttaagtttggccggggatgggttggagaatacgagccgctttctacaccagtact

SEQ ID NO: 30261 - DNA, 3836 bp, Arabidopsis thaliana landsberg
  unsure (1)..(3836): unsure at all n locations
agagcgaactagaagtatgtttgcgtggatctaattgttttgttagcatgtttggatctagtattgtctttaatcaaatgtattctctttgctgatagaaactctttttttttttgttgtataaaggatgatgctgttgtctaccttgtggatgctcatgacaaagaaagatttgcagagtcaaaaagagagcttgatgctcttctctcggatgaagcccttgcaactgtcccgtttctgattcttgggaacaagattgatatcccttatgcagcttctgaagacgaactgaggtatcacttgggtctcactaacttcaccaccggtaagggcaaagtgacgctcggagactctggtgttcgcccacttgaggtcttcatgtgcagcattgaccgtaaaatgggttatggcgagggattcaaatggctctctcagtacatcaactgaagacagacgtcaagtcttttatcatattttcaaaccaaacccaagaagattttccgtacaatttgtctatttcgagctaaaagatttgtgattgacgatgtcacatccttcccttagaagacttgagaacacttttttctcatatttgttctttttgttgttttctgtgtggaacataagtttggtggcttgcatttccaaacttattcatttctcttgtccacatttttgtcaactgcttatgtttcattgaacattattcccaagttagaccaccaacttttttgaacatattctcactttatattaacgtgtgccctacataaacccaaattcaaatcgattcaacaatcaatctctctctgcttatttctctccctaagccatgaatgttccaaaggtgtcaagactttggctactctatgcagtgttgctctttgatagtcagagacattcaggtgcactttggttttccaagtcttagattctctttgttcaaacactcattaagtttatttggtttgagattgttgatgcagtannnnnnnnnnnnnnnnnnnnnnnnnggggcgcggggattttggttcagagagccgcgttctgttttaacaataatctggttagtatgatcgatgtcgaaaccccttaagtaaaaggaaaacactttttgacaatagtttcttttcttgattttttgcagctctacagaggatgtaatgaggcgttcagactaaaccaacaaggtgaattcaaggttccacctgaggaaacagacagattctgcaacggtccttgttctgcagaaacagaacttgtgcttacatgcattaatagtgtcatgtctgatttcgtgttttacaatcgtgctaccccgagagatgtaaggaacgccctccgtggtggctgcagctcctctttcacacgaggtttgtaaccatgaaataccccctaacttttcatctttacacataaccatgaaacataaacttgacttgagtttgaatatacaggaaacttcaatgtgggagactatgctcaaggactctatttcggcaaggcagggaaaaagctgcctggactgttcattgtactagttctcgggtttgtaccactgatcctgtgaagatactttcacaaatcatacaagattatgtaaatgagattccccctcattaagatttctttttttgttactctgaaacaaatatttctttttcatcttttcaacgcaaatccctacataaatcctaaatattttagagtttgagcaaatatttacactagctccatttgttccaattgtctgatggcttgttaaatgtcgaggctgatgtttgcgtgggattgctcttaggcgtcttcttcttcaacttctttgggctctccatgtgagagacctgcacaaatactctcatgttagattccaagttcacttctaacattcagaccaaaggccactcaaatcacatatcaccccaaaaatggtccactggttaagatattgtcaaactcatatttctaagtacgctttgaagcctaaagatttatcgtcttgaattatcagatgaaagataagggcttttataagaggtacttacaatgtgagatttccactgggttgtctctgaactactgtcatgtggaggatgatcgcgaacatggcgaaatatgtgaatcaacactgcagcatcaagagcagcatactcaagctgcacaattcagttaaatatcagattcaacaattacgttctccaacagtttttttctcgaggttctaggtaaacagataatgaatacgattatatacctgattctggctcaaaggcctttgttcccagtcgctattgcgtcttgttttgttcaaagacactcccaatattttctgatacagaacaaagagatcgaacaagaaatgatgttaagatattcctatcgaaatggtgtgactcggatgtaatattaagagctagttgacaaaagaagagctcaccttcgttagtcctgctaaaccaccaaatggttcattaaaaacattttgaatgtctagcaacatgtcgtatcgctcgaaacatttcaaatccccatatgaaagcgccaactgcttgatgtcacattgaaaattgtaacctgaggataatttatgatcagggtaatcctcagtcagagagactcttaataaggcaggcaaaaaaaagaagaagatagatttcatatataccgagctttaatgtactcttcgattgcaaaatgtgactaaggcagttgtccagaatttcagaggcgtcattgtaaagctttatcaagtccaatatgaaaattttggtatcagatccaatttgcatgattgaaacctgaaaacaagaacaacaacggtaagaatactatggcatgtaaggaatgagaagagactacgagttgttaccttgttctgtttactgcctttaatataattaggtttccattcacagtcaatacccacaactctacatccttcaagaaaagaagttgcttttctcaactcgttgacttcatcaacccaaactacatcttctacagctagatcgttgagacgcagaaagcttttttcaacaaaagcaacctcagcctctgaacaaaataaagaataccactgtaagcgtcgtatagttttgaaacactaggcatggttccgtgcagcaatatatacctcgtgcttttggcagcccttggagtgaatatcgatcgcacagttcatcaaccttctccaagtatccagcttggactgccgagtataccttaaaaccaaaccaaaatttcagcaaaacagacggtgatacagaaaatatcaacctaggaaaatgaaaaatgtctttagacattgattatatgtacaacaagtgcttaccagatacttcagaagctgtctatcaccttttgtcttaatttcagcaacatcccaacatgctttttctgctagaaccttcagagcactgccaatcaattgggaaaaggtcatcgtttagtgttaattttgtatatgtaccctgctgtacactgtttacaaatgagaagcaatagagactgcaacaacctttctttacacttgtgatacaattcgggaaagtcatgctgtagatagttcttatttatgatattataggcctgctttagcatattccttgagccatactcttgaacaagaatgcataaacttggccttcccatgaaggtagcccatctctctgcagcttggaaatttttatcctcaaccatttgttgaagaaaagtttctccagggaaacggaaagagaaatgctctaacagagtcacaaacgtcataaaagatttcgacttgatcaagtcagaaatgtattgttccagagacgcatttcctcaaaaatgtattaggt

SEQ ID NO: 30262 - DNA, 1350 bp, Arabidopsis thaliana landsberg
  unsure (1)..(1350): unsure at all n locations
ccagaccgcatcgtcaaaccaccaccacgtcaagcttttgtcatcgcccgagataagggcatgagcttagatatcgttattgacttttccactcgagcaattgtctcgaacaagatccacgtaggcaatggtaacccaatgctaactattgacgagcagcaagcagcnnnnnnnnnnnnnnnnnagtacaagccgttctgtgactcgataataaaacgcggcttgaacttgtcggaagttgtggtcacgtcctcaacgatgggatggtttggtgagacaaagacgaagaggtttataagaacgatacccttttatctaaacggatcggtgaacacgtatcttagaccaattgaaggaatgacgataatcgttaaccttgaccagatgaaagtagcggggttcaaggacaggttcacgggtcctatgccgaaggctaacgggagagagtaccgtatctcaaagctcaagccgccgtttggcccgtcgcttcgaagtgccgtcgttttccagccggacggtccagggtttaagatcgatggacacgtcgtgaggtaaaataattaacaattatgattaaaaacatggttataagaaaaagaaaaaaagaaagaacacttacggctatagatcaaatttggcaaacaatagttaagcctatttatggtcatggaaatcaaagtattaaagtcggtaaaaggtgcgaattatatatgcggacaaaattttgaattaaaatgatatgtcaaaagttgtatgaactgagaattttaacagtcatatatacctaaattatttttctctaaattagccaaataattgagaagctcaacttttgaatctacatctttctttttatcttactaatattgtttgaaaaatttatataatggggatttatgttcagattagatttaatagtgaagactttgtacatatattgttaggttaggtgatcatttatgtggtattgcaaaatatggtaaaaaaaaaaaattcagatctatcacaactctgcagttgaacgtaaatccgatgattcaatcactaacattcaatacttatgtatgtttcaataatcatggcattttttaccgtttatataaattttatctttcagacattttgttcacagtaaacatatgaggccttctgctatttatactctgtgaaagaatcatggagaccgacactataactgttaaatatgaaaataaaaattacaaaatttcttttttttattgatattttcgatgtgaatatgtgatggtgaatagatgggcaaactgggagtttcacatgtcatttgacgttcgagccggtcttgtaatctctttcgcgtccattttcgac

SEQ ID NO: 30263 - DNA, 3313 bp, Arabidopsis thaliana landsberg
aatatgactagatactttttgtacaactgagctttatatgtttggtcaggacagggttctctaaggctgatttttgagggtttctcagtctcgatgtggtcgcgctccgataggattcttcacaatcattagggttatatttcttacaaactgatgctcattttctcttccctgtctatggctttatctgtgatccttcaaaagcttagtgtcttcggccctggtttgaatccttctttcccttactgcatcgccaatcactcctttgcctcccgttaattgagttgctctctttcaacttaattacattagtctgcttcctttgctgtctagtctggatagtgttgcaaatcaagtagtatcttctttagacattcttggctgagagatttacactaaaagcatagaataagaaacccctgtttggttagtatctacccgagtctcgtagtcctacacagatccggatcctagtttcgaagctagttcttgtttagctgaagctcagacccaaaatgctccaagaaccgtcggctgcattctccctccggcgtaactcattcagacgccgatctcccagatcaaatgtcgatgacagaggctggaatccgctccatatcaaagccagaaaaggcgatctgaaatctgtcaagcagcttctcgaccaaggaatggatgtgaatgctctagcatggggacccaaatcaaaaggagtgagtgcacttcaccttgcagcagagggaggtcacattgaagtcatggatttactcctagaacgtggggccaacattgatgctaaaacatggggctcatgcgggtggactcctctccacgctgcagccaaagagcggaagagagaagcagtgaagtttctggtggagaacggcgcattcttggcagatgatataactgataccaggtttaatccgccggtgcattactgtcacggccttgaatgggcgtacgaggaaatgaagaagcttaacagcgagtcttcttcttcatctggtggagacacatcttccagttctgacaactgaacttcttcttggttgtttctcggtgtgttttgttttgttttctagttgagactacttatcagaactattatggttggtgtttgatcttatgggctatgtgaaacattgaaactgcggatacattcatgtaatcttcagtgtgttattttgcaactccagtttgatatcctagccgaatttgatttgtttaaccggttctggatcaaccaaaaatatgagataatcggttttggtctcttatgaatcattaagtctaaaaattaatgcaggtaattgacatagtgtgatttaacataattgacatggatatgtatatagctagattgcgaggatgaagaaaagttttgctcttaattgagttagcaccatatgtttctaatcattgtcatttgtgtcttaggacatgtttaactaattaaggtaaggaatgcaataattttacacaaatgacaattatttggtcgatacccattaacaagattggttctatctcttcaatgaatgatttggtcgatacccattaaccaaaaagaaaacatccggatcattaccagacccgtcggtgagatagcgggtttgaaatacacggtattcggtttacgaatctcaggaggaggaagagaaaataaaaatgagttttttaatttcgctctcttcttagatcccgtttgttctctttctcactttggctgtttaagcaaaaaccatggcttctcgctgtgagctacttctgatctgcgtcttctctctcttaattgcttttgctcactccaagacattgaagcgagatggtaagtttttactttaatcaccctctggttttgtgtttatgatcgatcctccattgattgaatttgtatagctctttaacagatttggtagatacccattatccagattcgttctatctcttatcaatttccatgatttagcacgcaagttcgatcctttttctttcatctatttctaatctgagctgagctgagctcaaattgagaaatattaattatgtgtgaacaatgattggatctgatactattggtctcaagaagtttgttatatctctgcatcatggtagttggttactactgtatcttttataatcagctttcctcaaagttaatctcttgtggacagtgaaagctttgaatgaaatcaaagcctctttgggatggagagtggtgtattcatgggttggtgacgatccttgtggagatggagaccttccaccttggtctggtgtcacgtgttctacacaaggagactatagagttgtcacagaattgtaagttctggtttcttctcactttagtgttttcttttgtagcaacctgatttgcttcactgaatttgatttgcagagaagtttatgcggtttcgattgttggacctttccccattgcagtaacaaaccttctggatttgactagactgtaagttactttctaaacctttttatttgtgacattaggtagattgatgcaagaactctttgaacagatatttccaacctagtttgtgaaacgagatccccaataattctttagagttatgctgttttgagatggttaaattgaaactggtattggtttctttgatatttcagggatctacataacaacaagttgactggtccaatccctccacaaattggacgactgaaacggctgaaagtactgtatgttccttgtgctctcacaacgatatgaatcattgatttactttctttcaaagtttgtctcaataagttgttctgagaccaaactcaggatccaattctcttcagagtgaacttagcacttacgtgacagaagtctgttatttgtgccatcataacatgtcaagtttccaaatacttcacctaaacatttactctgttgttatcactagaaacctgaggtggaataaactacaagatgtgatccctcccgagattggggagctgaagagactaacccatttgtgagtaccttaatgtttctttttaccttctgatgatcgtccatttttatccacatcaaatcatgatattttttcttcttttctttttatgtttaaggtacttgagcttcaatagcttcaagggagaaattcccaaggaactagctgctcttcccgagcttcggtatctataccttcaagaaaaccgtctcattggtagaattcctgccgaactggtgactttgcaaaacctttgccacctgtcaacaccacatgccgatttctacatatagtttgggtaccctccaatgctttatttactgagatcacgt

SEQ ID NO: 30264 - DNA, 2132 bp, Arabidopsis thaliana landsberg
cacccattagaataaagattaaatttttcattctccgctcgatggctgatttgtaaacttgttccttcatgatagaaatttatgggctaaatacagaaagtgaacgttagaatttggttttgggtagaagaacaactatcatatgattaaagatcaatcagatgatctaaagatagttttggtgagtacagttcggaaatataaaagtataatgcatgatgtgtgactttcaaaaatagaaatagccgttggatttaaatttaaggtcaatgaacaactgtcagatatgcttaaaattaatctaatgatccaagaatggttttggtcaatacttcgagtatatatagttgctggtacgtgatatgtgaccttgcttcaaatataaaacgagccgttgaattttaaatttgggtggatgaacaacgtactgtcaggtatgatgattaagattaattcaatgatccaaaatccaaatattgtttcggtagacggtggtacttaattagtgagactttcaaatattaaaaagagatgttgaatttaaattttagtttgctcaaaagaaaaagtttctagtaaaaacaaaacaaattatgtttaattaaggtatgtaatatggttatgcataagactagtgttgatgagatgattcacgatgtcgtatggattggattatgagtattcttaaactcgaatgggttgccaaatcataatggcctcattaatttattgtactaaactgaattataatatatgttcttgagcgaaaaaaatccataatttataatttcctatctagctatattggattgatccggttgttgacaatctggtcctgatttgaatcggtttctcgaatcatgcaccctaatcgtagtctagccatttaggattgtatcactcacagtagtgtcactttaaaatgttggagatttacactaggaatagtcatataaatcgcacccaaaaccgcactggggcagggggcagtatcaaaatctctctatatatatgtattttcgttactatttgaaccgcaccgcacttctcccgcaccgcaaaacgcagtcatcattcggacccttaagacaaaaaaaataataacaatttatatagaattttaccaaaattgatgtcaaaaacgagaattttttattattattttaaaacctaaaaactaatacaatatagagacgtaagaaaaatgccatcttttttctttcctcatgctacacacctttagatcaatgtttcctatagattttacaatttttctttccacattactaatttgagtatttgcaatctgttgaataagttgtcattgttcttaaaaaggtacttttcaataaattgtcatttctatctatataatcagtgatatctttccattctcttattttataaataagttagcataagaaaatatataggactaaaaccatttaattaatatttaaaacactcaatatgaacttgtttaattttttactacaaatttatctgattagcacaagctttttgtaataaagtttacaaacctttttgtttgtacaatagacatttagctagatatcaaaatttaacatataaacaatagaaaacatttatgacaaaaaacaatttagaaaacatatcaaaaagcctaattgacacttgacattgttgaaactattgatttaacacattgtattttcatattatatataaatttatattcaactttcaaaaatacatttaataattataaactaaataaaaaatgtttgtttgatttgttttatttcagccttaaaaataaatcgaccaataatatttagaaagaaaatcttatctcaataatttaagttttgcttagatttaatttatttgttcacctcaatgcattttatacaaaacaaatattttatatttaatacatatgtgaattaaatattaccttttaacaaataatgtaattaatatcttttaacaaataattttacccactcaaatagtaatatctatatttccccccttcttccctttttatgaattaatgtatattttaaaaaaatatccttaagaccaccctttttcccctataaatactgattaactcgcccttaacaaaaacaaaaaattattgataa

SEQ ID NO: 30265 - DNA, 1544 bp, Arabidopsis thaliana landsberg
  unsure (1)..(1544): unsure at all n locations
ttcgatgtctgttcaccaactcattcattcacattacactgtagttttacctgtgaattctataaaaattctactctacttgtaatctggtctaatctaaacataacttgtttcaggttttagattcttgcactcttggaggttgagcttagttcgacatgaaggtctttatctaatctccactcgctggcaatgaagatgagagtggaaaccgcacttgcgatccttttggttctcatatcaattcaacaatgttatggaggttagtttctactcagcaacatatataaaaacatggtgtgagtttcatttaaattgatgacgtttctttgttaggtgtaagcaactatacatgtacgtgtttctcttcgggcaatcgaagtgatatcctggaatctaactgttccacatcatgtaattgcagaccaggttcgttttctctttaccaactagaaaattttcaatattctagagaaaactaactttttgactctctcttttgttagcagacagagatcaatgggtatgtttgtgtcctgcaaatggatttccggttatagccattggtggttcaaattcgtcatgcttcacttcatgcaactgctctgctggtatagtttactatatccattgttctactgcaaacttagtcgattatatcataagttggtctacttacttgtttccaggtgctacaaaatcttcaaagaannnnnnnnnnnnnnnnnnactcgctatagttatactactcttctgcggtgtactcatttcactagcattccttgcctttatgatttgttacatttgtagaaaggacaagttttctggacaaaccccttcagtctcttcagatagagaatctagctggcatagctctgctaacttaataaaccgtaaaagctcggtttcacaatcgaaaattagcatcagctcctcagtggcaggtcaatcatttttaccctcttactttctttgagttgatacgttaaacagaagaggaaataagaacttgtttttgttttgttttcttcaggttgcttctttcagaatgcttctttgttttgtgtgagcaaacctgaaacaatccatggagctatctttcagttctcatacacagaattagagcaagcaaccaataaattctcaagtaacagtgtaataggacatggaggaagtagttgtgtttaccgtggacagctcaaagacggtaaaaccgctgcgatcaaacgtctaaatacccctaaaggagacgacactgacactctattctcaacagaggtactaatctcatttctcctacttctcatttggaattcatatttgatccaatgtctttattaatgttctcacaggtagagttattatcaagactccatcattaccatgtggtaccgttaattggatattgttcggagtttcatggcaaacatgcagagaggcttctggtttttgagtacatgtcttatggaagtctaagagattgcttagatggagagttaggggagaaaatgacatggaacatccgaatctctgtcgctcttgga

SEQ ID NO: 30266 - DNA, 3788 bp, Arabidopsis thaliana landsberg
  unsure (1)..(3788): unsure at all n locations
atttttcaatattggattaaaaatttaaaaaagggaaaatttgaatccatttttttaaatgtaaaaccaccctatgtataatgccagtttattaggagatgtcagagaaacaaagggggaattatatggtacgacctatgttttcttgttatttcaacgatcaaaccccaactcccaaggaagattgatttcaaaaacactttctcaatgcacaacccaaacaacgtgagcagtgaaccaggatcgtttgacaagatgacaagggatttcctctacaagctggtgcagaaagcctcttatccaaccgtggtcgaacaccagtctacatattatgctgcgggggagaaaaaactcgggaaaaggaagctgtatgcaatgatgcagtgtgcatcggacatattgcaatgtaaggtttgtttggaatggtgtatcagagagcttcccaagtgttgtgatggtaaacaaggagggagaattttgggtatgagttgtaatcttaggtatgagctatacccttttcttcggcgttaaaagaccgtttgatgttgatacataacacattaacttgacaactttcccatttttttttttttttttttctttttttccttctaattctgtatttttggtaaagtttataattgttgatcttttcattttctcaatgactgcaagttaattagttggctctttgtaaacattttatgtcagttgtgatacagatttaatcaattcaaaatgcaaagggtttacacgtgagtgatttgaatctgtaaagtgtgataatttagacctttttgtaataactcgaaactctctcttttttaaaactcctatgaatgtggaatgacctagctgatgcatgaatcagtaaagacttccatatcccgtatgaagttaataatcactagatgagtacccgcactacgtgcgggtttatgtattactatttactaattgttttatataatgtatgttcatataaagtaaagttgaatgcatctatttttttaaaacataaatatgatttgtaattgttttcaaaaagtccaactatattagttcatctgaaaacgaatgtgcttgaattgttttttattgttgttctagattctccgttttttttttaatttatatatccttgcttttttagttatatgtatagtttgtgagacggtgaaattttagaaaatttatttcttatactaaaaatataacatgtctttattaaccatgtctttgcatattaaatctaatcatattcaacttgatgttcttggaaagtttagttaagttcttgtaataatcttatatcttacgtattagttataaggatagcttctcaaacatctttcaaattacttgttttcttagcataaatctcgaaaagcttagatatatttaatctgcatattcatttagtttctttcataataatcgtaggcaaggaatatgtgtaacatgtttggattttatgatcactttaaccactcaagtagatctcaaaattaaagaggatatattgaattaaaaaaatgtagaaagaatgatggttcaagttctgattaattatatcctcctattttagttattatgttaaattaattactaattatgtattatttattttataaagtctatgtggcaagttttcataatgaaatttttattaaaaaaaagtcaataaaatacgtgttatacttcatatggctctttcaccacggacaagtcaattccatcagttaccgttgtggatcctatggaggatttggaaaagcaaaaacgttttatattttcaaagaagacatattccctgggaaattactttgcgtcttgctcaaactgatgctcatgagtataccgaggcgaatacagtagcacaaataaatacacgtagcagaggggtgagagaggaggataaccatgacagatggagacgacctgaaagaggatggatcaaatgcaactttgatggctcattcgttaatggtgatgtagaaagtaaagcaggttgggttgtttgggatagtaatggaagttatctactggcggggcaggctataggaagaaaggtggacaatgctctggagagtgaaattcaagcgctaatcatttcaatgcagcactgttggagtcatggttacaaacgggtttgctttgaaggagataacaacatgctgtttgacctaattaacggatccaaggtatattttggcgttcataactggatacgggacattcattggtggtcaaggaagtttgaatcaatccatttcaattggataagaagacatcacaatactccagctcatatttttgctaaagctcctctctaaaaccaatctttattcctgaatcatttctgggttcctaatgtaataacctatgctttacattgtgactacactgctgatttataaatcaaataagacgccgatgataaaaaaaaaaaaaaaagtcaataaaactgtttagatactcaaataaaaaaagtgatttcatataaaacggtgccgtttggtccgtaaataacgatgtcctctttctcttctcctccggttgattcagtccttttaacactcctcttttgatctcgccggcaaatatcatcccacatccttcatgtctcaaaatctccgtcatcgttctcttccttcgttattactctcgtactttatcacctccgtcgttctataatactctcttccgtcaatcatatcatttgtcgacaatttcattctgatcagtttaaaaattgatccatggatgataatttaagcggcgaggaagaagattactattactcctccgatcaggaatctctcaacgggattgataatgatgaatccgtttcgatacctgtttcttcccgatcaaatactgtcaaggtttttgagctaaatttctctcgattctttttcggattttgttaattttgtaatgaattcgtgaaattgaatcacttagttgaaatgttgatttgaaaaatcagttctgtgatctctgttgttctctagttaaaattagggttttgtgttatactgtgaaatttcatctttgtaatgctgtgaagaggattagaagagtagtggcattggttcaattagaataaaagcgtttgatgtttgcatgaatgtgaatctgcattttgtaggttattacgaaggaatcacttttggctgcacaggttagtgaaagagcaatgactcttcttttgatccatatatactngtggagtttcaattttgaaggctaaactgtttttgaatcaatgtagagggaggatttgcggagagtgatggaattgttatcggttaaggagcaccatgctcggactcttcttatacattgccgatgggatgtggagaagttgtttgctgttcttgttgagaaagggaaagatagcttgttttctggtgctggtgttacacttcttgaaaaccaaagttgtgattcttccgtttctggttcttcttcgatgatgagttgtgatatctgcgtagaggatgtaccgggttatcagctgacaaggatggactgtggccatagcttttgcaataactgtgagtctcatccttttcttaatgatatcctgaaatgaagttgtttagttaatatggttttgttgttttaggttggactgggcattttactgtaaagataaatgaaggtcagagcaaaaggattatatgcatggctcataagtgtaatgctatttgtgatgaagatgttgtcagggctctagttagtaaaagccaaccagatttagctgagaagttggaccgttt

SEQ ID NO: 30267 - DNA, 1459 bp, Arabidopsis thaliana landsberg
atcaatcaaagttaaccacccaatgatttgattgatatgagccaacaatgaagacagctctcagatctcattgaacaaaatatttaagcgaagaaatcaaactgaaattgtatctagagttgcaatgaatccagagaaaaaaatcacagattacgatgcataagagaagggtcaaagaaagtaaccgacactgagggagagaaaaaagcaattccgacggattaagaagcttttgaagaaaaccctaccaccagtaatgacgcgagcgaaaatggtaacacaaaactccaaaggcctgatgaaagagaaacgaagaaaacaagccaaaaaaactaagaattgatcatcgggaactgaaacaagtaacttcagaagctgaaaaagacagagaagagaaagagaaccgtgagcgtgagaagaagaagaagaaggaacaaggcgtggaggccccgtcatttgttttaatcaaacaccgacccgcgttagctttagggcccatttcgttttagggcccaataataagatagagtaactgaggtttgggcttcgttgttggacctgagctcgttatggaagagtcaacttaactttctatgaacactttcggacaaagctggagtgtttggctctgaaaactcaatttctctctactctttacacaagcaactcctgccatttgcgtttttgttcaatcgattcaaatagacataaatctagtgacgataagactcgcatgaagattttatccgtaacaactaattcctcgatatacatacttgtactttaatcatctaaaatgacagaagagagctaattatttataaacttacaaaataaaaattgttcttctttgaacgacgaacaatccaagaaacagagaagaagaagaagaagagatttacagtaatttcttgtaaataagttttgagataaagagacagagaattacacagttaacaaaaatataatttaagaaggaagaaccttcttgacaatgtcttcactaagagcagcaatctgagaatccaaagctttaatggtttcttctttctgactctccaagctcgccaaagcttcttttagctcttcctccaccttcttccttccctccgctagcttctcctcgacttcaacctgcaaaaaaaatacacaatccatttaccaatttcttcactctgagtgcattgttgtttcttttatacctgagtctccttcttcatcttgttaagcgcggcggcgatctcagccctagctgctctcatcacggcggcggcttgctcatcgagctcctttacttcagtcgaagtgtccttaacactcgcgagcttctctttgatggaagcgtctctttgatccatgaagttaccaagcggagagtaatacaccttgtcgagagcgatcatcaagaagagatactcaacaacgatgatcggaagccggagattgaaatcgaagagct

SEQ ID NO: 30268 - DNA, 2123 bp, Arabidopsis thaliana landsberg
  unsure (1)..(2123): unsure at all n locations
atgaacccacctggagtttcgccaattgttcttgtcgccggcccaagaagaacgctgtgactatccatattaaacacacctgttaaaaaaaaaatggagacttgatgaggagtttcatggagaaataatactcatacacagacgaactgtctgaaagtaggaagcttttattatactggcagggcatagagtgaagcagttgacgtttgaccgccaagagcaatggtaaggacttcaaatagtcccgccgctgcagcatctccaagccgttgaacaatcacatctatgcatacctgaaaccatagcacacagaatgagaaataataaaccaaagtgtaaactttcccttttgcaggactgattttcttactagaagttcaggaaaggaaagattctgtaccttagctttgtatttctcgtcttgcgagacaacggtgaacaagagttcccttccaggtctagttacaacataagttgtcacctaccatgttataaaaaatcaagtgtcattaatggaacagtaggttaacatgagagagattgttgtaaaccacagacctttctcagggtttcagacacagcaactgtaacccaagttggccatatggcaatagcaaccaaattcccaagtgcaacaaatggagatgcagatattgcaaccgtgacaccagctacagtcaagatccgcccctgtaagatttagcatactaacttatatagcaaatattccaggtatggtgaatcaatgtgtgaattttgtctcgcatatgacttaccgttaaagtcagttgtccaatgagtatgaaaactgcaacaaagctgtttatctgggcaaacagtcttcttcgaccaatggatgatttgattgttgtggcaattatattcactttctgcagtttaactttatttcatcagtgagaccgtaagaagttcagctttctttttgcaaagagcagaaattgattctatagactcaaagaaaacaaaggaattttaaagcaacagctcgtatcataagcgataatttgcaagcactaataacaaagggatattctactctttatgttgtgaaaaatcgttcaaatggctgttaaagaacaaagagtcttggttataaacttataatgatcatagttctttccagatcaggtaaatgaatagtataacacgtagagatggttcacatgagaagcctatattccatcgtcaactatttctgatattannnnnnnnnnnnnnnnnnnnnnnnnnnnnnnnnaaaatgaaaccattcaaaatataaagagtggtcttacttggaaatagaagaatgaggagatgaccgcaccgagccaaagaaacaaagacacgagcaaaagataaggtgatgctagtataagtctcattccatctaagatggcccaaaactgaggtctggttgtggagatgggcgatttaggagaagcaacttttggagaaccaacttttggagaagtagcctcctgttttctctcacgttgatgatcattatcagttcccctaacagaaagaacaacaaaaatcaacttcttgaccaacaatgagcataactgagtcaaactcacactaagactatcccataatctaaattgagtacgcacaaatctaaacttaaagataaatcatttcaatttccatacggttccatgcatagccacatattattccaaacataagataggagaacatagcaaacagagggtgatttacaaatcaaattcatatatatggacacagattgtagcttagctaaccttagaggagacaactcctcagaggactgggaaatatcattagtgatcccttttgaagactgtgcagcaaattccatcaaaagagcagcaaatagaagtaaatctgccataaacatcaaattgattttcgagtgaattcaacatggcattcattgaacaacaaagcataagctaatatctatctaggtacttatattgtaaatgaaacaatcatcagacaatgtgatgcatacatggacccatccaagcagtggcagcagcaaatatagatccaaaaagctgtccaagggtagcaccagcaccaacaaaaccaaacaatcttgcacctgactgaactgaagaatattatat

SEQ ID NO: 30269 - DNA, 2081 bp, Arabidopsis thaliana landsberg
  unsure (1)..(2081): unsure at all n locations
acattcaaattacatttttaaatttacccaccattttgcacttttaccttatacaagtgaaaagggacaatagtactaggtcccactacgatataaaaaggaaagatacgatttttctttatctctaaacacgaaacatatactgtatgatggtttgtaatagatggtataatcagaatgcatttgaatagttgattaacattttcgctttcgtaaagatgaaacagagagatataattctacaacatttgccggagtccaattgtccaaaagtaatatctttaattcatttttaacagaaaacaaaagtaacatctctatgaatcatggtttatagcccattaatatgtagttcatacatatctaaaaatatattatcgtctactggaaattattgcaaggagattcctaatagactntctaggactattaattaatagggctattgattatcagttgtttcataagttaagtaggaacactaaagtataattgaacaatagactattgatttcgggtactgtattagtgtattctaaattgtattttattacgttccacgtaattgggccataagaagacccggcaatccacgtgaaagagaatccttcccactagcatccacgttgccacattaatttttaaatagtttctcatcaattaaacattataatattaatcaccataaacatcaccataaattttttgttggtacaacaatctccatcttttgtttgtcgcatatcttcggataacaaactttttttagtggaatgtgttttctaaatggtaaatgaccatactatatactagtagaacgtaaaaaacaaaatgctaaatccaatacaacttcttaaaccttgtgtaaaacttttaaattagcaaaaaaaatattaacgagatacctatcaggctactacaccacaattaatctcagagagcccaaaacaataatcattaattcattacatatccctaggagaactcctttttaaaatctttcaaaaactttagcatttccgatggtcaaaatcccccaaaataataatatggatccgtttccacgcgctccttgcaatttataaataaaattcattagaccaaaccttattttttacccttatgtatatagtatgtttgatttacatgagggaaaaaaacgaagtcgttacatgtcgtggtttacacgcgataaagaagagcgtgagagaatagtgaatctaaacctgaactgtcttggtcattaagtgaaaaatgcatggaaaatctcgagttgttgtttcctacatctctctgtttttttgttttaataaagtttttactatttcctatacgtatcaacttgtaagcaaaacctttttcaaactttgatccataaatttaatacatatcgatgtatctcgtatatatatattacagtgaccaagctcttcatttttttctgtattattttttgttgtagtaggcttttgttttgatggaggaaaacccgcatcgagtttcacgtagaaaccatggcgggacccactgtcaaaacgacgccgtggacgaagagaaccgtcgacgacggcattacaaccaccacactcacggcgacgaagtcaaatgctccagtaagagatgccgatcgtgggcggctgcggcgattgctgactgtgtagcgctttgttgctgtccatgtgcgatcatcaaccttcttactcttactctagtcaaagtcccgtggatgatcggacggcgatgtctcggcggcggcggtcggaataagaagaagcggagagtaatacacaggaggaaacgccgcgggaatatcaacggtgaagatgagttttatcatcataataaccatcaccgccggtttgagacagccgaggagggtgagaaatgcggctgcggcggtggcggaggaggatgttatggcggcggagattatgatgatcaccggtttgtggtagagagagatgggagtttaacgaaggaggaggaggaggaggagagaacgacgtcgtgtaaaggagaagatcatgatgagtcgcgaataagtgcaagagttgaagccgagagagtgtggttagagttgt

SEQ ID NO: 30270 - DNA, 1078 bp, Arabidopsis thaliana landsberg
  unsure (1)..(1078): unsure at all n locations
actggaattcaatgattgatcaatttgtaggattttttagttatattcgaataaatataaaatgtgaatgttttagtctatgtgttctattctatgataggtctcgctcgtgagcgtattcgcatatatacatctcgatcgatccactatgctagaaaccacatttgtgatatataactgcagaaatttgttcattccatcaaaatatcatgaattagctcgccaggggacctagaagtgttcacattgttagagacttatacctttaaataatttgattcataaaactagttttgaaaaaaaaaaaaacagagaggaagtggttattggtagtttgatgattttttatcacattccaaagcttttgtcattcaatttttttagttacaattaattctatataatgccagtaaattatactcagtatgattggaagatgatttcttaacacttataagttcatatgatttttctcatattcactaaatacttaaaaccctatacaattagaatcttttatttaaatcaataaagtacaaactatataacaaaatgaagctagcctaccaataacacccaaaatatagcaatgggcccgtttataaacagattgaatagttgggctagataagagacccactaacaaagttctgctcctaaaccgaccctgcgcattttagtcggcagcaaaatttattacgatatcgtgctctaatgtgcgccgtccgcgcacaataccctttcctctctgcttgtgcctgacatagttgttattcagttcattcctgcttccccgccttcctcttttaggaaccaatagagctcgagagagtagtcgagtgaaacaataatggagagcgagcctactcgagtgatggtggcggtgaatgaatcgactctcaaaggctatccacacgcgtcgataagtagcaaaaaagcattcgagtggacactgaagaagatcgttcggtccaatacctctggcttcaagcttctcttgctccacgttcaagttcaagacgaagacggntacttctctctctcattcgatcgttgaattttgaatatcgtgatactt

SEQ ID NO: 30271 - DNA, 3034 bp, Arabidopsis thaliana landsberg
acgcatgcatctgataaacacctgtaagactggtaagttgaaagattattttctagagtttaaaacattatgctaaagttggtgagtaacaataaggaataacataatgtcaaactcaatatcattttaaattctatttcagcagggttgacgaatcataatattgaagcctaagtgaataatactactataatattattctttcattaaggaataatgtgaatgtcaaactcaatatcacttttggttctagagcaaaccaaccacacacttgtgtgaaaatagacagtcttaactcttatctaatccctaaaaaggagggaaaatagaatgacactgaaacgtgtttgagatgctgcatcaacttcttcaaaacgtggcagggaacaaagccaattaacatagggacgtccctaccagtatacatatatactcagaaggacgagaccggtgaatgtatgagaataaatgaattatgttggaagcatatggatcatcgcatcagaccgtattcaaatcaggagaaactatcagcaattttcactcaatttagtcttgatatcgtataagtttagtacaatcttctatgtattcataaattaaaaccaaatcaacaagcttgtacatattcactcgactaaagcacttaagaaacacagagagttaaatattgtttctaactgtcttctgtgaaagctctgcttgaataccacgcacgtggattcaacgtcttttactcttggccttggtgactcgatttctcatagatgcatctggcggcttccaaatgatgtcatcaagcttactacaaaaagtcttgtagaactgcaaaacataaactggtttttactattccggagtcgcacaatccctcaaggtgaacttataacactaaggtctccttccgaaactaaccttaaggtattcttctgcgtctcctgctgcattttgaatgtctaccatgagaattgatggtgcaactttgaagaccttcagatttgaaaatgattagtgagacttcgaacatagagagaccaaagtaaaaaagttggactggttttaagagaagttacttctagtatgacggagaaatgagatgtcttatttgcagataatccttccactctcatctgaaaatggaaacggttaacagctgttgggtactttgagaaggctgagatgatgatatgatatataaactctcaagaaatgttaagatacacatcacaaaaaacaatgaagcgatttcaaccgataagaatgcctaaccaaactcttactatagtacctcaccttgtaattacgaatgtgtgtcttaaagcccatagactgtgacacaacttccatgcttgagagaaccacgtttgctggcttgtgtgagatgaaccttgtctggtgcttcatggagtcctgtcaacacacatgaaagattagcgtattagttgtataacatgtagaaaagagaaagaacaattaaataaggaataggaatgcacacagtggggtcacacccagtattgtacctttccacggtcaaaaagagttgcgaggttcaggccctgagatagaataattaggtcaaacgcatttagagttagtggacctgtgtctcttgttccatcctgtgcatatgtttgttcctgcaacgtataatgttaaatagaacatcaaattattagatcatgctgagtgcaggcagaagaataatctcataagcttagaacaacagtaactctggaaacacatgatttatacacaaatactcaacagcaaacaaataattgtgctagctgaatcctacctccggatcatcaaaagcagcatatacatcatccaggtttacatgttcgtaatcgataagttgtacaggagtgtaatcctttagaaaccactcatctttcctgatttctgcaattgtaatccgctgccaggaaaagaagaaaaacaaaagcaaggcgagatttgtcaagactttgcatcgaaaagagtaactgggacaacttgacccgacaactatgtcctgtaattctttcagttggcacattatccatattctatagaccttccaaaatggtccagacagttatggaagaaaatgcttagactagttctagggtctattcaagtgtagaaaagaatgatatgttcaattggagctggtcaaagattatagtgtaatctagatatctctttttcaagctgctgttctttcaacatgtaacacatctttcaaatacagtagccaggattgaaaaagatctaaacaaagctatctgcacggaaactcaaaacttacagtttctggatttggatccaaaattctattaatcaaggactttgcccccagggcaaaatatgaggggcaagagaactcagctttgtcgatctgaaaaatgttggacaataagaagaaaaggaaaccatatcagaaagaaagtacatagatgccttacaagcacataacacggaaggtttagagaaagggagtcttgactacagtgaaaataatttagccataacgatttctattacaggttctgcagatattgcttgttcaatcctagtgtttaattgggataattaaactaggcagcaacaagaaactttacaaaacaaaatatcaagaatcaagaggcaacaacagcagagctcatgccttactatataaagttggtagatccatttcatcaaatggaagatatcctgccataagaacataaaggatgaccccacaggaccaaatatctgcaacggcaccattgtaacccttgtgactgagaacctaaaccaaaacggagaagaacacataagctatgataagaaagacataaaatttcaaaacattatgatatttgatttacctcaggagcaacgtaattgggagttccacatgttgtctttaggatggtaactcccttcagatcaaagtaagataatttagtcaataatgatccaataacaaactaaatactcaaaatttgaaagaaaagatgtcactgagaacccccattacttgttcaggtaatgcactgag

SEQ ID NO: 30272 - DNA, 1785 bp, Arabidopsis thaliana landsberg
aacactcttgttctgttcatgtgtttgcatctaagttctctgactcggagacttgttctttacagatatgttttttataagaagtggggatcttaagtggcacttcttctgccccagggaaaagaagtatgctagtggggtaagggcaaaccgtgcaactgagtgtggctactggaagaccacggggaaggagagaccagttctgtgcaattctgaggttgtgggaaagatcaaaactctggtttatcactttggcaagtcgcctcgtggggagcggactgattgggttatgcatgaatacaggcttgacgacaaagtactgacgcagatgaatgttcctcaggtaatatatactacttattataaatggcaaatatgatttcaacttgaacaggtgtttaggtttacgagtatttactgatgatagcttgccgttttaatttgttccttaattgctttgatagtgtgttactgtcctgcctgcaattttttccttcttccacttatatattgtttcctgcttgtttagttttatagatttatgtatcatccatgtaagcttatatcactctctctttacttacaattatgttttggactgcaggatacttatgtggtgtgtgttctgttcaagaaagatggtcctggacctagaaatggagctcaatatggagctccgtttaaggaagaggactggagtgatgaggaagtacgtactgatgttccttctactagtaatcccacaaaccttcttgagcctagcaaagaaaccactctggctttgactgccccagatgactccaataaggattgttttggtggcatgatatcagagtcatgtgtctcggatttcctaccagctacaactaataccaccagcgagcttccacatccaagtgatgcacctctggcagagaccgttcagacccccaacaatgatgacttatattcaatgttggatctatttgatgatgacgaagagttcttagggttcaacaataatgaggtagtttttttttgcattcttcttctttggcttagtatagtgataacaagccggtgtcactgcatgttcttaagctagcaaggctactttaaagctgttaagtgttttagtggcattggaacgtagtagttacccattagacaaagcttctttgctatatcttcgatcttattatccaacatcaatatgtgctcttttgtatctgcttgttctccaacatcaatatgtgctcttttgtatctgcaaaatacattctcatatttaatcaatctacaggtaagatatgatcccggtgtctcagctccagtttgcttagaagaagaaggcattttcaacggactaccagagttgagcagcatgccaaggacggcctcttacgacctagttgaaaactcggagttatacctagagctacaagacctcactgctccattaaatccccaaactgggctacaagacctcactgctccatttaatcctcaaactgggctacaagacctcactgctccatttaatcatcaaactgggctacaagaccacactgctccatttaatcctcaaactgggctacaagaccacactgctccatttaatcatcaaactgggctacaagacctcactgctccatttaatcctcaaactgggctacaagacctcactgctccatttaatcctcaaactgggctacatgacctcacttctccatttaatcctcaaactgggctacaagacctcactgctccattaaatgctcaaactgggaatcgcaatgacccgag

SEQ ID NO: 30273 - DNA, 1732 bp, Arabidopsis thaliana landsberg
actgggtagatcctatgaatactttatcctttatgtcattatctgagtcaacattccattcaatattcaacaacccccttattatataatgtgaacaaagaaaatattattgacttttagcttttgacattgactttgacttttgacactcgttttcgtgaccatatttgtaggtttcaggaccactgtcatcaatttgacgaattcaatatttgaaaattttggagagaagcttcgattttgcttgtttaaactggtaagaaacgtacagatgcgtcaaacactaaacacaaagatctagcttttgctttaatcttcaagaaacaatgaagcagaggagtttgttttcagtcctctgttttttcttcataagctttggtgttgcttcagtttcagcacaaacatgcacgacggacaaggggactttcagacccaacggtacttacgacgttaatcgccgtctcatcctctcttctcttccttcaaatgtcacggaccaagacggcttatactacaacggttccataggacaacaaccgaaccgtgtctacgcaatagggatgtgcatcccaggatcaacttcagaagactgttctgattgtatcaagaaagagtctgaattttttttaaagaattgtccgaaccaaacagaggcgtattcatggccaggtgagccaacgctttgctatgtgcgctactccaacacttctttctcaggatctgctgatctgaacccgcgaaatttgctcaccaacactggagacctagactcaaatctaacagagtttacgaaaatatgggaaggattaatgggtcgtatgatttctgcagcttccacagcaaaaagcacaccttcttccagtgataaccattactcagctgattcagcagtcttgacacctctcctgaatatatatgcattgatgcaatgcacgccggatctttcctccggtgattgtgaaaactgtctgcgacaaagcgcaattgactatcagtcgtgctgtagccagaagcgaggaggtgttgttatgcggccaagctgctttttgcggtgggatttgtatacatattctaacgcttttgataatcttacggtggcttctcctcctccagaatctcctgtgactgtgccacaacctgcaggtgatcaggacaacccgaccaacaatggttagtcttccacctgagaaaactatcattgtaacaaaaaaacttaaatatatgacattgtttttctatgtgttgtgagaagatagcaaaggaatctcagctggagttgttgtggcgatcaccgttcccactgttattgccatcttgatactgctggttttaggatttgttcttttccggagaagaaaatccaaccaaagaactaagactgaatgttagtttctttgtgttttacctctttattgtttcctttcgttatcagcatgtatactcccgtagccaagatgggaaacacgaaactaatacacccattctttgcagctgaaagtgatatttcaactacagattcattggtatacgattttaagacaattgaagccgcaactaacaagttttcaacaagtaataagctcggtgaaggtggattcggtgcggtttacaaggtaacaaggtctctgttttccattttttctaagttcatattggtttatggaaataaccaacaatgtttgtttcattcattgtacgtagggtaagctttctaacggaactgatgtagctg

SEQ ID NO: 30274 - DNA, 5069 bp, Arabidopsis thaliana landsberg
  unsure (1)..(5069): unsure at all n locations
tgaccagtttacgttcaagtattctggtgagaaattcctcgtgagagatcaagaggccgccagccatctttggcgcaacttgatgctccccgggacgaaggatttccctaatcctgacgatctggttctaaaagagggatatcagaagtttgccagatcatcacttgaggtacgcgctagttacatgtcttcctgtggcttagtatcctagtatttgggctttaaacatggctctttttccagaccgccgccctggctaacgatctgatcgcgacannnnnnnnnnnnnnnnnnnnnnagctcgccgacagagaggccttcgataatctgaagaagtgcgcagaccaggccaaagccatctatgccaaagacatgaaggaaatggcttcattgagagatgctgccgagattcataaagcggagatgagctcgttgaacgacgaggtcaagagtctcaatagtcgagaagctgatcttcagaaagagttcagcgatcttcaggtcgcattggttgctgtaaaagagcacggggagagggagtgcaacaggttgcggaatgaccgagctgctaaagtcgcccgtactacaaagaaagcccaagctcgtcttgatagagtgaaggcttatctcaaggagcaagaggacctcgtcgggccaaaggtggatgctgagaatcaagccagaggcgctgaggagatagtgggcatccttatgcagagaggtgcgaagattgcggcatctgaactcagcggccttaaggagttaaccaaaagggcgaccgacgaagttaatgccttgaacgttatcgagctcggggacgatgatctgaacatgtccccagatcagctcggtttttcgaggcaaacctcccaagttgctccagtggcggaccagcacggctcaaatgtcgacctcgttagcggaagtgatattcgacgtgtaagcgttgaagaaacgaaccagacgacctgaataggtcgtctttgtaatctattttgannnnnnnnnnnnnnnnncaattttcggggcgatctcagaactcttatttaaccgtggacccacttttggggcggtttttaattttaatctctattttcaatgatttccagtttttcttatttcattcgaaattgataagggaaaattgtcattttttctctgttttcaatttatgaactttgtcatttcttggaaaagaaaaataggaacgttcaacctgtgattaagtaaattcccattttcccagttttggaaaaatgaagtttttaccctttctcgggaaaggaaagcgagaatttccagatcacatttaagcaaattcccaatttgacttctgtgttcgaccctataaatacttctttagggattaccaattgtttcaacggtctttcttcttctttgattgcaagatggagagtgccggatcttccttttctgttagtaaaaataatccaaccttttcaaatgccgaggcgatagaacatgggatgccattcttcaacaaccttcgagttccctggactcttttgtttcaggcgagctcggaggcaagacgtgaagcagaggggtttctatcatgtgtcgagtcaaggcataaggagtaccgcgagatgctgagctattatgacaaacgaaagtccgacatcgcccaatagatggagttccatccacgccattggattaagaatggttttcaaatcttggctcccatgccggatgtcctattgtcatactgcaatgattgtgcccaagatgccgttgtcgcctcgaaggagaagaatcccacaattattgctgatggagacttcattcccagaccgcttcctttgttctatcttggatcggctgcttccgacgccgagaccaccgtgtgtcagaacttcattaaccaggtgagaacttcgcaagtttaattattttgcgtgcgatcttcgagatcggcttttgatgacttgttaaagatcttaaagcaaactccgtattgagaatgcaaactttaattttattaagtattatagttgcatccttgagaatgactgcctacgtacccggtgaagggatcaagccattcattgttcgtattacataaatgagattggaagggcgatctgcatatatatctatatatataaatatatattttttttttgttctaaatctagttgtagtacctcttaaagtggactgcgttccatggattttctacttcttccagcttcatggtcatcagcagatagactcccaagtgaagtatgataagtgtgtattttcaatgttttgagcatccatttgtcatcactttagcatcatatcatggctgttggggccatttctaatcatttttcatcactttgcatgtctaggatagttttgcatgcatgttgcatatttgtgttgttttcaggtgattcggagctggtgacgagctaattggaagaagcggacctgatcatgtcaaaccactcgacccctaggtcgagtagacgctttaggacctcaacagaccactcgacccccttgtcttcacctccaccacctgaccatcactcgatcacgccactctacctggaagtcgagtatcaccatcaccaccacttgactacatactcgatggcgagcttcagagtcttctccattccacacttaaccagacactcgagcacaaggaagaaaagaagactccagcttatcactcgacctctcactcaaccacctgggtcgagtacagttcttaatccgtcccaatactgcgtcattttgagtattaggattttggaatattttgcaataagtagcatgtactttacattttccagaacaagtttttatctaggttttattccgcaaacactgtgttctagaccttttgtaatccggatttctctttatctattcagtattcagtatttgttcttgattttcgtttcctgttgttcatccggttatcatcttgctattactctgttgctatcatgttttcattatgttcatcgtttatgttctctacaatgatgtcttagtagtgcataggtttctaaggataggttagagtaatttagaattcccagtatgctaggtgattgagtttgatttatagatcccttctagattagttgttcttaatgacaattgctttttctgatcaactggaatttgaaaaaaaacaaatctgcacccaaaagatgttcgatgaaatgtctgaaccactaattccttagattcatggccctgtaccaaggtattgattgcagggagcgttttggctttttaggataattgactaaaaacctattatcaccaacaacccggataatccggtctggtccattgaaccaaaattagtggtggtgtatttgagtattattacttcttatgtgcatattgtttacttctactaaaccagaagaatctgaaaaatgaattttgaaacttcaagatgcccaaaagactttaagggccacatagcggtaaactttctagctgaggatggtcgagcttggtgggatagtgttgtttcacgataccgcgaccagcctatcacatgggaaatgtttaagaaggagtttgagtccaagtattttctaccagaggcacgtgatcgtctggagttgcagtttatgagtttggaacaagcgcaaaagagtgtgtgggcgtaggagcgaatttttacaagactttggagatatttgtacaacagaagggatgatgaaggtatgatggtacaaaggctgtgacttataccgacgtgagtaaattgactgaaagggtcatgaatgttgaagaaggaattaagttaaaagaaggagagaagttacaggagaacgaaaagtatggtgttttgaggactaatcagtcgtaaggtcgaaaccagaataatgatcgtgggaagcttaaggttggtaaccaaggaggacgtgtaatgaccacttacgattcaagagcctgctatatgtgcggaaagccgggacattttgcacaagattgctcaacggtcgtaaagactaaattgccaaatctggcatttgttacttgttacacttgtggggagtcgggacatgtatcaaatgcatgcccgaataagaaagcgggactacagggtaaccgagtgggagcttgttccatttgtggagacccagggcattatgctaacgcatgcccagacatgcaaataaagcagtaaaaccaaatggttaaccacccaccgccagttcagaaagttaagggaccaccggtaaagaagcaagctactccaacaaatgtttatgccttagatgtagaacctaccaaaccttcaggacccgcaaaaggtcccataacaggttagtatgggttcttacttttcttatttatgtatgtttgagtgattgattgttgtatgcatagtttactagtttaaagattgcatacatcattttcatatgcattagggacattacttgttggtggtaaccccacgcatgtattgttcgattcgggagcgacaaatagttttgtaagttctgacgtggtcgataagtttggccacgggtatgagagaagggaagtgaatgttttggtacataccgagggaaaccagccacctttgcaaacccaaattgcgttagtaggagttgcagtagttatccaggatacaatcctaccggcaaaccttttggtgatgccaatggaaaggttcaaagttatccttgggatggattggttatgaggatatcatgcccatttggattgcgggcggagcagagtagtgttcgacgtaaggaatcgaccacaactcacttactgtggaatcaaaccaagtaagattgcttcgttcgtgtcaacattgaaggttgagagtttacgaagaaaaggagaagtctaccttgtcactttaaatgtcattggtggagaagttgaaagtgagttaaggatttatgatatcccggtagtgaacgaatttgaagatgggttggagcccttggaaggattacctccgccgaggaatcatccaattactattaatcttgaacctggggcaactccaattgtaagggcacaatataggatggcgccagccgagcttgcagaac

SEQ ID NO: 30275 - DNA, 2690 bp, Arabidopsis thaliana landsberg
ttcctaatcctaatctttgcaattgaacaaatctccagttttaagatactaattccgaagtctatatcagtttcttcctaaactaatttcagttccaagctactaattcttgcaattaaatccaaagaactccaacgactaacaaagctaagaacgaacctgagccaatataggattagcagtgccggaaaagatacgaagtcgtgtggtgttctgataaatcgaatcttccaaacgtgtcctcgaaaagctagccggaacggtgtcgccagtaagcagatggaaaccggcagagtttccgccgtcgaacttgtacggatccgccgcgttacacttcttttcaattccacaaccaacagaaacaatcgagaacaagattcatcagattcgagcgaagaagaccgtataaagtacaaataccaatagaaagataatagtcggagagagtgagagaagtagatgagacttacaagaggaaatcgaacggaagaaggcggacgaatcagagaagaacgccggagatttagcgccgggaaagtaggcgatggttgaacaatagacgccatgttcgagaaatggatccggagagagagattttagggttttgagaaaaagcagtcttttcttcttcttccccgcgagatacgaatttgactacaagaaaatgactctctcttcttcttcttcctttatatactcaaaaactcatttctaagtttttaactaaccgtaacgatttccgttaaaaatataactgtaattcagattctttaaatctcattcattgatacaacatagtctctggagatattatatctttggaaggatgagaaatgcgagataaagtcgcaccatgttacaacgtttgttatatagctcaaacgcaataaaaaccccgatgaaattcggtttattttcggaaggtctcaaaaaccatttacagtttagaaagccagagctcgagttgttagttttctttaggatgtaactccatatggaagcaatgccgcagcaacgactcttccttcttcattcagaatgttgtacgttgatgcagcatttctctgaattaaaagtaatcaatataataagcgaataagaagttatgaagtaagcttgggactagaaaagaagcctgtagaaatggattaagaaacttacagaatcaactgtttctagtttcatgccaagggacttgacaaactgacggacctcgggagttaccgggtgaatgtctcttccacaaccaacaatcaagagctctggacaattcgatgatttagtttagaatatctaataagagctgagattgaagctaatatgcagcaaaagttaatcaaccagaggtactaatacagttttattttcatactgatgactcatgggtacacaaatattattacctggaataggtcgaactgtctggaagatagacaagctgcatccatggaaatagaaatatacaaacgtttagccattgctctcaatgacaaaaaaaaaaagaacacttgtcgaaaataaaccaaatgttttatcaaacacttcaaattgataaagctgtcaaatcctctcatgacaatgaacattgaaaaccttcaaccaatctattgccaaaagcacacaactttcactcaaacacagtcataaaaatcagctcaaatcgatataaggttgtgacagaacattggtgagaatcaaaggcctgagaagagagaagatacctatcagtggtgatctctgaaaatttacgaggactccatgacattaacagattcccaacacagagtaagctaccttcgtatttgactccattcacagtgaaactcgtatcattaaatctgcaaagtaagtgaggagaatcaatcaaccaccacatatttatacatttccaattccaaaaaccctaatcattcattaaatcaaacccagaaacacagtcggtaaaaaacaaaatcaacgacgaaaaacaatagagaaagcttggaattgattactcttggaagcgaagctggtcttcaggaacattgtcaatgagattgatctgatcatagagggaaaaagctcgtctcagagagggcaaaacaggattagaatgcttcggaacttcttttctcatactttgaatcaatttcggcaaagtcgccattgatttcaacctcatcgccatcttcgtggcagctcaaagtcctcaatcgtgattttccgatttccgcagccgtcgagactcgagacctttaaccaacccggtttaatcgtttaactctacaccatcatcggttatcggatttcatttccaaaaccaaattcgttactacgtttattagatagacctaacacgtcaaagctcaaaaattcatcaatttgatcagataattgataaagtatgtattttgtatcatttgaaacatacttagagaaaaaatacaattatgtggagatgagaaaaaatacataaacttgtatgcgttctccacttcattattaaccaaagattaaacttaagaacttttcagattttttttttaatttctgtttccaaaaattcaatagcttgcttaaaggttatcatggagagtagaaggaaggagctgggaggaaaggaaacggtgcagcagaggcataagccaccggaggttgagccacacgtttctttcgcctctgagttttgacttcaccagatacagaatttg

SEQ ID NO: 30276 - DNA, 1268 bp, Arabidopsis thaliana landsberg
tgcattgcatgatttgaataatcgcttataactttgatttgaaatctaatataattaaacttttgaatcaacaaatatatttcgaaggccttaaaacatgaatagataatgtatcaaagctaacacatatgttttcttcttgtttgtttttattttcctgaaagcttagtatatttccgcctctcataatgatttagaaaaatgacttaccttatttttaaataaaattttaagagattaatatagaaaattatatatacagaaattcacttataattacaaaaaaatgacatgttttaaaaaagtataaaaatctgattaatataaacatgttttgtgtaaatcgtggtatattagtttgaactttgaagtaaaagacaagtcaatgtatgtgctttttttgtgggggactaaaagttatataattgagtgcgacaggaataggaaaatagagaagacagatatagtgatgtggtacactgtcggattccaccatgtcccttgccaggaagattttccgacgatgcctactttgtttggtggctttgaactccgaccggcgaactttttcgagcaaaatcctgtcctcaagaccaaacccgtcaaagttaccaccgctcgaaagtgcactcctaaaaacgattaataaacagcttaatcatatcattgatgaatttgttctacttgatgatggactgtaacgattcgagaaataataatgtggttttaaataagttggttttgtgtaatcagcatgtctttgttgatcaattaatcatctctatatcgaagtttttgaattaactggtattacaaaaagatggattatggacacgttttatacttttagctgttgaatttcgttaactagaatctcacttgtttttataaccacattatgaatgcactcgagttttaattacgagaaattagagaagacgaaaaattacgaaatgtatctcacactttttcccccacaaatttgatgtataattacggaaaaaacttagcattcattcttttgagtatacgacatcataaagttctaccgtatacggtgaaaataaataattatgcaacaatttttatattttcttccaaattaatatgatgttaaatgatttagttataccacaaatagagagagagaaaaaaacgaatacttgattaacacaaaagcaaagtataccacctcacaacgcaaccataagaacaaagaaaaaatcaactctttacaaacatatatacgtaagcaaccataaatagtt

SEQ ID NO: 30277 - DNA, 2365 bp, Arabidopsis thaliana landsberg
tgaagaggccggttctttttcgccttctatatacccaaaactattgagcacttaaacttcaaactagtagaataaagatgcagatatctctcatcaatgtattaatttgtagttgaattatccactataccttatctttaatatatgattttggtcaaaaatctataaatatatcttgagtgatgccaaaaaaaagggatcggcctccatgaattggtcattcttctgccttgagcacaatcctcggaattatttttagctaatgcaagagtttgtggttttctatctccctttgctcctctataaaacggactttcgaatcatcagaacaaaacatcaataaacacaaaaacaaaagaagaagagaataaacaaaagaagaaaaaaaaagtattaaaacaaaatcaataaaaagagaataaaaaatggtgggttctcacaaagcaagcggagtgcttcttgtgctactagtggttatggccaccacaatagcaaacgggacacctgttgtcgatacagcaaaaaatgcagctacagcagttgaagatacagcaaaaaatgcagctacagcagttggcggtgcagctgcatcagttggtgctaaagtaacaggtgccaaaccaggcggtgcatcacttgatgttaaagcatcaggagccaaaggagacggcaaaactgatgatagtgcggtatgtaccaaatgtttgttgtatattttatattatatttcgattttgtattgtttaagaaagaatttcacgttgattcatgcatgcatgtataggcatttgcggctgcatggaaagaagcttgtgcagcagggagcacgattacagtgccaaaaggtgagtatttggtagagagcctagagttcaaaggtccatgcaaaggtccagtcactttggaattgaatggcaattttaaggctccggctacggtcaagaccactaagcctcatgccggatggattgatttcgaaaatctcgctgatttcactttgaatggaaacaaagctatttttgacggtcaagggtccctcgcttggaaggccaatgactgcgccaaaaccggcaaatgcaactctctccctatcgtaagcacattcaattttacataattacaataaaaacgttattattttcatggaatgacttgatgaatattatgatattttttgtaacagaacatccgattcactggtctaacaaactcaaagattaacagtattacatcaacaaacagcaagcttttccacatgaacatccttaactgcaagaacataactcttacggacatcggtattgatgcacctccggagagtctcaacaccgatggtatccaacatcggaatggtctcaatggagtcaacttaattggggcaaagattaaaaccggagatgactgcgtttccattggagatggtaccgaaaatctcattgttgagaacgtagaatgtggaccaggacacggaatttccattggaagtcttggaagataccctattgaacaaccagtataaggagtcaccgtgaggaaatgcctcatcaagaacactgacaatggtgttcgcatcaagacatggccaggatctccccccggtatcgcctccaacattcttttcgaagatatcacaatggacaatgttagccttcccgttctcatcgaccaagagtactgtccttatggccactgcaaagctggggtatgtaaccgaatcgaatctacacataaaactatctagtcaagtatatatcgatcaaacttttaaacctctcttcaattaatatacatgaaggtaccatcgaaagtgaagttgtcagacgtgactatcaagaacattaagggaacatcagcaacaaaggtagcagtgaagctaatgtgcagcaaaggcgttccttgcaccaatattgctctctctgacatcaacttggtccacaacggcaaagagggaccagctgtctcagcatgttctaacatcaagcctattctcagcggaaagttggttccagcggcttgcactgaagtcgctaaaccgggtccttaaattaaagttgcatgtccaccataaatccatccaatctggtgaagacgctttgattagggtgcgatgaaaaattttgcaatattttttttgagatataaattatataatagataaaacagagtccattcagggttggagtttatcacctgaagagagtgacttgtgtgattgggtagtaatgttatatgattcgcaatatgcgagagttatgtaaattatttttaaaaaaaaatccatggatcctgctatctttttgatactattcctctggtttaagctaccacatatttttttaaaattaaaaaaaggaagtaaagctac

SEQ ID NO: 30278 - DNA, 1953 bp, Arabidopsis thaliana landsberg
ctagaattacatgaatacatttgtcaagttattccttttagttatttattttaacaatattgtaatagggacttgaggaatcctaattagtgaaattccccaatgtcttcaagtttttttgggttggctctttggaaactctctacggcaacgtccttgctatttcggttcttaaaattatgattatattgctggtaaataaatgtaagagttacagtttatttgattaacaaactttcttacaacatgaaggaatagaaactgcatagaaaaagaaatagtaaaaaaaaaggctatattaatctatatgctcatatgaatcaaaaattaagaatatatcattgttttttgtattcttagttctctctctatttatgtaagttagacgaaaatgccctcatcacatatatcaaattatttagaaatgtaataaaatagttattgatattcttatcatcaaatacttgaggaataacatattataaattgatgattatctattaggttaacgtgataataatatatatatacttgtaagtaaagcaatatcttatgttaaaacatatgatatcgcgataaaagaatgttaaagaggtataaaattagtaatgtgttagatttatttttaatatgctaagttatacaatatatcatataaacttttcaatatttcttttcttttcattcatcatgacataaaagtactaatgtttcatttagcaaagtatctcacagttttgttttgttagcataaaattttggctaagtaaatatgtcgatttcaaagctttgaaaatcagatttacatcaaatgtgatgttttgttaccagaaaacaaacaagagataaaaaatcatgtaatctagtgatgagaaaaaagaatgataccaaaattcaaccaaaaaagtaaattaatgagcatattattcctaaacctttatctgataattttgttgttagcgcgtgtggatatgtaacaaaaggtattttggtattaaattgaatgagatgaaagagaattaaataaaagattttcatgcatagattcttaatttttgaatcttctatgcatatctattgctattaccctttctaaaaagggaaagaggagagttactcaaattggcaactcgctagattgccttacaaatttagatgaatttctacttgctaaaactttagttatatgtgctaatagacactatcttagtcttcttatggatcttctaatagattactcatgactaattactgaaggaaacctttatttttcataagaacaattccctgatgcactaaaccacctactggacatgtttgaactgttttatgttaaaattgtcccacattagacattgagatgaaaagtagtactgtattatatgataagttgggctaggcggccgtgacggttattgaataaaacgacatatatttatttttaaaaatttgctaattttcagctttttatattgtttttttcaacatttcatgttgtagtatataaatatatattgttttattctaaaccttttaaaccgcataaaatcgtatagtccccgattaagcgttctaggcactaggcggtggatcaccacccgcttactgcctagcgctttcgtgaacactgattatttgtaaattaaacaaataaattaaaggaatgaacactcaagagtttcacgagttagaatgttggtgtaatagtcagaaaatctcaccagaaatcattttgaactgcatttcatgaagcttacaaatatatttatatattgtatttcaaagattcatttatatatgtgccttaggatttgtaagtttgtaacttgttattcacatgatgattgcaaaaggtaactctagaggttttaatatttcctttcaaaatagatattctttttttttttttttttttatggtcttaagagttaatctaggtttttactgaatcac

SEQ ID NO: 30279 - DNA, 2895 bp, Arabidopsis thaliana landsberg
atgggtgtccataaaatccctcaggttggcgagttcctcgcacttacaacgtttttgggatttctggggttgaatgttgtttttgttgttgagatggtatttgggagcagtgactgggctggtggtttgagatggaataccgtgatgggcacctcgattcagtacaccactctgcttgtatcgtcatgtgcatccttatgcctgatactctggctggcagccacgccgctgaaatctgcgagtaacagagcggaagctcaaatatggaacatggatgctcaaaatgctttatcttatccatctgttcaagaagaggaaattgaaagaacagaaacaaggaggaacgaagacgaatcgatagtgcggttggaaagcagggtaaaggatcagttggatactacgtctgttactagctcggtctatgatttgccagagaacattctaatgacggatcaagaaatccgttcgagccctccagaggaaagagagttggatgtaaagtactctacctctcaagttagtagtcttaaggaagactctgatgtaaaggaacagtctgtattgcagtcaacagtggttaatgaggtcagtgataaggatctgattgttgaaacaaagatggcgaaaattgaaccaatgagtcctgtggagaagattgttagcatggagaataacagcaagtttattgaaaaggatgttgaaggggtttcatgggaaacagaagaagctaccaaagctgctcctacaagcaactttactgtcggatctgatggtcctccttcattccgcagcttaagtggggaagggggaagtgggactggaagcctttcacggttgcaaggtttggggcgtgctgcccggagacacttatctgcgatccttgatgaattttggggacatttatatgattttcatgggcaattggttgctgaagccagggcaaagaaactagatcagctgtttggcactgatcaaaagtcagcctcttctatgaaagcagattcgtttggaaaagacattagcagtggatattgcatgtcaccaactgcgaagggaatggattcacagatgacttcaagtttatatgattcactgaagcagcagaggacaccgggaagtatcgattcgttgtatggattacaaagaggttcgtcaccgtcaccgttggtcaaccgtatgcagatgttgggtgcatatggtaacaccactaataataataatgcttacgaattgagtgagagaagatactctagcctgcgtgctccatcatcttcagagggttgggaacaccaacaaccagctacagttcacggataccagatgaagtcatatgtagacaatttggcaaaagaaaggcttgaagccttacaatcccgtggagagatcccgacatcgagatctatggcgcttggtacattgagctatacacagcaacttgctttagccttgaaacagaagtcccagaatggtctaacccctggaccagctcctgggtttgagaattttgctgggtctagaagcatatcgcgacaatctgaaagatcttattacggtgttccatcttctggcaatactgatactgttggcgcagcagtagctaatgagaaaaaatatagtagcatgccagatatctcaggattgtctatgtccgcaaggaacatgcatttaccaaacaacaagagtggatactgggatccgtcaagtggaggaggagggtatggtgcgtcttatggtcggttaagcaatgaatcatcgttatattctaatttggggtcacgggtgggagtaccctcgacttatgatgacatttctcaatcaagaggaggctacagagatgcctacagtttgccacagagtgcaacaacagggaccggatcgctttggtccagacagccctttgagcagtttggtgtagcggagaggaatggtgctgttggtgaggagctcaggaatagatcgaatccgatcaatatagacaacaacgcttcttctaatgttgatgcagaggctaagcttcttcagtcgttcaggcactgtattctaaagcttattaaacttgaaggatccgagtggttgtttggacaaagcgatggagttgatgaagaactgattgaccgggtagctgcacgagagaagtttatctatgaagctgaagctcgagaaataaaccaggtgggtcacatgggggagccactactttcatcggttcctaactgtggagatggttgcgtttggagagctgatttgattgtgagctctggagtttggtgcattcaccgcgtccttgacttgtctctcatggagagtcggcctgagctttggggaaagtacacttacgttctcaaccgcctacaggtaacaaaaaccgcagtagtcttcattgaaaatcacagttttgcagtttgaaaatattgacatgtatggctttaaacagggagtgattgatccggcgttctcaaagctgcggacaccgatgacaccgtgcttttgccttcagattccagcgagccaccagagagcgagtccgacttcagctaacggaatgttacctccggctgcaaaaccggctaaaggcaaatgcacaaccgcagtcacacttcttgatctaatcaaagacgttgaaatggcaatctcttgtagaaaaggccgaaccggtacagctgcaggtgatgtggctttcccaaaggggaaagagaatttggcttcggttttgaagcggtataaacgtcggttatcgaataaaccggtaggtatgaatcaggatggacccggttcaagaaaaaacgtgcctgcgtacggatcattgggttgaagaagaagaacattgtgagaaatctcatgatcaaagtgacgtcgagagggaagccgaagaatcaaaactctcgcttttgattg

SEQ ID NO: 30280 - DNA, 3115 bp, Arabidopsis thaliana landsberg
tatcatctttctcactgctttaatcctatctgctccaaagaacttaaaaaccaaaccaaagacaacattaaacatttggatacaaacaatctaaatcatcaaaaacatgaaatcaagtacggaggaggagttaccatatgctctgtcctacaaagcccgattccttgagctccgtttttcctagctgcaatggcgtcttcaggtgtatccgcattcgccataaccttatcggtcatcgaacatttgagttagaaagtttaaaaatatcaaacaagttaaaggaacagaaactcataaacaccttgagacgtctgattgcatcagcccaggacatgaaagtctccaaatctggacttaaagccggaggagccaatgcttgtttccctaatataacctcaccggttgatccgttcattgagatccactcgccttcattaatcgtcaaatctccaatcaatagaacctgaaaatttttaaaccctaactttagaaacaatcttcccctaacttatatgacaagtttctaaaatcgaatccaaaaaccttgtggttctcgtcgacacgaatctcggaacaaccagcaatgcaacattttccccaaccgcgagcaacaacagccgcgtgtgacgtcattcctcctctagccgtcaatataccttccgctgcgtgcatacctcccacatcgtcagggcttgtctcagttcgaaccagaatcacagttttaccctgagaatgccaagcttcggcttcctccgccgtgaacacaacctgtccaaccgccgctcctggtgacgcaggtaagcctttggccaccactttttcacgataccccgatggatcatgaaactaatccatcaataaaaaaaaaaaaaaaaaccttcattgacctctgaatcaaaatttccaaaccctattcattggttacgtgtcagacaatcatctctgcttttactcctaaaccctaaacgtcttaaacccattagttcttgttcaagtgaaccaatcattaccagtaagtttcgaattttggtttcaacatcaagtttatgactatgaaaaaagaagaagatgaatatttgagtttgtacctgtgggtgaagtagttgatcaagatgttgaggctccaccattttgatagcagaagatttctcaacaagcccttcacctaccatatcaactgctatcttcacggcgcctttacccgttcgcttacccgctctgcattgcagcatccacaatctctcttcttgtactgtgaattcaatatcctgcaatacacatttgagattttgtttaaattactaaagaattgttgatgaggactaattgaagtattgtttatgtgtatcaaccatcatgtctttgtaatgtctttctaagatgttgcagttctcaacaagttcagcgtaagcctcaggcattaatctcttcattgtatccaaatcttctggtgttcttatccctgcaaccacatcctctccctgtcccaaaaccaatatttaatgagtatgggcttacttgttgatatgagattcacacattgtgatagatgccaaacctgagcattaactagaaactcgccataaagcttcttctctcctgtgctagggttcctagtgaagagaacaccagtccctgaagtgtcccccatgtttccaaacaccatacactgaatgttaaccgcggttcctttcaatccagttatctggttaatacttctgtacttgttcgctctcgggctatcccaagaatcgaataccgcttcaatcgctagctccaattgcttctttggatctgcaattaaccccgtttaaacatttgtaactaataactaatttttatcacttgacctcaagtaggaatcaaaacaaacctgaaggaaactcttgacccttggcctctaagtaaacactcttgtactgctcaaccaattccttgagatcagccgcgcttaagtcagtgtcatttttaactcctttcctctccttcattctctctaacttctcttcaaacttggcgtgtggaattcccatcaccttttattgatcaagaaaacaattataaggtaggtcaaagaattttcttgtcatgcaagttatctgaaatagtattgaaaaacagaggacttacaacatcaccaaacatatcatgtgtgcgccggatcgaatcgtaagcaaaacgctctccgctttttgcggccagaccaacgacgacttggtcgttcaagccaaggttaagtacagtgtccatcataccaggcattgagatctacaatgcaaaatatcgatcaaagacaagtcaatgtagttctgttttaaaaatagataaacgaaagatcttcattttctacgttatagtttgaataccaaaatcattaggtctttcaatagccacaaaacttattcattttctatctagtacattttaaactcttccaaaaacggccaaatggcaaaataaccaaaaaaatatttgaatctcaacttcaataaaagaaatctaacaagtcaaaatctgcgtcaaaaaatcttcaaaagattaaagaaaacatagaaagaaaaaaaaacagaaatttaacattagaaaaaatccttaaaataaaaagtcaagaaaaaaagttataattaacttacggcggcgccggagcgaacagagaggaggagtggcttggagggatcagcgagggaagctccaatgtcacgttcgatgaagctaagaccttctaagatctcttcccataaaccttctggaagctttttgccggcgatctgatactgctgacaagcctccgtcgatatggttagccccggcggcaccgacaagcctatgctagccatctccgccaggttggctcctttccctcccaacttcatacacaacaacaattaacatttttgataaatggttcttgaaaatagcaaacactaaattattaatgaattgatatgatcatgatgatggtattggtaacataccaaggacttcatgcccttgttgccttcgcttcttccttttccaaaggtgaatactcgctgcatcatggttttttgtttgtttgttttgattgaggtttagattgcagaaatgtttgtgcaagtttaagaacacatatacg

SEQ ID NO: 30281 - DNA, 6884 bp, Arabidopsis thaliana landsberg
atttctaatagcatacgtatgtaattatttacaaaagataaggttacatttaaaatgtacttcccaaataatatagtaggataaaaacagtttaatgccaatctcactatcctatgcaaagttttaatttctttattttagtgatcattgattttttgaggtgcttttgttattcttttattggttgagtcatttttgtttagataatgaatgatgttttaatatagaaaaaagaacataatttatatagtttcttcatttgtatacaaaaactgtaaacatcacttatattaagaaaaagagagtgttagttatgttttgataacaaatatatttgtataaaactctattatatgttttcgttttccatagaattttgagaattgcatctcatggtttagaagatagtgtattaaaaatgaggaaagaacttctgaatctctacatctcactttttctcctcctcggcgccaccatagccatgcttctcgtccttggtgcatccgacccatgtcttctcggtcgtatgcagccattgcccaacatatatttggatccttgagaaaaattatgttttttggattttgtattactcatttttttctaaaacaaattttggttaaaatatggaccattttgtaaataactgataacctattttataacattaaaaaatttatcacgcatttttatgtaaaaagcaaaatatagaaaattttgctcttcttataaacttttaacaaaaacatttggaccattgcccctctgccctttctattagggtcgggccttgtattcagcgtccatattttctatggtcttcagttagtctcctcaataatgttgtaaattattcttgattttgtgtaatcaatctctcttaaaaagtgaattgattttgttttaagagatgtcacaaattgcagagaagtgatatgaacctcatcttcgccaaataagatctcaacaatcaacttgtaacgcttcgacgaagctctagacaaatcgatgttgaatacaaaataatttggttttatttagtaattttgttcagaatttggattaaatctgggtaatgagattttggggaggtacaagttttgaactatgatttgaagattttgtaagtttattagacgattttgaactataattctcaagtgtcttagatgagcaaaattacctattcagaaagagattttgtttaggaattttgtaaacaatcgaatctggaattaatgcttgtttttttttcttgtttttttttgaacactaaattaatgtttgtttaaaattatgaattcgcacatatgtttagaattctaggtttagacatagataatctctcaaacaagagttgattgattttacattttgtgattcaagttcgaaaacagattttagtaatcatcctaataacttatataatatccaattctaaattaactaagaatttcccttagcctacattttcctcgattgattttaaaacaaattttagttacttgcttagataaatttataattttctgtttagcttaatttgaaaccaataatttatagtgtaatctagacagttttgtgaaattcgacccctaagtattgcactgatcttgtaatttgaggggatagttcaacggataaatttgcactatcaaatttttgcgtcgtttccaaagttctattttgattcatcattagataaggtgtagaaatttagtcctattttttttagttacatgcgttttctctcttctttttattgtgtgttctaaccgtagaacaaaaaacaagtgaagaacatgaacaagagtcctattgctgcgttaatggctaagattgagtttgtgcacaatctcccttgtgggggggtgtcaattttgttggtggaacattgttttaaaatcaaagatttgtgcttaatccttactgaattttgctcagattgactcataacttaggattaataacttaaatgactctcgtaattgatggctgactagaatgactcacatttttaatgaaaagactttttaaccttaatcagtactacaaccagaattatactaaaaaccatactttgattaaaaagaagaaataaaatcattaataaaaaggagggattaaataaaggaataaaaaaatgtaaaaaacccaaaatcgatttggggtttttcccgactctctcttttctcctattgcatgtctcttcttcttctttgatttcaaatcgaaaccctaacaaatctccggtggtggcttattgtaacgccgacttctcttctccggtggtggctcctttctccggtggtcgctgctcgactaggagatatctcttctccggtggtcgctgcttcttctcactcttctttggtacaagtttttgtagccgccgtaggttccggctacacaaacagcagggaagagtcgcggtggcccggattcacttctctggtggtgtaggcaaactattgacccgccaccaccgcttttgaataagtcccttttatcgattgaatttcgtttgattgtgatggtgattaatattttttgttgcagatctgtagatttgttgcagcattagggttgtggattttcccctttctgatttactccttatcaaaagaagcttctccggccacaacaacaacggaggtatcgacttcgctgtaagtaaacttcagaacctgccacctttgcatttgatttttttcttttttcgattgattaatgtgaaatctgattctcataatgataaattctttttgttgcagagctttagcatcactttaatcggcggttaacaattgataattccaattcacaattcattataatctggtaaggattttgggcaatttcattagaattgtttattgaaaatgattttcttgagcaagtaaagcttttcaattagaattttcataaagagaaataattattctggtaattcagattatggtggccaattagggatgaatttattttggaaaaaaattcccgcctttctttgagttttaatattgattttggtgttgtgttctcacagatttaatcaattttcaggattattcggtgatagatttgttatgattttagtttgtcaatctcacaaggcacctaagatcctaagttatttgcttatgcaaccttgttttttctgtgattaggaatggcgtcttctagtcatacccgcagttatccgtttcgcttgtatgaagaagaaaaatcatcgttgcaaaaaaagagtatggcccacagctgctatgtttctcaaattgggaagatcaaagacggattaggtgcagatgtgtgggatgagttgaagaaaactacacttggtctttttataaagtttactgaaagtgactttatatgggctgcccagacagttcatttcttcctcacgaatcagttgcgagtcgacaacatgcatgagatgtggtgtttgattgatcgcaggccaataagattttctctctacgagtttgagaacataacgggcctcaattgcgatatgtttgacgagtctgacactggtgaaactgattacaaagatttttggaatgaaatgggggtagcaatgtctgttggtccattgtttacagagttggaacgtgtctttgagattagcaagacatggagtttggagaagaggatgatggttggtagattatgcttgttatctgttggagttcatgagattcttcacggttctagaatccctttgccaagcgctaattagttcttgatccagagtcttttgagaaatatccttggggtcgatttgcaattgagtctctagttagttccgtgaagattattgactacaaaaaaaactcatatgggattcatggatgtgtctatgccttgtggatttggatttacgagagtatgcctggattgagagaaatttatggatttagaagagcaacaactaatggtgttgcactacttgattggagatcaagtcgcgcacgtatcaaatttaagaaattcattgaaactgagaaggttgcccatgaagaggtttgtgtgatcttctctagttctttagttaggttctttcatatatttaataaattctgagacatgtaactaacataatcttttaattatgcgttgttagtaggtgcgtgtgagccatatgatccttgtatctgaagaaaacatgtatcctaaatggagtgactcagctgagaatcatgatacggcgcttgacaacttgcttaaagacatcatccacaaccgtttataacctcatgcatggacacatgtggcagcacaacataagaggaaacagaatcaggaatcatcaaacgaggatggtgagagtaaagtgatggaatcaacgcctgcagatgatgtatctcataagaagcaaagaacagggaaagctcatataaaggtcatgtttttaccatttctgatttttccatacacataggtctatatgttgacagtgaattacctaacattgttatatgcttcattataggtcgatgaagaggagaagacaagcttgctggatatttggaatatgttggagaaaatgaatgtcacaattagtgacatggacaagaatgcaagcagcagattggatgggttggagaagaaagttacttgcttagaagcgagtgtaaaaacaaggtttgaagctgtggagactgatataagagttcttaaagagtctcagccccctgtagtatccaatgaagctgccacatcaaacaacaatgatgaatatgaggcaaatagtaaccaatgtgtaagtagctgtcagtttttaattttactgttggttgttttggatttgaattcaacgtttattacaatgaatgtgtactgtgtttttttcagtcttggcttgtagaggagaagccaggttctgttgatgggttgcctattcaaagaagtggttaagaagactgttaattcggtgaagaacaaggaagttgctacaaaggtccttactaagaagaaagttgcaaaatcttataagaagaagacaattgtcaacgtagagaaggtagaaaaaccaaaacttgaaatgaagaagacagttgtgaaggtagagaaggtagatagtccaaaacccttgcagaagaagtctgttgcagctccaacaacaaagacgtttgatgatgatgttgtggatgtcactgacaaggttaatgcagacaatctgaaaatggcttcaagttcagaagaaacattctccaatcctatagatcagatggctaataaggcaacggctgatgcattgagagcacttcaagaaggactagataatttggacggtatcactagtaagaggagacgagtgccacaactagcgggttctcagaaatatccgtatgtaggaaattcaacagtgaagcgcataatcactgatgtaccatcgtcttcatcggtacctgaacatcttcaacctgtttctgatgaccaatttgataggctgaaggattggctcgaacctgatttgtaagtctctattttttcttcaaatataaatgctatcattactcattccttttttttctgcagtgaaaaagaaggcctgaacaccaacaactttaatgcacggttctattggcagataatgactccaagaagcgactgaccaacagaaagatatggatggctgaaagactatgtaagtatagcaaattttaaatttttttgctttcaattgattaaatcatttactgttggctggctgaaactatatgtaactctaataattgttgttttgattataatgcagcacatgggagttgcaatgtcattgtttcgccgaagattcaatcgtgatccgtcaaaatatcccaaccagagaatagcttttttggatcaagatttgatctccacaatgctcagagactagaaacagtttcaaccggattataggtgcttcaaattcagggagtattatgaggatcaagtcaatggtacagctcaatgtgacgcagcgacaaacaagaaatggtttgttgatgtggatcacctatatgccttcctctttgtcaacgggaatcattgggtcgctctggatattgaccttacaaaaaaacggatcaatgtttatgacagcatcccgagcttgactacggatacagaaatggcgatacagtgcatgtttgtgatgacaatgattcctgctatgttgagttcatttattccgtcaaagcaacgtacgaggagctactcaaagttggagtggaagaggattacgaagatctcggagaatcttgacgcaagtgattgtgctatctactcaataaaatacatcgaatgcttggcgcttgacaagtcctttgatggcttgtgtgatgagaacatgcagtccctacggactaaacttgttttggagatgtttgaggaattaggtgagaatgctggaacactacactctgaggttcgtagcaaggccttcaaattccctagcctcatggatgagtagaagctttgtttgtgttgttttcggttctattaagaaccatgtttcttcttaagctttttattttgttatgtctatgatttttaggacccatgttttgtcttatactacctgtatctaaacccatttcccttctcgtgattttttggtttatataagcatcgaaaatttgcctatcaggttttcagactcatagtcattgaaagtgttggtttttagggatataaactcgtattgtggtcgttttagtgttggctttttcttagtcgtttttcaggtgtatagtctttacattttttgttttttttctttgttgcagacatatgcaatgcaaacagcgtagatgacgttgaaatgcaataatcctgacttgtcttagaactctatcatagtgatgacagcaccccgtgtcgcaatctttata

SEQ ID NO: 30282 - DNA, 1797 bp, Arabidopsis thaliana landsberg
  unsure (1)..(1797): unsure at all n locations
ctaaattttgatgagtttctgtctcgacatgagtgttagcacctgcacctgttgattcccgccgtctgatctcaagatccatattcttcatcttgattctcacaagaagaaaatatattttcccaaggatgacatcttttaggtgatacctgcaaccagaggcatagagtatatctgtcttatttcccaatcaatcagtcaaatccttaaatcatgaaacggattttgtcttacttgcttttattgtactcaaactcgatgtgcaggcaatcctcaattccaacttccatctgtacaaaaagtaagattcaacattgtgcctcaaatgatcctactgatttaagccttaatcttgtatgagcttaagaacgctctgagtagtaaataaggaagcctattgacatctcttaaagtaagtagggaaaaaggaactcaacatttgaatgcaagcttcaagagaaagagcactcaatatcattactcatcagtgaatctagcaagagcctataaattgcttgagttttaggtcttttagttcctatctctttttcttatatagtttcaaacttagatcctatcactattagaactcaccttgatgctgttattaatatcaggaagtggagcgtagttccgtacctatttcaaatgacatcaacaatgtcacgattaaaatatttctggtgatgctatatggaaaatttacagtcataacacaattaactattttgtaacaaggacagcagtaaaaagtaagaaacataccacatgctcctggtattccaagatgcttccagcgtagccacgagtgacggttactttgaggacatatctgaaggaagtaaagaacaaagtaaatgtactacaataagcaacaattaggggattaatatattgtttcaatctgatgtcaaagaataacaagatcataccttaggcgcacgttcacgccattgtatgtctcatatggcatctcaacgctcgaaaattcaaaagggtatgtctttctttcatatatttctccaggtacatcaatctcacgcactacatattagatatacaaaccagaacgatagttgggtcaatcaacgactactgatgaaaacaacacagccatgtcataatggaatttttgactcacccaaggaagtgaagtcataaaagtttcctctgtcaaagtacatttctgttaaaaaagaaacaacagagtcgtcgataaacatataaagacatgagttagaaaccagataacagaaccgacataattcacagtatttgcagacctatttgaccaagaagctcaacttttacaccattatgctccacttttttcccttgatatggttcaatgttaatctgagagagacaagttacgaaaaaaaacactcctataaaagcaattccataaagctcctgataactagagatgacaacaaaaccaagtaccttcccagcaatagtttcttgactctggaaaagtggattcataactatttgtccattatctttcttagtgggtacctaacgcaacagagaccaagtagatacgataagaaaacctataccctaaagtccgggaacaattaatccgtaagataaacgtaaagagcgatgtgtacctgtttacggtttttcccatcagtaaatgtgattgaaatattacatgctggcttgaaagctccaagaagataattctgtgatattaatccccaaaaaaggtataaactttagtaacaattacagaaacaacgacactaagcatataagagaaattntggtgaaccaacacttacatga

SEQ ID NO: 30283 - DNA, 1520 bp, Arabidopsis thaliana landsberg
  unsure (1)..(1520): unsure at all n locations
ctgtttctatgctcctccctcttccttctcctcccgttctctgttccattgctcaatccttgccctcctctcctcacttccttccctcccgccacccgggctccctcctcgtttagggcttgcttgtctcctaccccttgaaccgtccctctcttgcctctccgacctctcactgctcctttttccacttccannnnnnnnnnnnnnnnnatctctgtcccgatgactgaattccctgtgagaaggatcacgtcggtcattatctctcttgttcctggggctaatactcctgcttctgctcctgcttctacttcctctgcggtatgatcgccgatatctcccaaagagttttctccttagttccctcgaaacaagcttcacatgcatgaaattacagtacccaccacggttgcagttgttttcttcatactgcctacacgtggcttcgcggaaatccgtcacaggagagaaatcagcaatgatgggacgtcctgaatagaacctaccttgcagagcctgcaaagcagctgcagcctgatcctcttccttaaactgaacatatacgttgccaatcatgtggtcagcaaggttgtcacaaatgttgaggctctctatctcgccaaactttccaagctcctcaaaaagatcctcaaagaaatcctcaaagtgctcctgaatcttacgcgggtcgagtggttggccctgagcgtcaacaccaggggtaatcatgtcaggcctttggtacatgttggaaagaaggagtgttggggagatggtaggacggttgtgaagacgcgagcaccggtcaccatgacggcaagcgccaatcttgaagtagaaagggcaattcactctgtctttctcagtaccacagattgaagccaaatgctccgccatgggagaatttccacccttagtttaagaaatcagtcattgaacaggatatttagcaacatatagacataaattgaaaagagattggtagatatcaaaaacatcaacaagaaactaaattatgttacgaaagcgaaaagattgagcaactattgaagataaaaggcagagatcttagtcagctattgaattcaatggaaaaaagaacaaagaatcacacatagatataaccaaataaccagagacatatggatataaaatcggaaacagagcaatacaaaagaaaagcagagatagagaaacacacaaaggagccaaataaacacagagacgaagcagtgctccaaaatagagctgggaggcacagagaccgagccgtaatagatcacaaaagcgaagaaagagagagagaaagcgtacagaatgttacagagatgagtgggattgagagatctgagggtgagtggtcgccgccggtggaaggaattaccgacgaggagctgccgtctcactcgccgatggatgatctagggtttgctttgttccccagttgccggagaaagacagagagacagagaataggatctcatgacataaggatttatatttttaatccgataaaaaag

SEQ ID NO: 30284 - DNA, 2765 bp, Arabidopsis thaliana landsberg
gcaagacgtcgaagtaaatctcctctatcccaagttctacacgaacgcacagataatgccagcccatgacctgaccagtcaacactgccagcgtttaccagaacagctggagatgatgcccctgcagagctgcacattgattcaattgaattcaatcgtcgatatccaaaagagcaaaacttacagaaaactaaaagcaccgcaagcaaaattaagatgcaaatctcaaacaacgaaaccctaaatacatctcgtctcagctcaaattcaacaaatcgaattcgaactaactcataatttcacacttctgaaactcgatctgcgttaaaatggggacgaacctagcagcagcagtttgaggaggagaaggcgatctagcacgtcgtcggaacctatcaacgggagtagcagaggcggaagcagaagctgaggctacactgttccgattacttctagggtttacgttctgcgagctcacatcctcttccttcatcctccttcgtcaacgacacacacactctctctctatatcggggcttcttcacttttcaacacagagagtaggcaatagaaaatcttgaggtctcaaatgacaaatctctctcttgacgttatttattaaatcgaatttacacttatttaatttagtattaaatgctctgttacttatcgataatattaaatactttaattgttaatgacgaatttgccctctctttacaagatacggctaaaatgtagccacgtgtgtctatcacgcagaagttccgggtctgattttataaatgggctttaaggacgagcccaatagccttacttttcagacaaacaaaagtttttttcttttttgttagctaaaatatttatggattttaattttatttttgtaagttggccttatcggaaatccgcgaaaattccaggcatagaagcagccacacccacacaagctcaagttcaaagttatctccgcactctcttcttcttcttcctccttcacttatcttcttcttcctctctctctttctctcaccatatatctaaattgctcatcgattctcaattcagcttcatgctttcggatttgattcgtcgataaccccaatttctttacaaagttgaagtttttatgtcatttctggttcgaaattcgttgcaattggaatgagataaagtctctgaatttgctatcgctttgttttattcgttttctgttttttttgagatgccatcgatgcttgttctcgtcggcacaatgccgtccttggcttctctggttagtctaggtggtgcttgtgcaagcgtttctggaacgagttcttcggatgcatcgtatgctttagttaagagggtttctttgtcaaggagaagtgttaaggggactaagaaatggctgtgtagatattctgtttcgtcttcaactactactactactgctgacttcattgctgaccaaaacaacaactcagtttctatagattctaactcgtttagggggagtaaagatggggatgatagtgaggttgtgctgaaacagactcctaaacctgtcttgaaaccccctgtggcaagggtagaaagaggtttgggggtgaatactgctccttggagtaaagatttgtcgaatgggggtaagtttgatggagaggaagagaggaataaggttattgaatctcttggtgaagtgttagataaagctgagaagatggaaattccgaaaccgggtaacaaagagggtggtgaggctgttaagccgtcacagcctagtgccaacagtagtaactcaagaaatggtagctatgcgaatgcgagtgatggagggacaaggaagacgaaaaccatgaagagtgtgtggcgtaagggcgatgctgttgctgctgtgcaaaaagttgttaaggaatcacctaaaattgttaacagaggaatgcagaccgaacctagaacgagagaagagggagaggtgaatgcaaatgcaggcactccattggcaccacctcagccaccttttagacctcaaccgcctgtaagaccccagccaatgttacaagggaagcctatggtagctccgcccgtaaagaaatcacccatcttaaaagatcttggtatggcagcaaaacctttagtttctgaagaagttgattctagcgttaaaagtaaagaaaggaagcctattttggttgacaaatttgcttcgaagaaaaaaggtgttgatcctgcggcctctcaggctgtgttagctcctactaagcctggaaagggtcctccctctaacaagttcagagtggagcaccgtaataaaaaaaatgcatcagctagtccaagacgaagaattgttgctgaagatgacggcgacgaagatacatccatttctcgatcaggcagaaaagggagaaaatggagtaaagctagtaggaaggctgtaagactccaggctgctaaagacgcagcacctgtcaaagccgaaatcttagaggtagaggaagaaggcatgtccatcgaggatttggcttacaacctagccatcggagaaggtgacatccttgggtacctatattcaaaagggattagacctgatggtgtgcacactttggaccgcgagatggtgaagatgatttgtagagattacgatgttgaggtccttgatgctgattcagttaaagtagaagagatggcaaagaaaaggcaaacttttgatgaagaagatttggacaagttagaggacagacctcctgtcataacgataatgggccatgtggaccatggaa

SEQ ID NO: 30285 - DNA, 2858 bp, Arabidopsis thaliana landsberg
ctggattccttgttaatgaagaaatcagagtttgataggacttttaagtatgagattgacgacgaaaactgtaatcctacttacctaagtgatgaacatcttgaagacttgaaggggattcgggagttgcgtgatgtattcgatgcggaatattcgaaacttgagactgacagattccaactcgggacagaaattgcaacaaatggtgatagcacttggccattgcctgttaacatcaagaggcatatctggaatgcgcagaagactttcaaaattgacttgcgcaaaatttcagatatgcaccctgttgaaattgttgatgctgttgataaactacaggagaggctgttggttgttcctggtgatgatgcgttgagtgtggaagcacagaaaaacgcaacattgttctttaacattttgcttcgcagcactcttgctagtaaaagagtgttggaagaatacaagctcagccgcgaggcttttgagtgggtcattggtgagattgaatcaaggtttttacaatcgctagtggccccaggggaaatgatcggttgtgttgctgctcaatcaattggagaacctgctacgcagatgactctgaataccttccattatgctggtgtcagtgcaaagaacgttacgctcggagttcccaggttgcgtgaaattattaatgtagctaagaggatcaaaacaccatccctatcagtctatctcactccggaagctagcaaatcaaaagagggggctaagactgttcagtgtgctttggagtatactactctcaggagtgttactcaagctacggaagtctggtatgacccagatccaatgagtacaataattgaagaggactttgaatttgtgaggtcctactatgaaatgccagatgaagatgtttccccagataagatatctccgtggctacttcgtatagagttgaatcgcgagatgatggttgataagaaattgagtatggcggatattgcggagaagatcaaccttgagttcgatgatgacctaacttgcatattcaatgatgataatgctcaaaaactgatccttcgaattcgcattatgaacgatgagggcccaaagggagagttgcaagatgaatcggctgaagatgatgttttcctcaaaaagattgagagcaacatgctgacagaaatggcactcagaggtattccagacatcaacaaggtttttataaaacaggttagaaagagcaggtttgatgaggagggaggcttcaagacatctgaggagtggatgttggatacagaaggtgtgaacctcttagctgtcatgtgccacgaagatgtggatccaaagaggacaacaagcaatcacttgattgaaattattgaagttctcggaattgaggcagttcgtcgtgctttgcttgatgaactccgtgttgtgatatcctttgatggttcttatgtgaattaccgtcatcttgccatcttgtgtgatactatgacctatcgcggtcatctgatggctatcactcgacacggtatcaatagaaatgacactgggcctctgatgagatgctcttttgaagaaacagtggatattctgctagatgctgcggcttatgctgagacagactgcttacggggtgttactgagaatataatgttgggtcaacttgcaccaattgggacaggagattgtgagttgtatctgaatgatgagatgctgaagaatgcaattgaacttcagctccctagctatatggatggtcttgaatttggaatgactcctgctcgttcaccagtgtcaggcactccttaccatgaaggcatgatgtctccaaactacctgttaagtccaaatatgcgtttatccccaatgtcagatgcacagttttctccatatgttggtggaatggccttttcgccttcttcttctccaggatatagtccatcatcgcctggatacagtcctacttctcccggttacagtcccacttcgcctggatatagcccgacttctcccggttacagtccaacttcgcctacctacagtcccagttctcctggctatagcccaacaagccctgcttattctcctacaagtccttcctattctcctacctcaccgagctacagcccaacgtctccaagctatagcccaacgtcgccaagctacagcccgacatctccgagctacagtcctacttccccaagttacagcccgacttcgcctgcttacagcccgacttcacctgcttacagcccaacttcaccagcatacagcccaacctctccttcttacagcccaacttcaccttcttacagcccaacatcgccttcttacagccctacttcaccatcttacagccccacatctccgtcttacagccctacttcacccgcatatagccccacatctcctggctacagccctacttcaccaagttacagtccaacatcaccaagctacggtcctacgtctccaagctacaaccctcagtctgctaaatatagcccatctatagcttactctcctagcaatgcaagactatcaccagctagcccctacagtcctacatctcccaactacaggtaagtagtaatatcttaatttttacactttctatgaagcttctcttatctgttgtggtgatattgtgtcatcttctctaatcgttaactcttattaaaaatttactctgcagcccgacatctccatcatactcacccacatctccatcttattcaccttcaagtccaacatacagtcccagcaggtttgacttttacccgcttgaaaatcttggatctgttgtaatgcattcatctcaattgaattccgcaaaaagtttaactgggttgttgatattaaat

SEQ ID NO: 30286 - DNA, 3181 bp, Arabidopsis thaliana landsberg
aactcatcaagatgatttcatgaaaaagacaacatttgaagggcaaaagataagctttaccatagtggccgtgtcagggaggattgcacctccaggtttcaaccaccgatctcttgcatagagcacagaactgagcattgactcatataaaaggcagtatcccatccattcgctgactaacacatcaacactatgaggctgaatctgtatcgatttatctagctcttctaccattgagtgtgcaacttcaagtaccccattatgctcgttatcattgaatactttgttatccttcgcaatctgctagaaaccaggtaaataattgatatctatgaggaaaaaagaaataatgaaaatcttgtaacaagtagaaaaaaaggtaaccttagttgcaactttggccatcttctcactagcttcaactgcaactacccttgaagccccagctttagcagcaaaaagactgcagacaaaggataaatggttattgcatgcaaactaaaaataagaagtaccaaaagtttgacttaaacaatcaaagaatctgcatataggcaagagaaattcaaggaagccttcagaatatgaaataaaagaagcacatagaaccacatgtttaaagcttcgtttagagaatgagaagaaacctaaatgagatggccaatatagagtgagaaagataactgcaaactcacctcaatatcccagttccacaaccaacatccattacaacagagccattcaagagagtaggattcttcaaaagtgcatctcggtatgcttctgttctaacctgttacagacatcagacaaattgaataaacctgacagctgatagtctttcttcatatggtgcaagtgcaggttagttaattatgacacaattccagaaaagattagtgcattaccttatcacttagcatctccctgtgaatgccaaacgaactataagatccaaaatagttctcattcacctttctgatgttcctattaactagccttccatcacaaacctttggttctgcatctttcccattgactatcaaatcatccgcagaactttgctttaggccattgcagtttgagagcgaagttacatccttacttccatttatattgcatttatcactgttcgacattgagctttcccctaaagcctcgacatcaatgcttaaatccccaagcttctgcaattcctccatcacttcctctctgtcaaacgtgacttcttcatcttcctcatcatctgcaaacgagtacaaaagtgaatcctcctgccaaaaaggcttcagatacttctcttcatcccaaggaaacttaacatctttgtaatcatcagcttcaatcttccaactgaaacacatgttctcagccacctaaattcattaaaggaaccaaatttaaacaaaaacaataaaattagagaaaccaaaaacgaaggaagcaaaaacacaaacctgtgagcgaatatagttgatgagcttaaaagaagagtagaaatcgagcttcaattcctttctaactccatgaaagtcgaatccgtggcttagacgacagtgttcgaagagtaaatcacaggaaacgaagtgagaatcacaaaacaaacacagaaaatcagattccgagtcgtcaccatcatcctcctcctcctcctctcctccttctataccattatcatcagctttccagtctccccaatctccttcgtctgagtaattttcttcttcatcctcgctgtagttgagaatctcgtgcttcaccattgtcgccgccatgagaaagataacggcgccaagttcttaagagagaggtttaagaaagcggagacaccccggcgggatagaaaaacaattaccttcttacccttttttgtaaaccgaaactaaccggaaataattacggctattctctacatcagcttaggcccccgtactatccacatcaccctacactcccccaacacactgggctcagacaatcttaacttttcaagaaccaatctcagtggcaccggcctcggttctgtctggtaatgacagaagagaagccatcggaaccgaagagtgtcccgcctcaagcattcatctgcgtgtgagtgttgcacgagcacatgagcatcgcagcatagacatctcgttagaggctactgggctgagctcaaagggtcagaagcgtcactggccggttcagatatttaatctatgaatgtgattgtagccattgtaacactcttttctggcaaatttgctgaggattttttcataagttgcaaggttgttttaaatttaacctattgagaaagttttgagaaatatgctggagtagtaagttattctgaaatcgacataaagtgttgttttgcggcgtaaatttatagagagctaaaaaagtaagacagacaattgttcagacaatttgttggttatagttaattgcttaactgtactgtatatgttccaagttaagtaaatgtcacaaattgtttttttttaaagtggaaaataaatttagtagatgggacaccgaacacagttagaaagagtgaacaagaaaaagacatttattaatgcttattaagactgacttaactaagataaaaaaagaaaaaagaaacaataaagggatccatccgctcatagcctgaggtgatcactataaactagaaagctaaacataaaagcaaactctgcaacataaggatttacagatgctataactgaagagaagttggtgtagcaagtagagagagatatctatgaatctgttggctcggttttaaggggtgcggcaccacctgaggacgatgcatcgcttccattttggttttgattttggttttggaggttaaggctatttgctaccatggaatcgctgaccatccctgcttttgcgtcaaagtttagcgtcctcttgcggttgctgctgctgctgtgacaccagatgaaattggattgggtcagtgattggttttatggaagaagctgatgagagacgtgatttttctacttacttgttcaagcggttgttgatggcagataggtcctttgaagggctctggtaagcatgtgtactctctccaacacaagcatagtaactctttgtcctgtgtcaaataagagcatccatctgcaaacaaacaacaaatggaaggtaaccaaacaatcttgtcacctacctcctc

SEQ ID NO: 30287 - DNA, 2051 bp, Arabidopsis thaliana landsberg
tgcttggccaaacggagcttttgagatgatttaaaacttttctatgtgaaaatcgaaagataatatctttgttgctgtgatatcctcgttggtgaaccaatagagtgatccatctaaatataatagattatttctaccatcaataagacaaggagcagcgaccacatacctccaagtgttgttggtgctactaaaatcaaaaactccacaagttgtaatgttttcacggcctagctccaatgaattatttagttttttggtttccgtttttgttaatctaaagtccaaaggattagtttgggttggtggtttacacgacgtttaaactactctagcgtgtatgtgattctaactcaaaagcgggaaacaaattttgaaaactcaaggtcataatcgtaaattaacatgctgattgtttcaaaagagccggataaatagttctggcctcacttactctatttgccaacgttaactcttccccttccacaagtaacggttagcgaaagttgaaatttcaaaattcatttcttcaaatcctctttgagaaaaatgcgttagggtttacatattcgcatggagaagcgattttcattttctatcttcttctgattcttttctccgatcaattgaattgcgtctctgattcgttgggtcaaattcaaatcgggatcaaagggttttgattttgggtcgatgataatcagatgattaatgcaaggattattacttgtctattggtttgaatccggatcgtgtgatagtcttacgaaatcgaagaaggtacgaaatgtttcgatctctctatcttcttggttaatttgggaatctagggtttggatttggaatttgctttcgttgatttctgttggaatttagaggtttgatggttctgggatctttctattaggataatgtctatcttgttcgataggttttaaatttggtgatcggagacttttaatgttctgaaacagttgaatagagtctacatcaaaatgtctctcttacttgttgaaattgatgagtctgaatggctaaaaaaaccaacgatttaaaaaccaacttttagtccatgattttgattgtatcgttttgggattttaaggaagcaaaatctggactaatggatctttctttggttgtggcgtcattatgattccatcattgtctttatccgtgaattcgtgaagatttattttgaaaaaggaaaaaatggttgattgttatattcatgcaagaacaatctgtgaatttgtgtttcttatttgcatgtttaaaatggttgatttccgagatctaattagtctcgtggtcatatgattcaggctatcaagtggcaattcatatctcaatttggagacgggaacattaatgtaagttttgaaactgttttaaagtataatttgttgcctagatgatgcattggagtctctttctattatcttaatgtgttctcatgagtgagattgtttttctatctttgatagttatattagtaagcagttagattttggctctataaggcctggcatttatttgggtagtttcatttactgttgtactttcaggtgcagtatttcaagagaagtttttggctcagtaagcaagagaaaatgaggggttttgtgccctgcttcatggagatatctttgaggtccaaagaacaaaacatttcgaaggtaaagcatgtgggaggtcagatatctctcactttattctcatgtcaattgtgtcatgcatagctatcttggctttattttggttactcacaatatctgaaaacacacactttcacaaacacggaaaacactcaaactcaaaacacacccaaagacaacataaactcaaacataaacacacaaaactcaaactctacaaaaaaaatcacatcacacgcaacaaaattgtaaacatactcaaacgaaacaaagctcaaactccacataacacaagaaataaaatacagcacaacacaaaactagacacataaaagaacgaaaaaaaacaatcaatatttttctttaatagttaaaaactctgggatttttgtg

SEQ ID NO: 30288 - DNA, 4306 bp, Arabidopsis thaliana landsberg
cgatgaaatatttagcacctacatttatccttcagataaatccatccagtactcccaaaacccagtttcactatgattttcacatttcacaattatttagatcaaatgataagtaaatgactattgttttcctcctcctgttcatagataaattttgttagtttcatcaaacttttaattggacccaaaatatcaatggatcaaaacgcaacgtatttgactatttgtcatgttgtaatgatgggcctaaatttgaagcccaatataaaacgagaacttcctattctaaaacaaaacccttattcttgtttgttttcgtctctctggaagacagttctcgatcggaaattgaaattctggaatcgcaaaatttgcacgaatcctactaattggaagatctagaatctcggggtttgatccatcaggtttgcttctgcttcggcttctacacatctcagagagattatgatgtcttggtgctttctgttagagtttccgcttcttcttgatattcgtcgtcatcgtggaagctcgggtttcacataaaaaattctgctgtgtacattgttggagctagagatctcttctttggttttcttttgttgttatttaggattttatatgcattgactatgaacgcgcggttatgaaatcatcgaaacttttggatttgacttttgatggtttttcactactgcaagtggaaactccgaagatcgtctatggattgtcatgaatattcaagaaaatacataaccattcataaaagaggaacgagcttggctgattaaaacaaaggataattctacttataagggttactactagctcaaatatcaacagagattcataataaacgaaaagaaaatttgtgggtgagtgaatggaatggagtcatatcttcttcttcagtctcactttttcctgaaagagcatccttcagtgagctttgccttccctcctgtgggtgtgcagagcaaagtctggcagtttccacacatcacaacggtctgagagtggctgaacacagtcgtactgcaccaaatccaaacccatcatttcttagttatttcatatagatttataaccaaaaacatttacagattcagacttttaaaaaaagcttacatgttaaagcagccttgacacttgacatcctacatcaaccacataacataccaaagatgtaatcagaaaccaaatctaattgacaagaagattcaaagtgaataggcagctaaaaggtttgaactttcaagaaatgaaggaattaacaaagaatagttcataccatgaaaaacgaattgggtgattgaacaagacgcttgagcttgtgcttcctcttctcgagctcagcaggagggttaagcagatcaatatcgttttgaaggacctgaaatttacacagatttttttaccagaatcagtcaattatctcacttgtggacttgtggtgaaggaatcaaatcaagaaatcctaattcaaaactcttaaaacctaatgattgccctaagaaaagacaaagcttgaaacctaatttgatatgttctttgtttttcgccacataaactatcagattcgacgatggaaaagaaattaaggcagtctctaatgttctaaacaagagaatcgaaacgagattaaagattgagaaatgagtactgaccattttcgttagcttcttagagattctgcaacgacaagacttggagatcgtatggaatcaaccgacaaatgatcttgggagatgtaaaaccctaattcgcacaacaatgccgacttataggttctggtccgaaagcccactgtcaatatttcttcttttcaactttgtcaacattaacgttttgggctgaaaaaaatattagatccggtccatcatagatttactctattgggctaaataatggaccaattttcttctcccacctaaaattttagtatttcacaatcccacattattaattttgaaaaacctttgtctaatttaaagcaagaaattaaaactaaaggaaaaaaatcaacacatacaaaatgtacaataaataatgatttttttttcgaaaaataattaatggtctgacttcgagtattggtgatgaaaaaactagtatattaatagtaagaaattttaaaaaaatattgtaaaacttgtgaccatttttgctcttatcctcttcacaatttgttttccttttccctcttgtttattaaaatggtcacaagtttttggcggcaatttttttaaaaattaattttgctccatttaaaacaaatgataaaaatgcgacttatcctacttttgaaaccgaaacgtcgtcgtttctttctttcgctttcgtcgttttaacacttaacactcaaacgaacacggagcttctatcacttttgcctcgccggtatctaaatgtcgaacaccgtcgaagatgacgacgacgacttccagatccctccttcctcacagctttcgattcgaaaacctcttcacccaaccaacgctaacaacatctctcaccgccctcctaacaaaaagcccagactctgccgttacccgggtaaagaaaatgtgactccgcctccttctccggatccggatctcttctgctcctcttctactcctcactgtatcttagattgtatcccatctagtgttgattgctctctaggagatttcaatggttcaatttcttctcttggtgaagaagataaagaggataaggacgactgtataaaggtgaatcgtgaaggttatttgtgtaattcgatggaggctaggttattgaaatcgagaatttgtctcgggtttgatagtggaatccatgaggatgatgaaggttttgttgagtctaactctgagcttgatgtgttgataaacctttgctctgagtctgagggtaggagtggagagtttagtttaggcaaggatgattcaattcaatgcccattgtgttccatggatatttcatctttgagtgaagagcagaggcaagttcatagcaatacttgtcttgataagtcatataatcagccttctgagcaagtaagcttctttgttatctcataactggaattgatatcaaccttcaatttaggttaatacaatgaagtatactgtgttcaattgttacatcgttacgccattgattgactgctgatttgtaaatatgattattgtaggactccttgaggaaatgcgaaaatttgtcttctcttataaaagaatcgattgatgatccagttcagcttcctcagctagttaccgacttgtctccagtgctgaaatggcttaggagtctaggtttagctaaatatgaagatgtttttattcgtgaagagatcgactgggatacccttcagtcactcactgaggaggtaatggaactaaagtttacttatttatttatttacacagagaaacagaattgagtattgacaaggttatacttccacaggatcttctaagcataggtatcacgtcacttggtcccagaaagaagattgtgaatgcacttagcggagttagagatccctttgcatcttctgctgaagtgcaggcacagtctcattgtacaagtggccatgttacagagagacagagagataagtcaaccactcgtaaggcaagtgagcccaaaaaaccaactgcaaacaagttgattacagagtttttccctggtcaggctaccgagggcactaagatccggacagcccctaaacctgtcgcagaaaagagtccatcagattctagctctagacgtgctgtgagaagaaatggcaacaacggaaaatctaaagttattccacattggaattgcattccggggacaccttttcgagtggtaatgttacataacaagctaggtcatggtttaacttctccgcatgaatgcaacaaccttattacatatgcatccttctcattcaagtcaaatatgctcatgaaattagatttaaaacgtcatgctgatgctgaatatttatcttttaagtaatctttatgtttggtgacttttctggtttaatatatgtatgcaggacgcattcaagtacctcacacgcgattgttgccactggtttcttacacactttcatctcgatcgtaagtagtcagctgtatgtctaattataaattactacacagaagaagcctgcatatcgtggaatcaatgcttaaagtctctgtattctcattcacagattatcaaggtttgacaaagtcatttagtcatggaaagatatactgttccttagttaccgcaaagttggtaaatatgaagcttgggataccttggaaagactgcaagt

SEQ ID NO: 30289 - DNA, 4039 bp, Arabidopsis thaliana landsberg
  unsure (1)..(4039): unsure at all n locations
aaaactcaaaattatttaagaacaaaaaatcggaaaaaggattccttggcaattttaaacttttcaccatttaaaatatctaatgattccaatcagaacacgcaaataaatttggatcacaaaatgtgcccagcaaaaagtatacatctatggtcctattgatcaaatttatcttaaacagtttaacaattttaatgcaaagcaattatatagagaacttagctaatttcccataaaaaccatcgcaaattatattaaaatgtcttataaaacatttagacaacaacaaacaaaaacatttccgttcacaaaccttccactgtctattctcttgtcatcaggttattacgtaattgatatgcaagaacagcaccagatgattgctcagtgagttctcaagaaaattcaagttgaaatagccaaaacaagatgtgagaatttcaagaaatttgctggagtctggagacagcaagcaaaacagtcttcatgatcttcttcttcgcttcctcttttctctgtcgctttcatccgaactagaagaagatgatgagcctgactcagattcagactcggaatcagaactgtcagatccagatgatgatcctgattctgattccgcaacttgcttctgccgttgcatgatgaggcttggcatgttcttcagatactctctcagattctctgtgatgcctccaagaccaatggacgtaaagaagttgattgcaaacctcgtgttctttggattatccttagggaatatagattcaagtgattcctgcattgttggatcctgaagcctctcattaagcagcctaatccccaagtgttctgacaattcctgcaaacaatgcaaaccaaacagtctcaaataccaattttccacaccttaacaaaatttatcagcagagccctaattgtgatgtaacatatccataatttcataattcatatgaaacaagaaattaatcaatcacatgaacatatctccaatcaaattaatgagatgaacagctctgaaattgagtttcatgaaatagtcaaatgagttctgaagattctagttacctggaataggatcttaatgaagatacgagatgaggaagtagtgtcttcctcggttaatcgaatgtaggcaagcacatgccaggggagagcatctgtgcccagtaaatgggcaaaaaacttagccacgttacgcaatttgtttgtctcaagacggtgaatcatggaatactgctgaacaaagcatttctcaaaattctcttgatgaattttgttgatcatacagaaacgctgacccaacaatccatagtaacgcagatatgttctctcctgagagcaacattccaggagcattatgcatagttccatctgcaacattgattggataagaatgtcataagacttctgtacttgcagaaagtcacaaactttaagatggattcatttcaacattaaacaataaaatagaaaagcagaaagcacaggaaaatatagagtatccgaatttggaagaaggtacctcttgacctggttcaagcttaattttaagtaatttgtgacctgcttcttcaaaatcaacactggacattatggtcaggtagattgtccttctaagattaacaagattagtctctgtttcgtctcttattctcatttgttcttcatcttcttcatcagactcatcttcctcctcatcgttatcctctgaactagcatcagagccatcttcatcctcagactcttcgtcaccgagtaactctttcttcagcgcctcatatttcttttcgttctcaacgaaatcaggatcaggtttgaaaatatctgcagtcagaaacatgtagaattaagagcagtttcagtacttccaaaataataaccgctctctagagcatggagtaaactttaaaatacaataccaagcttaccaagagcagtctcaggatcaatttcatgatcaagagagagatcatgcgaatctttttcttcaacatgatctagctcacgacgaacggccggatgtccctgaaagtaaaccatcaacaagatttatgagcattatgctattcgtgacaataagcatactgctacatctataacaacccaaaatatcagattcgaattcaatgtgtcaaggagtaaattacctgaaatttcgccttcctagtagcaaagagactttcaatcaaatactgaactctcttatctatctctccctcgtgcagtataccacgaaacctctcaaaaatccctgtattacaaaaactagaagagcttagacacgaaaataaaaggaagagccgtggaaatatagagcatgtatgccatgaaaaattgctgaagtccgaaatgaaacagctaagacacacaaccaaatttcaacgttatctttttccaaaagaactagatggatggagtgtaattactagatggattatatcataccaaaatatgtcaatagtcattgacttgtgaaagaatttgatggtttgagtgtaattacaaatagtctaatgattcttcaacataacaaaacaagatttctatccaacaaagagagattgaaatgatttttaccattcaatcctcttggtgaaacgtcttgaagcattgcaccacattccgtcacaaacccaacagccacctcaacactgtcatcagttgggtctcccagaagtatggtaactaactcaagtgctatgatctcctcagcgacttgctggtttactagatgcgctataaattttacagcagcaagcaattgaggctgccaaaacaaatatgagacataacaatgtataaatatgatacatataaatcaaaatgcttgacaaaaaatttagattcgaaaagccaaaaaagggacaaaccttgtcgttacgcttatacgctctctttagctgcaaaacgacccttttcaatagaagttcagcaacttcagggaatttggcgttaataacagcgactaaagctgcaaagacgtcagtgaatccaggagatgccatttgagacttcatacatgaacggcagaaaagtccccttcctcttatgagattttcagcaaacagttcagggattatgttcttgatgttgcttgcattaaccttattgacgagcccattaatacttttacggagagcatcccatgtaagccgttgatactctacgctgcttttatcttccacctccttcatcatgcgtgctagcttgaacggaggaatataaactcctcctgtttttcccaaggccatagcattgttctcagatggattgagttctgccagcttgggctttggaacctcaatcttcttctcttcccttttcctgctatcttcctttctcaacttgtctctttgactatcatcatatctatcattgtgtctcctttctttttcatctctaactccatcgtccctccgactcctatcttttctttcactttccctacgccgactccccttctcatgcccatcagtcaagtctctctccctccgatccctctttaagagaccttcactacctctatcattcttctcttttcctcttctctcactcctaatctcaccttcctcatcgtcgtcagatgctcgatgatccctgcgtttcctctggctttctcgcctacctcccctgcccctctgcctatcatcttcctcatcagaaggtttatcagctatgactctactacccatatgacttctctctctaccctgtttctccatgactttggggcttcttctccttcctctccgaccgtaatcatcatcaacctccatcggttccttcttattccccttcaaatcatcttcttcatcagaagaagtgtcagctctaactctatccgtatttctccccttattcactctcctctcaccatcaccatcactatctacctcaattcttttacctttatcatcctcagaaccagagttcgcttcttttcgatcctttctcgaccgtctagctaattcctcatcatcagaagtctcttttcttctgaccttatctccacggcgtcnctcaccatcagcgacagtac

SEQ ID NO: 30290 - DNA, 3093 bp, Arabidopsis thaliana landsberg
catttgaatagaatcggaccaagtatcaggcaaccacactttgtcccaatcataagcttatcacaataagcttagaatgggtttctaaatgaggcatttgaatataatcggacactctttcccaatcataagcttaccgtgataagctttagaaagggtttttgaaccgaggcatttgaatagaaaagggacaactttttatgcaccaccaccaattcttccccatctataaccgagccgaggcattttaaaaccgatctggtttataaccaaggcaatttttcgaaaaatctaggaccgggaccatcgtatcatgcaccacactctttctgtctttcccaattagggttttctaacaaaggcatttaaattgaaaaatacgggaccaattattatgtaccataactattctcttaccggacatcgaggggattcgtattagacgatccaggaccaaatcggatgcatcaccaccattcttttcccgagccgaggcatttgaatacaccgatttggacatgattgcaccacaaactttttattgttaacgatcaaccctaaatcggaaacaaaagtgaagaaacctacccaaattgccaacaatccggcggctacatacaaaaaggaaataaccctaaaaatcgcagccggagttgaaaagaaaaataaacaaaatcgctaaacatatgtatatagaattggaattatgaccaccaccaccaccgccttaaaggaaaagaaaaatggaaagacattaatgggccttaggcccaataaataggtcaacttaaggaaataaggagaccgttgtttgttgcgttgtgtttgatttttttgattagctttaaaagcaagaaataggcgtaacgtccacacacacgcacaatcacaattcctttatatctctctctctcagctttctctcccactaaatttatcctctctatctctctccacgtttctcgccaacaaaaccaacaaacaaaaacgcggtctctctctctatattagagagctgttcaacctaaatcgtggacaaatctcggaatctgcggcgacaaaaacagaggacgaagaagaagagaatcagaggaagaagaagatgtgttgtggacggatttgcatgctgtgcacgtgtttgcttcttgtggtgatcgcgattgggtttctatttggattcggtgtcttcaaggatggatttcacaagatccatgaatcaattcatctcgaatgcgatcccagatttggttgcggcggtggccttggacgtcgcggttatggtttcccagctccggccggtggttttaattagttgtgatctcaattcttttcgaatcggcgttttgcctttgaattcgaatttgggtataatagcattgattctttaggttatgatattcgattgttgcttcttttttaatactttccccactttctcacatggattcactcattgtgcattcgaatgtttcattagttagattttagtattgaccttattattaccttatgattgttttttctttcaaaacgtaacgtatgtgattcgtattcatcattatttaaaagtttccgcagcttttaagcataaagttaataaagaaaaacattatatattttcagataataacaatagaaaaaaatgcctaattccatttagaaaatatccataagcgatactaaaaagaaaataagctatattcttatctatctatatgaaaaaggtaatattctcgttcgttatgactttacctcttcctaatgacataagaattgatgttcaattgattaatgacacattgacctttttatactgatttgtttaaactaaagtataaagttaaatcttaagtctatatcctttaagaaccaacaaacaataaggttaattactgttcaaaagtcaaaacaaaggttgattagtaaagtacaattaacttatgaggaaacggtcgggatttaaaaagattcaggggtagtttcgggatttaaccaatacggggtagtttcgggatttgaagaccaatatcggtggaagcttctgggtcgaaaggcgggtttaaggtggtttggcttttcttataagccagagttaacataaaacctgaagtaaagccatctaaggaagtcacagagattctgatttataaaattgaccaaaacaagtcacagaggagaccccggaaaccaaacagtcgacgattacgaagatgaggatcactgtcatgaccgacagtgaacaaatcatcactctcgatgtcgattctcaggagactgtaagtttcttttccccggaaaaccctaactttcctgtttcttcgggttcttaatcacaatgtacttgtcgaattaatcgatggaggttcttgggtttcactactttagcacttattactcgacgttttcgaaagtttcgattttgctgatccttagtgctatattcctgtaggttgagaatgttaaagccttgctcgaggttgaggtaagagttttcagatctcttttgtctatttatatttggaattgtgtctcttgctactgagaaattaaagacttctgctgaaatctggggtttagggtttttgggacttaaagtttccttgttttccttttaatcaatgagcagtccaatgttccgattcagcagcagcagctgttgtataatggaaacgagatgggaaattccgataaattgagtgccttgggtgttaaggatgatgatttattgatgatgatggtttccaatgcctcatctgggtacgttggattgatttcctcttgcttctctattttgaaattttgcaattgctgtttgtgaacatgattctttgtttgtctcatttgcttgctcttcttcagtagtgccactagtgcggcggggaatgatttgggcatgaatcctgatgggtcagctttgaaccctgcagcctttcaacaacacattcgtggggattctaatcttatgggacagttatttcaggtctgaatttatagtaactagaactacgaaattcttcttggacttcgttttatgactctgttgccttggcttttgatgttgtgaattgtagaatgatcctgagcttgcacaag

SEQ ID NO: 30291 - DNA, 2371 bp, Arabidopsis thaliana landsberg
catttaaacctaagcaccttcatttttggtcaaccaacatttagatttgactatatggaataatccatctttaagtagtaacatgatgttgataaaaacaaaaatttatatttgaaatgctgctattatataaataaaaggttaaatccacctactataatttatttagctattattaggtggcatgacaagatgtcaagttggtgaatgaggtgcgtctggccttaactagagatgatacccatattttattttcggacgacaatttatgacacttgttgtatcttgttctcctatctttcttttctaatatttacattcgatttatgatcaacaaatggcttcaattgtaaaatgacaagaatttgtagggtcaacgacgtacaagatcattcaactgccgacttcagaagttggtgtggatatacgagagaggaagtcacataaacaaagaacatgaagattcaaagagttgtatgaacatatcagacaaagcaagcctgttcacttttccactatgtatgtaatttatagaacatgatgtcaacaaagattcacacacttcgcaaagcaatgagcttttacattgctctataaataagtatactttttcatatacgtgagttggaaacataagctttttaagccacatgaaaatgctcaggaaaacacaaggtttacaatcagatgaggagataaaaagtcgtggcaacgcgcagaatcgggatggattccttaagagacagatgcacttaaatgcaagatggtagagtaggtccgtggcagagaaaggccactgcaatgtatatgatcaccagtagtagtagtattaagaggaccctgcaagagacaaaaagggttaggaattaggaactatgttcgattcttaaaaaattctcacttgacattacaaatgtggaacttggggtgattaaagtactttttgctatagttaaatgtgttcttaggccaaaaactagttttagtatacagtcttgcaatcataatactgaaaattgtttactaaggttttaggaaacatacgtgagcttgcagtttctccaccagacgttgcttctaaaacgacgagcttgctttctgaaccggaatgtattcccctgcatattggcggttttatcgacaagaagctccaaacgttcacctctatctaggactttgtcaatgttttctatcatgacaccccgcacctatccaaaaccaaaaagaaaaaccaggatgtattgtcaaacagtgaagccaagactcagaaccatgtctctaaacaacttcacaatccgactgaacttgtaagacaaactcatcaaacctgattcatttcacccttaatacgattaatcctatcggcattaggatcattagagtaatagtcaatctgctgactgagaactctagagaattcctcattcattgcataagctagtgctgtatgaacagccctgccataagtccgtacgaatctctggtgaatatcctccaaaaaggcaaaaggaattctccctgacataaaaaagttttgacttttgagttagaaagacattcacatctctctaatgcacagcttctcggatataattgtgttgatgttatgtccaaaaaaatcaaattcattcacatcacaatataagaccaaaggtctcgaattcaataacagagcgatcgttcagagcaaaaaaggattagacttttgaattccactgtcaccaaagttggaaacttcctcaaaattagccatagaagtaaaagaaaggggaggacgtacttccggcggtttcttcggccatacagagaacggtgaggccatcggtgcgtttaacgtggaagacgtaacgatcctgagagtaggagacgttgctgtcgttgtctccagggaccttctcgaggatctgtttggcgatggtgctcgcattcgtagaggtggcggtgaactcagaaagaaccaccgtgccacgagccacgagggcgtacagaatcgccatctccgtcgtcgatccccttgccgaatcaacaaaactcgtgtaaggtcaacgaagaagaaggttttcccgcggaaaccgagccagccagacgaatcgctggatcaatcaatcagagagagagagagagagagaaccaattggcttctttttctctctgcatataattgaatctctttctctctctctcctcttggagtttagctggagctggagaccttttcgcctccgctgattacaaatatttaatttcggatagctacgttgatttatttttaaaatactgtattattataaggatcaaaaccaaattttgtcaaaatatcacgggcaaaacaaagttagttctttttgttttgtcggaactaatttagttg

SEQ ID NO: 30292 - DNA, 2324 bp, Arabidopsis thaliana landsberg
  unsure (1)..(2324): unsure at all n locations
agctgtcgaggtcgactcatctgtgatgggtgctcagcaggagggaaaaaagatgaaagttccccttaattcaaggttagttgatttgctcatagagaaaaattccttctatcgtctgagacaagtggccatttttcttctatctcactgctgaatgatttctgtaagcaaatatgatgcatggaatatatattttgattttcgtggattggataagtacaacatttcgctagtattcccgtgtattaattgttaatgcacgaaaaatagcttcctaaactggttattatggaagacacgtttgagtgttgaccttattttctgaatgcttaaatttacagtgataagttgttcaaggagacaagggatctcaactttgaagtcgttgtacaggttgacctttgcccttttggcttggattctttgttacataggattctgtttccttatcttccagatgccatatggtcgcaggttctacgtcagaaggcaatgaccatgaaggaggactacacggaaattaattctgtacgtttgtcgctctcctcctttaggtagacttgttttcatggtagaggtatacatacatatcgaccagacacttattggcacattgtgttaccgactttaagtagaccatgttatgccttaggaatgatcagcctattcatagagtttactgttagattattagttgtatccagatatctaatggggtatggttatataatgcacagacccagacagtttctgagctgaaggactttgttaagaagcttaactcactaccagagatgacagtaagtattgacttgattactatatgttccttttcttatatattgcaaacgttcagatcaaaatttgttccagtttaacttaattggttatgattttttctttcccagaggcacatacatcttgcccagcacctaacgacgttcacatccaagcaatcatttaattctcaacttgatatggaacaaacacttgttaggcagaaaattatgacatgtaagtttctttttagagaaacacttattgtattttaatacttccattcaagaagttttcatgattctttctgttacaagggatgtggaaaacatgttactttgatagcataatggatattgaaatctatgatataattgattattactaactcttgtttttaaatgcagatgctatgagtacatagaagagatgatccataaacaggagcctctcactaatgtcttacgtctattagtcttattttctgttacaaactcagggttaccgaagaaacaatttgattatataaggcaagttaagcttccgtcagtcattctgtattatatatttcaattttctgttttttttttaatcatatcttgtcttcgggtctcaactttcagaatggaactactccacagttatgggtatgagcatgtggttacactgaacaacttggaaaaagcaggattgttgaagaagcaggtttggtgattcttggtttccttttagaattgaatcattttcttatattctatggtgaggtacgtctgacattctaatgtcttggtgtaccttcgtttggttcctgcaggagtttaaaagcaactggctgacagtgaaacggacactgaaacttattgtcgaagacactgatacgtctaggtaatcttctttttagtcatgctgtctcctactgaatacatggtacttcattgacatgattttgttaatgggataaagcttacgaagtaggtcagatgtttaatccagaaatatgagtaccttgataacaatgtgtgacttgaaagctctttttccactgctatatttgaaaatatccctcataatctctaatgcatgatctaacgacagcattgacttaatgccacaaatctcttatgcccttgaaagctcttttcaacttgcaagttttgttgatttgtgaggactccctcgttttctaatgcatgatcttgcatcatcattggctgaatattcagaatttataacattagtaaatctgttttcctccttgtttgtagtatgggatcatctcctttttcatatgtacagtttttcttttattttgacatttagtgtttcaatagtacctatctacagacatctgatttgctaggccttgcaccaacttttttctaatcataaaatcaagttttgaaatcagtttgagttttgaggaaaataaatttcttgtgcaggcctaacgatatcgcttatgtctattcnggatatgctcctcttagcattcgtcttatccaacangctattcattctggatggttagtacgttcttgctttcttaa

SEQ ID NO: 30293 - DNA, 7631 bp, Arabidopsis thaliana landsberg
agtgtgactcatttcatgattaaaggttttgaatatacagtaatcatgttttttcatgcaacaatcatattggacagtttttcgttgttgtctttgccattttaaatgcaaccacaaaactttaatttggccacaaaaagatctttacaaaacaaaaacactgggtccaaccaccattttacgtttccggattaattatatatatgttccaatgatcaaaatagtgagaaactgattaacttattgtaaaatcaagtgttcaaccaaaacaaaagttggaatgtacaaatagtaacgtgaggagaagaaaacaaacgaatgtaagtattacttctagacgttgacgactctcgttacgtggtctcagcagccccttcttgttcgtagtccgccattatttaattgaattgtatcagccttggactttttatcttcaaaataatattcatattcttctgatttcttaaaactaaacctgcattttaagagagaatatatgtgtgtggtttgaattggttatgtgtaaattaacgtctagagaaatttacactgaatttataaattgacttctcaatgtataaattaagtatactaggtcatgaataaagagagataaaaaattttaaatggtaaacgtgtgtaaaaaaaacagatacagtacagttgaccgatttatatattcttttatggttatttcttttattagtctgagtcgaagattctaattggaccatgaattgaaagttggtcttcgttaacttcctccaaaaaaaactaacgaaacaaccactttcttggaagttgccatttttaaatattccaattctatcgagaacgtcccaaaccggaatgtagcttaggatgatgaaaccagttattggtaggccaattcattaaataaaacaggtgatttggtacttgttgcgaatcatatttattggtcgtccaacgttctgttccaatctaatttataggtaggtgtgtcaaatggctaccgtttctcttcctgtttgattcaatagtgaaaatactactattttattcttatttgactcattaatgggccttgttaatattatcatggtccatagttaaagcatccactgtgagtctaccttctgaaaaagagtaaatgaaactgaaaaacaatgtagtacaaaaatgtctcctacgttatgtacatctgaataggctttcgaataatattaacaggcctatgggcccatagaccaacatgtaaatcaattttcaactttactattcctcacaagacaaaaaaaaaaaaaaaaaaaaaaagcaaaaacaactcatgcgtgagcagccgtggagtctgccgcggcggcggccggcgtgagcccagtcaacaaatcctcttgtggtgagccaagcagtagtgaaacgatctctctcatattcggccgcttagctggatcagggtgacaacaagccagacctaacttgagtaacaattcaacttcctccatcgtctcacactcgctccttactctctcgtccgctgcatcaaccactcttcctccaccgtacaaatccctaacccaatccacaagcaccatatcttcctcctccgcgtactctatcggtctcctcccactaacaacctccaacaccaccacaccaaaactatacacatcactcgcctccgtaggcgccgaagcagacgcaagctccggagccaaataccctaacgtgcccaccacgcgagtcgtgtttggagccccaccgtgctcatataacttagctaaaccgaagtccccaagcctcccacgcatctcagaatccaaaagaatgttacttgatttgatatctctatgaatcaccacttgatcccatccatggtggagataattaagcccttccgcaacatcgttaatcacctgacgccttctcctccacggcattggctctttaggattatcaaagatccactgattaagacttccgtttggcatgtaatcgtagacaagcatcagctcgtttttccggcgacaccatcctctcatttgaactagattcttatgctgtaacctacccatactcgagatctccgccataaattctctcaaaccttgcttcgaatcgtgattcacgcatttaacagcaatctcactgttgtttgacaaaattcctctgtaaactttaccaaatcctccagatccaagcagacgatcgttagagaaaacctccgtagctgcagcgagttcttcgtagctgaaacggtgaggccaaaactctaactcccactcctcgatctcttcttcttcttcctctctcattagtttcttccaaatcaaataacccccaaatccgattagagctacgaagacaacacaaccgataacgatcccagcgattgctccagtggaaagagaagaagaagagttttccaggaagaaaacaggtaaattcgtagtgttgatctctcgaagagctcctgtatcactcaagctccaagctagaatccttcgagcttcattccaattggttttggaagcagagaagccagcatacatatctgccgagacataattagcaataacaggatcacggaaagtaagagttggccggcgaggtcgaagcacaccgacgggagcgacggaaacgttgatctgaaagttagggccatcgaaatcgatccaagctcgaacgttgtttccgttacgcatattaaagcgaacgaagcttccattaacagaatcgtagtagccagcggttacggatgtggtggattcaatgttgttaagatcaattccgacgtggttatcgtcgatatcgtttactcagagtttctaccggtgtcgaattcgacggcgaggagaggagcgttgaatctgactgtggcgttagtgaagagaccgaagtattggctggagatagcatttggaggagaggtggaattggagaggacgaagcagaggccgaagccaggacttgtggatatgtcagggagaatggagaagacgaaggaagttgagaaagatgagagtcgggtcgggtttcgggttggatcgggtataattgtgagtttttgtgggtaaaaaacacggccgaaagagagtggatcggagtcgttgatgaggctgattacggtggattctacgcgggaatcttcgatgaggattacgtcggttctgttagttacggagctgaaggaattgtagagaaaatcaatggcggaagaggaagagacgagatgaagaacgatgaggataaggaggagaggggatggccactgccgtcgccgccattgccacgacatttgtgtagatttttccggtgagaggagaaatgtgaatatctggggaaagggaaaagcataataagaccgtcgaggtttcttcttatctgtaccaaaaattctaccaaatcaataagtgagatagagagagagacggtggtcaacgtcgacggctgaaagtcaaaggtattttttacagttgagaaattacgaaacgtcaaacccagtctcgatcggttcattaattagatttaagacttaaccccgctccgttcaagaataaaataatgggctttgacccaaaattagcccaataatgcactactacggccttatcgatttctttgtttctttttccatgtgtgtattatagggacatgtggattttaaaaattgattcggacaatacgccaaggaaaagcatctataaaaactgagcttttacatgagtttttcgtatgaagcatatttcaatgtgagtataagaacacatcatccgttacacaatggtcatatgagtaagtataaaattttctaaaaagagtgagtaaaattaatgtaattaagctttttgttataatagtttatcttcttcgtccaatacatggttaactatattgattggtttttctaattcttttctaataaactaactatgatgcttaggatagttaaaatgggtgggaatgaaactagagagcttccgatcatcaacctctctgacaagaacctaaaacagaacacagagctttggagcttcacgagagacagcgtccgtgaagccatggaacaccatggatggtttgtggccgagtacaacaactttccaacaggacttcaccagtcgattttggaggccgctaaggaactactcgatcttcctgtcgaaatcaagctaaagaacgagaaccacaaggccggacacggctacatcaccatgatgtcagatggccagcctgttcatgaaggtcttggtattgatcaagtcaacgatgttcaacagtgccgcggattctctcgtctcatgtggcctgatgatcatgatgataacgaccgtttctggtaatatatatatatttttatcaaataacataaaacaatcacaagtatttgttactatgtactaacaatatgatatgttatagtgaaactgttcatgcatatgcgaaaatgcaagcggaactagagcaacttgtgataaggatgctattcgagagctataacgtggagaagtatacagagaaatacataggaggaacaaggtaccttcttcgactgctgaaatacaggagacttcctaatggagaacccaacaggaaattcatttctcatacggacaagagcttcatctccattctccatcagaaccacatcaccggactcatgttgaaatccgagaaagaggatgtttggtatcattttactccttcaccaactcggtttgttgttatagcaggcgatgccatcatggtaagctaaaatctatcaaacggttcaagtttcatataatgtcaaatcatgtgtgtatatcaaatcatcaggcgtggagcaacgacagaatcaagggcgtgttaccacaaggtggagatggagagcgtggaaatgaggtactcgttagggttcttttcgttccaagaagggatgatatcgacaccggaagagatggtggacaaggaccatcctttagcgtacaacccatttcaccatgacggacttcttgagtactatgaaacattggaggttcatctcaaggctcaccgtaccatgaccaaggcttattgtggcatcccataaacctgatcattttcttgatcttattataggaaaaaatgtctgcttgtatcatgtattttgaaactaatagtgtgttttagacttatttggttccttgaaacaaaactcaaaatttctactgttttctctatctgcttggtactatagtaaaagctattttgtccttgtttgtctctataatgggccttgtttatattactatgggccttggctaatagttagttaccctcgatcctttttcgaggtttcttttgcagtttggttgtggaaaataaaacagaactccacatgaagtctattatacgaaaaagttaatttctatagtctaatcaataacaatcaacaccaaaagttccataaacatgggccaatattcttctgcaaacatcgagacagaagatatttcttgtaaaattaatgaagataagatagtataatgaatttgttttcgtcattttccttttctttttagagtagacataggcttgtcttagatgtgcgttgtcattttattttcagacaatctgacaaatagcaaccaaacaagatgaattgtgatgggattctgaaaataacaccgtgtagtttgtccttaatgttagtataaaatagattttttagtggttcaatcatagaatttcttgggaccctcaacgcataattttcatattttaatcagattctcattagtggcaacatgtcatggggcgattccagaaagtgctagatttttttgggaaattgcaattttgatatgtaatgcagttcagatatgattgaggacaaacaaatcatattgctgaaatcatttacaacaatttattaatcaaactaactagtagatcacaactattattatctaatcattcttctctgtgatttctaatcattgaaagagctttgttgaagtgagttgcttttgttcgaagatactctttccatgtcaccgattggtatagaggcgattcaacgggactaaccagcttcggtacaggtgatatcttgatatcagattgcggaccccaaaggaatgctacagataaccgggctctggtttggttaacccgagcgcggtgcaacacgcttttaaacaatccattggataggatgtggaagaggtcaccaacgttaaccacgagcgagccaggaaacggtggcacggtgacccaaccaagatcatcgcgaaatacttgtagaccggcggtattgttctggtacagaatggttaggagggtggagtcggtatgagctgctagacccatggctcggtccggttcaggacaaaccgggtagtgatttagctggagagcagcttgggcccagtttaaatctgaactgagactggcccattcaatgtcttcttcgctgaccccaagtgaatttagtgctaaccacatcaatttcgatgccaactttttcatatgttcctcgtactcttcaacgatatcgctgttaattaaaaacgaattgtattcatctaattagtacagatgagatttagacacaatttgcatatacatacattaaatatttgtacgacctttaaataaaatagaaaagcaagttgttgtttttttgttttgttttctccgataagattaaaagaatacatatcttcaaaatctttgagttgggtccactactacactagatttcattatgcacttaactcttaaatccactaaactccgaggacaaggcaaatttcggttgcttctgttatctatgccccttgttactacctatagggcgtccaacgtttgtggatgttctaccttaaatgtaaacattgtgtccttatgtatatgttttttgttaatgtagaaaaaggtctaataaacacaagtacaagtatataggatcgagtgtataaaagatataccagtagttgaggtgatgttggggccaaagtttacggaaatcgttgagaggcgagccagtgatggtgaaaccttcggaccacatttgcttattgaagaaagatgcgatacgagcgacgccgtagccggacacacctgtctccgaccgagcagacttaagcttgcgttggacaggtagcccgaagagactaccggtgagaaactcaatgtcttggagaagtcccaaaggcacgccgtggtctgagatttggaaggcaccccaagttctacatgcatgaccgatttggttagtcgcgtccgggtggtcgaggtcgatgagagggatgttttcaccggtggccggaggagaaggagcagcggagaagaggagatcgtctttaggggtccacttgtaagaatccgggagctcccggagagatgtgaagtcaggtatgtgagagtgtgggaggtgaatgggatggcctctaaacacatctgttaacatagcaggcatcttgctcttttttaattagttttaaaactttgtaaatttgatagatgtttgtgttttttttcttatgagaagtgtggtgtttggtgatgggagattggaagagttagagagttttatttatagtggtggagtagagaccaagaggaggcaaaagcatatgttaaagcacttgttttggtccaatattattggttattctacttgttac

SEQ ID NO: 30294 - DNA, 4384 bp, Arabidopsis thaliana landsberg
  unsure (1)..(4384): unsure at all n locations
tctgcaaatgtggtatgagaaccgaatctgcgagcttatgcggaaatatatatacacacgattcaacaaactgttataagggagattacaagaaaacagagggtaaagcaacagcaccttttccttatttaatttcactaagactggataggatctgatcagtctgtaaaaggtttgctttactctaccttatctaaaagtctaaaccatgtctttgcagctgctcttggtgattcgaatcttcgttgattcgtgttcataaatctacaaatcttgaagagcaagagcctgcaaagttttgaaatttgtttcattagaggtcaaagaaaatcttgaagtgtctatagccaaggcaaattttagatacttttagtccatattatcttatgctagctaaagaaggctttactgcccaacactctagcagagttttttcttaagttcatttgctcttcaaatttccctgctttcagctcgtgaaatcaatagaaagttatatacgactgttgcgaccatcttatagcttaccctgacgagttttggggtttattcctcgtcctcggagtgatatgcagtatttgaagtcatctccgtctcaactgattgaggctttacacctataatcaaaaacagaccaagtgttaagaaacgctcaaaagaccaaacgttaaagaaacactgtacctaacaaaaaaacatattttgacgctgcaacatttgccactgaagaatgcaaacaccacaatctattataaaacagagtgattattattcgacaagaagcaaaagcaacaagattaataaacactacaatcttttcaaccctataaaggaaagactctctatgttattactgatgatggtcacccatttccataactgacatctgaacctgtaaagaattttcaacaactatataacgataagccaagaattgcctaagtgcatctaagaatgtagcaatacctatgcagattatagatactgcaaatgtaaaaaccaaagctttttcaaaaccgaaacacatacgatcagacaattagagttaatcatataaaaaccacctttgatgaagtaatcagagcaaggccatcctcgaaccgatgagattgaaatagattcttcatcagagatcggattggccagcttctcaacgagcttagcgatcccatgagactgggatctaggaggtggaacccaaaaggaagcaccggggacaaaagggagccaatcaggtgcggatcggcgtaccataatccggtggacagcatcttccaacttattgacaagaggatccgcagcgatatcaatctcgtagattactccgagatggttagagttagaccgacgattcgaggattgagatcggatgaaaatggtttgagatgaagggagaagaagagaagnnnnnnnnnnnnnnnnnnnagagagagaaagtgaaggagataaagatcgagccattgtagagatttaggagaaagatggttccttttttttttggtttggtttggttgttccctttttctagtctttttaacggataaggagaaaaagagcattaatcttgtttatcggaatttccttttttaatcctttttctgccctatctgaaaatttactttctccgataagaactgtcttttttcaaaacaggtacatcatgcaaatattttctgagtatacaacaacatgagacacaatcatacaaagcatatactgatgtccaaaaatccaatctgtgtagtttttaagccatactggtgtttaaaagaaaaagaaaaaaattatacactactctagtgaggaagattgaagaatcaaagaactcaaaaacaagagcctattcgtctagtgggccaccagtccactcaaggccggccttttagtcacctgaagttggacccaacccataagtggggccggaaaacaccatataatccaataggcaataaccaatttcactagtttattaaataaaaatatattaatattattaggtgagatatcataattgataagaaaatgctccaacttagtaataattacaatatacacccttagtttaacacattgtaacaaaactctctcaaactttttaccaattaaatttggacagagacaaaaaaaaaaaagtgtgttcttcactttttctttcctcagttggttgtccaaacaaaaaaagtctccaccgctctgagagaaaaaagttggaagaggagagagagagagagcgacaacgcaccaactgttgcggctcaaagagatctcgatcgggatccacaagacggagatagatagagagagagtgagagctaacggaaatgggatctcagctacttgagtgttgcttccgtttcgtcttctactgtcactcccacagctccaactgttttccttgattgttttttttttatctcggcgttttactcggaagcttacaacacactctctcaggtgcgaatcgacgccgtcttctttttgttttctcagattgggtttttgtcttcctgtgatcatttttacttcattttgggggtttaggtattgttttagcttcgcgttttggtacttgcttcaagctctttttcttagtttctgtgatttggggattttgttagacatggcgatctgtgttcgatttctgctcaatcgcatttgaaattgtaattgcttctaaatcccagagatctcactgggtttcaagagatcagacatacaaattgtgattagggttttgtttttttcatgggttctctgatattatttggtttttctgtagcttttttgggggaagtagttgcaagaaactatgtagatctcaagtgatattagtatattacaagttccctgaattagatgtttacgaatagtcttaagtctcagtggtgctggctctgtcagagaaatggtaaaggcttttggcaaggggaagtgacttaatctcaaatgataactagtcccatcaaaacagctctgctagtgtttggtttctgagtctcattttcttagcatttagggatctatcttgcagcatactgtcctggtcgttcttggtactattttcttttgtgggcataggatgttgaaagctttttattccgtgttggtgtttgccaatgtttcgcttgtcacagttctctatatgcccatttctcatgggttattgttttgttctttcagggatttgaaatcctcacgtttcaacacattctgtgtggttcccatctattctctagccagttcggagttgcctgaagaaatcaaatgggttcgagatacgcatctcaccagctcagcaatgggctttttgtgtctggccggccagagcaacccaaagaaaagcctccaacaatgagctcagtagccatgccatacaccggtggtgatatcaagaaatcaggagaattggggaagatgtttgacattccgactgatgggactaagtcaaggaagtctggccccataaccggaggatcgtcaagaagtggtgcgcaatcaggtccagtgcctaatgcaactggtcgtatgtctggcaatttagcttctgctggttcaaattcaatgaagaaaacaaattctgggcctttgtctaagcatggggagcctttaaagaaatcctctggtccgcaatccggtggtgtaacaaggcaaaattccggccctattcctatactcccaactacaggtctcataacatctgggccaattacctcggggcctctaaattcatctggggctcctaggaaaatttctggtcctctagactattctggttcgatgaagacacatatgccttcagttgtccacaaccaggcggtaactacccttgctccggaagatgacttttcctgcatgaaaagcttccccaagcctgtgctgtggctggttatacttatatttgtgatggggttcctcgctggaggcttcattcttggagcagttcacaatgcaattctcctcatagttgtggcggtcttgttcacagttgttgctgcacttttcatttggaatatttcttgtgaaagacgtggtatcacagatttcatcgctcgttatccggatgctgatcttagaactgccaaaaacggtcaatatgtgaaggtcactggggtaagtatctatgcatcctgggttttttgcatttactatgtgctactgctttatcatgggaaatgacgaaatgtgatttggcttccttcctttggtatctctactatgttcataatattggtttttatattttgttcattgaaaaggtggtcacctgtggtaacgtgcctcttgaatcatccttccatagagttcctaggtgtgtttacacgtaaacttgaatatatgagtaccgtggatggggttcaaagccagcccatgctgcacatcgtcg

SEQ ID NO: 30295 - DNA, 1573 bp, Arabidopsis thaliana landsberg
gatgggtattgttgataactcttttttttttttgctaattttttatgaattatcgacggcttacaccatgtcctcttttttttcctggacattgaatgttagtgacaagtctatataggacctaaatacattataataatgaaaactcatagtgcaactaaaaaaatctaaacaaaacatctaaaagtctgacaaaacacaaaaagaaatcctaacaaaatccgataattaagcaaaaaaaacaaaaggaaaataaaaaatctaaacaacaatcttcttctggattttctccggttcagtttcgccggaaagctcctcaagtgatttcccattagtctccggaattgtaaacgtgagaagcaagccaagcaaattgattcctgccatgatgtataacgtgttactcatacccaaagctttaaccaaagcagaaaacccgaaagaaccgaccatcgcaccggctttacccgacgccgcagagataccgtgacaagttgacctaatcctcgccggaaaaatctcagccgggacaatgaacgtagttgcattaggtccaaaattggaaaagaaaaaggtgaaagagtagaaaatcacaaaaccaatccggttagctggtaaagtccaatggtggtacggtacggctaaaaccaacatgaaaacagtcatcatgccgaatccaatgatctgaatccagcaacgtcccagtctgtcgattaatactatagtggcaatgaagctcttggcgtgcgttcatggttttagccgaaggtaatcatccgatagtggtgaagatatccttctggaacaagttttggctgtagaaagcgatgtcgaggagaaaccatgtggtagcttgtccaataggttaagaccgtgacggcgaaggaacttcatggagaacaagccaaactcgtccgaggaaaccctagcttgatcattctttgcggcagaggcttcaatgtctacgttcagaaccttagtcatatctaaagccgcttgctccgcgttcttggagacaagagccgtgtaacgagcggtttcgggcatcttcatccgccagtagtaggtcaagagagctggtaaggcgccgaccattaggatgatcctccacacgtaatccgcctgtgggactgtggaggctgcaccatccaatatataggctcgggacggaaacttactctcgaaaacagccgagacaagtaacgaaacagctcctgcggcaaggatcccaatcccttgcataccgaaaacagctgctatgaaagcaccgcgagtacgtttgttggaatactcggacatgattgtagccgagagaggatagtcaccaccgatgccaaacccgagccagaagcggaagaagcagagagttaccatgacggttttcgggtctcttccaagggaaagaccagaacaaatggagcatatggtcatgatcaagagagtcaaaccatagactctcttacgtccaagcttgtcaccaagacacccaaagaaaatctgtccgataaacgttccagcaaaggccacaccactcacggccgcagagatgccgtcagggaggcttccgggggag

SEQ ID NO: 30296 - DNA, 1544 bp, Arabidopsis thaliana landsberg
tggattttgattcaggtaaagtttacgacgtttccgattgggttaaatctcatcccggaggcgaagcatttattctcaatctcgccggccaagacgtcaccgacgcgttcatcgcttaccatcccggaaccgcatggcaccacttagaaaagcttcacaatggctatcacgtgagagaccaccacgtgtcagacgtctcacgtgactaccgtcgtttagccgccgagttctccaaacgcggcctcttcgacaaaaaaggtcacgtgactctttacacactcacgtgcgtcggcgtcatgctcgcggcggttctctacggcgttttggcgtgtaccagcatctgggctcacctcatctccgccgttttactcggtctcctctggatccaaagcgcttacgtcggccacgattccggtcactacacggtgacgtcaaccaaaccgtgtaacaaactaatccagcttctctccggtaactgtctcaccggcatctcaatcgcgtggtggaaatggacgcacaacgctcaccacattgcttgtaacagccttgaccacgatccggatctacaacacatcccgatcttcgccgtctctacaaaattcttcaattcgatgacgtcacgtttctatggcaggaaattaacattcgatcctctagctcgattcttaatcagctaccaacactggacattttacccagtaatgtgcgtcggaagaatcaacctcttcatccaaacattcctattgctattctcgaaacgccacgtcccagatcgggccttgaacatcgccggaattttagttttctggacatggttccctctcttagtctcgttccttccgaattggcaagagagattcatcttcgtcttcgtgagcttcgccgtcacggcgattcaacatgttcagttctgtttaaaccatttcgcagcagatgtgtataccggtccaccaaacggaaacgattggtttgagaaacaaaccgccggtacgcttgatatatcgtgtagatcgtatatggattggttctttggtggattgcagtttcagttagagcatcatttgtttcctcggcttcctcgttgtcatctccggacagtatcaccggtggttaaggagctttgtaagaagcataatcttccgtataggagtctttcgtggtgggaagctaatgtgtggacgattaggactttgaagaacgcggcgattcaagctagagatgcgactaatcctgtgttgaagaacttgctttgggaagctgtgaacacacatggctaaaaaggtgtttcgtttgtggagtactttttaattagattgaactgttttaggtgtaactctaccgtgataaaaactccataatatcatacttattttgattttctgctgagtttataattttctaatcgctaagcctaaaaatctattttgataaacaaatttgtcagacgtgcgtacttgttctacgtaaaagacagatcgtgcgggtctaaatatacatgacaaagtactactccaccgaaaaaaccgagcttttgaaaaaaattg

SEQ ID NO: 30297 - DNA, 3033 bp, Arabidopsis thaliana landsberg
  unsure (1)..(3033): unsure at all n locations
agccacaaaaggggtttatcagtcaatgtaccggcctaaccactcccataaccaaaaccacatatccaaacgtggtttttcatttggtacaaaaacccacaccttaatttcacagacgaaattttggttgataaaaagtaaccatcttaaccagtctctcatttacccccaccagatatacatatgcttatttaaaccggatgtaacacaactcttcttcacatggacctcaagtaaaatggaagcaaacactttgtttcttctaaaagctctttgtcttctttgttttaatgtatgcttcacattagcttccgaccctgatcccatccaagacttctgcataccaaaacctgtgacatctccttaccatgaccatcacttctccaccaatctcccttgcaaaaactcctccgaagtaaccaccgaagattttgtcttttccggtctaaaaactgccggaaacttcacggagacggggttcgccaccgtcccagtaggcccagaaaacttccccggccttaatacattaggcatctcgtttgtccgggctgatctcaaacccggatccattaacccaccacattaccatccgcgggcgacggaagtagcccacttggttaaaggacgggtttactctggttttgtggactcgaacaataaggtttacgctaaagtgatggaagaaggagaaatgatggtttacccaaaagggcttgtacattttcagatgaacgtcggagatgttacggccacgattgtcggcggacttaatagccaaaaccctggtattcagaagataccgtccgtggtttttgggtcagggatcaatgaggagttgcttatgaaagcttttgggttgagtcttaagcagattggtacgttgaagaaaagatttgatcctgtcatgtctaatgaacattgatgttttctcttaaagtcttatcgagattattacatcgaagttatcttttatgtgatggtagttcttgatcataatgttatttatatattttgacccaaacaatggtcatctttagctagacaatgtttctttctacatgaattattatcacttatccacacttcacatttagaatcctgaattattatcactaaacctacataattttggcaacgtcacaagctttgaaaatttgacaatatcttctccaatccacaaaatatatcaaaatcaatgccagttcttctttgctataaggctctaaaggctgcaaacaaatctccaatttgtcgtgacactagctaatttgatcgctgtgtactcttgagtatgtgagaaaaagaccagagactttgacactagttaacttggaagctacatttccagcaatagaagaaacttgctatctgagcataatgaaacgctgcgttttaactctcatttattctttggggttaaactcatcgttttaatcacacaacagagaaaaggaattgttaaagccggtccggtattaataattatcgagctttgcagtttcggttcacttgtttaataccgtaccgacaatttcggtttaattagatttctatatactcaatcaatatctctattccctccacattcacaaccttttcatggatcagccacggcaaagctcgacggcgtctcagccaccggaaacacctcctcagccgtcggatnnnnnnnnnnnnnnnnnnacacagattcaaccaacgccttccacaaatccgagtccctcctgcgttgtttcctctattccctcttccccagctccacaatcaccatcgctcaatccaaaccctaatcctcctcaatacacgcgtacggtgacatctccggcgacgcaacagcagcaacatctctcccagcctttagtacggccgcctccgcaggcgtactctagaccatggcaacaacactcctcttacactcacttctcctccgcttcgtcgccattgttatcttcctcatcagcgccagcctcttcgtcttcgtctttacctattagtgggcaacaaagaggtggtatggcgattggcgttccggcttccccaattccgagtccttctcctacaccttctcaacattcgccttctgcttttcccggctcttttgggcaacaatacggcggattaggtcgtggaactgttggaatgtcagaagctacgtccaatacaagttcccctcaggtggattttgttctctcatatgtgccacatttcaaagaattgtgctctgttacaaaaaaaataccaacttttttctgtatgtgtgtgttcaggttagaatgatgcaaggaactcagggaattgggatgatgggaacacttggctcaggttcccaaataaggccgagtgggatgactcagcaccaacagagaccaactcaatcgtctctaaggccagcttcctccacaagtacccaatctcctgttgctcaagtatgtattttttacccttctggcctctgtatcttgacataggaactccagctttgtgactcctttgttaacaacaactttgtttgcacactttaattccttatattttacttttggcagaactttcaaggacatagccttatgagaccttcacctattagctctcctaatgtccaatctactggtgcatcacaacaaagcttgcaagctatcaatcaaccttggttatcatctactccccaagggaagccgcctttgccacctccttcgtatagaccacaagtaaattctccctctatgcaacaaagacctcatattcctcagcaacatatttctacgtcagcagcaactccacagcctcagcaacaacaatctcaacaacaacatcagcctcaagagcaacttcaacaattgagatctccgcagcagcctttagctcacccacatcaaccaacccgggtccaaggtttggtaaatcagaaagttacttctccggtaatgccgagccagcctcctgtggctcaaccaggaaaccattgtaaaacagtttctgcagagaccgaaccgtatgatgatcgtatcctggggaaacgaagcatccatgagc

SEQ ID NO: 30298 - DNA, 1036 bp, Arabidopsis thaliana landsberg
gtgacttgatggttgtcaggttgaatagccataaaatttccccaccaggtactggcaggaccacggagttgttgtgcggcgaacaacggcttctgtgtttctgagcaacggagaagaccaaacttttgctcgataacccgaatccattcgtcagcttctaggggatcttctgctttgacgaatagaggtggacgagtttccgagaaatccagataagtggtctcacgaggaccttgcggataacctcttgctgcttgctgttggaattgctgctgacccgccatttccctaaggaagcgggtattatcggcggtggcattcaccaaggcggcgatcgctcggctaacgtgggaggaactggaggtgggtttggggtaacatcactacaaccttttaggccttctgtgacaatatgattacatcactaactagtgtttatttgtcacatattatattttggtgacgccattgtgacgaaaaggacatcgtcacagaaggtgcgtgttaaatagactacaatgacaataacaaaaaagtgtcataatagtttatgacgcaaactacaaacgtcactaattctatgacactcaaattcgtcactaattatgtctaaatacgtcacaattcatgtagtcgtgccttgccacgtggctgattacgtggcgagatggcatggcagttgacgtggtaggtgatgtggcgaaaatgttgtgacgattttattcgtcacagatgttattacgtggcatgccacatggcagatgatgtggcaaaatgatgtgacaaaaatgtttgtcataaatatcaatgaggtggcagctgacgtggcaatataattgtgacgatttttttcatcacaaagtacgatgacattgcgatatatttatgacggatttttcatcataaggcgtgatcaattcatagcgtcatggaatattatgaaatcacatgctaataaccaaaacattgaattatttagttcaacattcacacaattcatacaagagatacttttataacttcaaatcatatgatt

SEQ ID NO: 30299 - DNA, 1226 bp, Arabidopsis thaliana landsberg
  unsure (1)..(1226): unsure at all n locations
ctactgataatacccgctttctgagagaaatggtgggccaacagctccagcagcaaggtgggcggggttatcaacagggcccccgcgaaacttcctacctggacttctcagagacacgtccacccttgtttgttaaagctgaagatccgttagaagccgatgaatggcttcgtgtgattgaacaaaaattcggacttctacgttgttcggagacccagaagcctttatttgcagcccagcaactacgcggccctgccagcacttggtggggaaatttcgtggccnnnnnnnnnnnnnnnnnnnnnnnnnnttgggaagaattcaaggtggccttccgtgagcactatataccagaaggtgttcttcacatgaagcaggaggaatttatgaagctgaaacaaggaggggatactgttaatcagtatctcaataaattcaatcatttatcccagtacgcaatcgatcaagtgaacacagatgtgaaaaagaagaattgctttatgagaggttaaatgatcgactacaaataaagatggcaacctacatagatcttacttatggaagagctgtcagtacagcattggcagttgaagcaaagtatgcaggcgccggaaaatccaagggttttggaggtgacaggcctagtcagggcccggtgaaaaggcaacgatttgttatccggccttccaaccagaatcactctttctctcgtccaccctccttcccttttaagcagccagtatttattcgtcccaataatgcccccactgcatcaagtcagcagggtgcccaggcacttgattccctgcccttcccagttcatcgactggatgtttcaattgtgggaaatctgggcgttttatcaaggattgcccttatccaaagcagaaccagtcaaataatcagcaaggatctgggaattcatctcaagccaagggaaatactatgggcaagaatactaagaagacgggacgcatatattatacacaagtggccactacaccggatggtgagccggtaatgatgggtacgttccttgtggccaatcatcccgcagttattctctttgattctggtcgtcgcatacattcatcagcaagaaatttgtggagcaacattgcatctcatgccatgaattaaaagaagggtttaaaattcactcactagggggacaaatatttactacagaagtggcctatcaagtgcccgtaacattgtccggacgg

SEQ ID NO: 30300 - DNA, 2047 bp, Arabidopsis thaliana landsberg
  unsure (1)..(2047): unsure at all n locations
atttattaaatagttaaattatgaatcaaatcgttgagaatgaattacaatttgtgggagtttagtttctttctatagcggaaaaaagggtattaaacagagaggagagatatctggtttgatgtcttaagaccagtaataatagtgtgtactaatgtaatggcttgaggtggaaaacttgacaagctggtttgtatgaactcttggaagctgcttgttcgaatttcttgcttgctgcttcgttttcctctaagatcgtctgtgagaagaaacggatccaccacgacgagctacgcattttagcctgcaagacattggaattgcaacaagttagcaaacaggacaagtacgaacctaacccacatctctgaattgatggatgtaatgtgtggtttcattcatcacgacaacatggttttagcgaacttacagaaaagtcaanatttcgacaattccgcacctttagccttttgttgaccagggttacctatatagtacatgaagattaagtgtaatcagaccggatttacaatctctcagtctcagcttttttctaacgggtttggttttagttacctgctaaaagaacgacaccatctgaagcgacgcgagcaagttcaggcacagttttgttcaggtacctgggtgagaggtaatccaaagcgtctgagacgatcacaagagaaaacgactttgaccggtaaggaagagggaatttgatgtcagccacacgtacaaggcctttgtgcaaaagacttttgcagttagagtctgcatcctccacatcatatggttcaacaccccatgcttctgtctcttcttcattcaacagactcgagaccactgagcatgtttcaggacccacgtgcaggactttgcgcatgctatctccatacgcactcttaagaataggaatggctctttgaacttctgctgtgcaagaatagtcacctgtagagagggttgttaaacaaaatgttaatgtgaagagtcacacattcttgcaggtaaatttagaaagtcatcactgtttaaacattatcatcataaacacttatattgaagatgagaaacaagaattacctgtaatcttgctgacttctctgatacttttgaacatacctgtagtaatacacatgcattgtcaccattagggcttttgaatcgaaacctcaagcaaaaacaaatgaatcttattatatatacttagttgaagagaatacacacctggaccactgtaagcataaccaatgagaaggcatgctccctgtaaataaaaaggattacatcaatttgtatcctatgaaacgtattacttaaagattacaaaccacgcaaagatcatcataccacgagaacaaggcaaactgataacagaggagacgaacgtgattttgaatgcagagctcctacaaatgggaagcttccactatcccctacacgccttacttgccttcttgacatggctatgattcttcaaaacttttttttagaccttcaaaccaaaatagacattagaatagattcattcaaaactttttcttataacctaaaacactctctgcattacccacaaaattcaaaaatttgatttcaagctacttccttcgttcagtgatgcaataatcattaatgcataaaagaattaccagatatagaatcaatttaaaataatagatccatgaatctggtatacaaaattaccaaaacagatttcgctcaaacccattgtaccatttcagtaacataatagcaagaaattaccaagcagaacataaatgcacagaaacaaatcactaccaatggatagatccatgaaacagaggattcacgctacaaaaaatccgataagcggaagataaaaaaacacaaaatcaatcctgaagaattcgaagaggaagattaaaaatgtacataccttgaataaacgatttgaagtaaacgatgttcggatctaaagatctcagatccgaaaaaatgcttcttctgtgttctaagctaaaatttactaaacgagagcttcttcgtcccttagtgtaattatcta

SEQ ID NO: 30301 - DNA, 2584 bp, Arabidopsis thaliana landsberg
ttctgttctcctattgtgcagtttgtgaaggaattgggtgatatcaaatcacagctagcagcaacacatgcaactgcagaggcaagtgctttgtcagctgaatcagcacattctcattgtagagtgctttcgaaacaattgcatgagaggaccggttctttgaaagagcatgaggaccaagtaactagacttggtgagcagctagagaatctaagaaaggagctgcgagttagagaatcttcacagaagcagctaagagatgagcttttgaaagttgaaggtgacattatgcgggctgtatcagtggtcaagaccaaggagaactctgaggtgcggaacatgctaaatgaagatactccaaagaattctgaaagaatcaacaaacttttgacggctaaagatgatgaaattgcaagactgagagatgaactgaagattatatcggctcactggaggtttaagaccaaggaattagaagatcaggtaacaacacgtcatgctttagcatctcttagttctgtgatttatttttggttttatgtagtaaagcctttgttcttctggatcaggtggagaatcaaaggagaattgatcaggagctgaagaagaaggtgctgaagttagaattttgcctacgagaaacacgcatccaaactcgaaaacttcaaaaggtacactcactttcttttacttgggataataatcttgaatccaataccaatcgagctgcttttctgcgggatggtagatgggagagcgaaacgatgtggcaatacaagaactcaaggagcaattggctgcaaaaaaacagcatgaagctgatcattctagcaaccaaaacttgtgggacaaatcaggtttcaagattgttgtctccatgtcaatgctgatattagttgcgttttctaggcgttgaattagcgatgaaatcattttagatcatattaaaatagttagacagtaccctccagtgtatgaaggattaagatacacctctttgttacaatgtctgagtttccgcttttggtcctaaagagatattttaaaaacaaatcaaccagaggttttctgtacaaatccgaagccttagcaataccgtcgaaccaaagaaatttataatgtcttacattcctagcttcttcctaggaagatactctaaaagagctttaacttgtgtgtcataaagctattttgactcctacatattcttctacttctaatgaaatagcactgcgtgaagaatcaatgttgccaccatagcatgaccaaagtgaatcttcaagtgtgtagagtctgatgatgttggattgttcccatttggcgaaccatcaaaaccgtaaccacccgctaaacctcctgaggatggattgtttagcgtatttgatgtaggatttgcggggttaaaaatcgttggcggagttccaacccttgaatataaatacagagaggtacatttttagttaagaaactctaatgaggctttaagactacacaaaagagttgaaaagaatgctcttattacccgattatcccgcctcctgttggtattataggtgttgatgtgacaggaggctggttcactgtttgtgttgatggagttggtgttgttgttcctgctgtcattggtgttgatgtcgatgaacctgtctggtatatacaagaaccagtgcctgttttggaacaacaatccaaaccaaagtcaatcaaagccatctaactgaaaacaagaaagaaaaagagaaacagagtatcttctgttttttctcactcacttgggttggtgttaactaatgaggctgcaccgccaaaatcacagctttgtggagaaggattcttctggtaatagctgttgaaggcaaatgaggcatgtgctctcaacgagttggggttataacaatttcctgcttcttgtatctcagagcagtctgctccaccgatcccacatgcatagtccaaagccgcttgtaacgccatttttgcaacgttctctctagcaacgcaccagctctgatcacctgggaggctacaccgtgtggtgacgatggaatcgttagtggcgttgtggccaccgcggaagcgtcagagtcggagttagggaccacggttgttggtgtggtggttgggtttgtggctaatggtgtggttatgtctttttcttcttctattggttcagtaattgcttttgtacctgtcaaaccatagttaatgtttttatttattgattaaggtattaaaaacagtaataatgatgtctaagtctaagatttggttggtaaagttagaacattaattgtcatgtctctaacatttgtttcaccaatttgtaatttatgtaagtggataaaaaagataaagcgagttaggaaaacaaaaagtaaaaaaacgaagaccaaacctcagaaaccataaacacaaagacaatagagaatctttgaactgaacaagaaaaagtaactactagaatatttgcaagcttgaacaccacatcaattcacatgtgtaagaaccttttttttttgaaattggagaagaattaccttttcagagtattgataataacgaaaataaaaacattaggaaggaa

SEQ ID NO: 30302 - DNA, 1189 bp, Arabidopsis thaliana landsberg
cagcaagcagcaagaggttatccgcaggtccccgtgagaccacttatctggatttctcggaaactcgtccacctctattcgtcaaggcagaagatcccttagaagctgacgagtggattcgggttatcgagcaaaagtttggtcttctccgatgctcagagacgcagaagccgttgttcgccgcacaacaactccatggtcctgccagtacctggtggggaaattttatggctattcaacctgacaatcatcaagttacctggaatgagtttaaagcagctttccgtgaacactacatccctgagggagtgctgcatatgaaacaagaggagtttatgaagttacaacaaggcggagatactattactcaatatctcaacaagttcaatcacctgtcgcagtatgccatcgaccaggtgaatacggatttaaagaagaagaactgttttatgcagggactgaatgatcggctacaaaggaaaatggccacatgcatagatctcacatatggaaaggctgtcagcacggccttatctgttgaagccaagaacacaagttctgggaagaataagggattcggtggtgagaggcctaaacagggccaggcgaagaaaccacggtttgtgatccgaccttcaagccaaaatcgccctttttctcgtccaccttcatttcccttcaaacagcctatcattatccgccccaacaatatccccactaccccaaaacagccgggtgccccaggcatcgattccctgccttgcctagttcttcaactgggtgctttaattgcggcaagtcgggacacttcatcaaagactgaccaaattcgaagcggaacaactccaattatcagcaaaacccgggaagttctagccaaggcgagggaaacacgacaaataatgtagtggcaagaatatgaagaaaactgggcaaattctatatacaccagtggccacgacacccggaggagaaccggtcatgatgggtacgtttctccgtggcaaataccctcaggtaatccccttgaattgggtgcctcacatacattcataagcaagaagtttgttgagaaatattgcattccatgcattgaatcaagggaagagttcaataattcatccgctgggggacaaacattcactaaagaaatggctttccatgtgccataacattggctgcacgggag

SEQ ID NO: 30303 - DNA, 3874 bp, Arabidopsis thaliana landsberg
ataaacccgcagttcatgcacattccatcattcaatatggaccatctcatgctttagtatttggacgcgttataccaaatttattctgtgaattgaatagtttatctattacgttatctctcgttaattcgttaatcaattcggacatgttattattattagactcgggacactggtatctaaggtaacatgctaatcatggctcttatcattcctaatccctttgtttcagcttattattgttgatgaatgatgattatgtgtatctatcgatatttatatataatatgctaacggattgtatttgtttaagttatttttgataatgatcctaatttctttgttattctttcactctcttctctaatatatacatcacctaacaaaaagaagctcttatgtattactattgtaattgattgagttgatatattagcacttgtatgattaaaggcagtcggaactcagcattatattttagcagaattaaccatgtataaaaatgaaatcactagtgtagaacaaccttgagaaatgcatgaaacatgctatcaagtggtaacttaatcataattatatacttttgattgactgataattgatatatcatgggccacaattaactcaacacagagccatttttaaatgttgtttcaattggaataaaaagatatataaaagaattatacccaatgaaaaaagagagagaaaaaggaaaggtatagctcttatataaaagggttgtggtaagggatacttttccaagaccaacacacattccctctcttccttcaactagaaaaaagatagatatatcggacatttattgatctgtgtatgcataaaggtatagtatcattattagaaagatgaacacaacatcatcaaagagcaagaagaagcaagacgatcaggttggtacaaggtttcttggggtgagaagaaggccttggggaagatacgcagctgagattagagacccaactacgaaggagcgtcactggcttggcactttcgatacggcggaagaagctgccttggcctacgatagagctgctcggtccatgcgtggcacacgtgccagaaccaactttgtttactcagacatgcctccttcctcatccgtcacctccattgtttctcctgacgatcctcctcctcctccacctcctcctgctcctcctagcaatgatcctgtcgattacatgatgatgtttaaccaatactcatccactgactcgccaatgcttcagcctcattgtgatcaagtggacagttacatgtttggtggctctcaatcttcgaattcttattgctattctaatgacagtagtaatgagctgcctcctctcccgagcgacttgtcgaattcgtgttatagccaaccacagtggacctggaccggtgacgactactcgtctgagtacgtacatagtccaatgttcagcagaatgcctccggtttctgactctttccctcaaggtttcaactactttggctcctaattctttctcatcgtccatatttaataccttcctcatttgtaccttttccttcttcttcttttttgggtttatctatgtttcgccgtccttgatctctgcctatgtgatcaaagtgactgtttgtcattagtttttcaataacaagttatcatttgtatcttgattaatgaaaacaagaaactgctcttgtgttactttcaaatacatatttaatatatatgggccttggacatcaaaagcccattattcgatgggttattagttggcatgatatactttgtatagcccaaacctctgtgtgtttttcttatggttgaacgagaactatattctaggatggaataacaatttgttattctacttctgtggttttggtatttgcttacgtaatgtaaattatttcatatttgatgggttcttctggtaacttacctgttgaggatggtcaaacgatggtagtaggtttgactggtgaaccatgtctacctatcttaaaagctggtcaccaaacataaaaattaaacaagtacaaaagtgttttagtaacacccaaaatagtaaactaaggtgatatgatgatggggatgaagtttttctctttttacgttgtacttcttctagttgcagctagctcggggatgcggataaatgggcagagcgtttcgtgtctaaaccaacttgctccatgcctaaattacctgaatgggaccaaggaagtacctcaagtttgttgtaatcctctcaaatcagtgataaggaacaatccagagtgcttgtgccgtatgattagtaaccgtgggagttctcaagccgagcgagctggcatcgatgtcaatgatgctcaaatgttgcctgctcgatgtggagaacatgtcaatcccattgcttgcttgactcgtacacactcaaaccttagttctttctttttttttcaatcaaaagatgtttcatgaatattttgtgttcttgcaggttctaaaggaggatctacaaactcagaccgaagttcctccattggcaacaccttttctcagtcctattggatgacaacattagctattgcagccactgttttgtcatattgccatcaactaattagctgaatctctcattgtctatagcagctttgcaatttgcttgttaattaagacgattgattctttttttttttaatgctctatgagttaattatgattattggtcgtcaccaacacattgtatgtaccacttcgtccccataagtagtataaatccatttctattagttaagaatgtgaaacatcatgctcatgtagtcatgttgcaacaaatcaagcaccaatcaatctcttcctgacaaatacaatattcaattaccaactaccgggaaaatccattataaaaccggtttaaatagtgcaattaattgtcaaataaccgaaaaagtcagctggtttaacaatactaaccggttaacttaaaggaacagttgaccagatcgtcctctctattcctctcttaagcagatcggagaaagtttatcagtcatacaaatcccgaccaacaacaacaaaaccctaaaatcaagcttcgaaaatgggagagatgatgtacaagctcttcgcttcagcgtcactactaaccctaggattgtatcatctcatctgcactttcttccatctcctcaaatctcctcaatcctacgccgcgaaacccttttacccttttccacgtctctcctccgtcaccggaaacaaccaccataatcacaaccgcctccaaaatctaccactgttcatcctcatactctctctattcgtcgctttccttcacgaaaccctaatctccttctactccgatcccctcgtcaaaggaagtacacctgttcaccgattctcatctctcaattccgccgccgtgttcttcctcttcctcctcatcgccatttactatctcctctccgattcaacctcgttaatccctctcccttccgatctcctcttcgcactcgcttctgtaggtttcttcctccattactccgccgcgtcttcatcagctgcaattcaaacatcggatcttcaagctcattgtgattccctctctgctcgtatctccgcgttatgctctctcctctgtttgcttctcgcttgccgttcaagactctttattgctgacgctgctctcgctgctgccatttgtcttcaaggtctctggcagcttcagactggactctctctctacgttgatgggtttattcctgagggatgtcatcgtcttcttgatgttcaaagcggtgttgaaggatcaacccaatgtgatattcaggactctaagctaagagctgtttcaaaaatggaaactaatgttcactgtacacgtcgtgcttgtgg

SEQ ID NO: 30304 - DNA, 2824 bp, Arabidopsis thaliana landsberg
gcaaattatctcgctcattacgagtagtgttgataagtccttttttttttcatttcaatattctacctgaaaaagattccaaacttctacttttctacacttgatcaccactctaatcgaagatttatgaacaatagactctttaataaagtaaataaatcatttaaaactaactttgtttgttgtcttgatcatatgtgttcaaattggttttctcttctattctctacattaaaacatcctccaacattcagttttctcactctcaatgaaccagtaatacacaccctaggtgcactagatttcattcaaaactaaatctggttcactaaaccaaaccatattgattttcaggaggaaaaccactttttttagtgtgtagtacgagtaagtttacaccctgagatgcagggttttttctttgtcttttgctaagtgcgtgagatgcagttttacccctagttagaggaaaacaatgaatttgtgtaattttaacattttcttgttatgaggaatatgctctcaataatgagaaccatacaagatacaacaatgacataagccaagttgtcataaaaggccaaatgtgctttaatgtgtgatacaccgctttacactggcctactctttcacttcacgtcaagttcgtaaacgaagagacaatctctacgtgccctcaccttcacccttccccatcatcttctttttttgaaatcaaatttgacggcttctgttgtcacaggatatattatagacaacaaaactacatatgatacaaggcatattcgagttctgatcattcacaataaaatacatgtgatagaagcaatttaaatatgtgcctgaaatatataaatcaagaaagccattaatcaaaggttaaagcaatatggattgtacgtgttgagtgtattttttttttttttgtcataccaagaataaaaacatcaggccgagacagtagtataagcgagggaagagatagattaggtcctcaattcaaaggacaccaacttttgatattttatagctagcagccgtaaatcatatttgttctatttttagcaatacaacatttcttagacaccaaaatcggtttagttaatcagatttcaagtatgattttatgagattctaagcatggatgattcttttcattggctacttttaaaataacagaaaggatctaaattttcatttgtagtaaatttgaaaacgttggcgtggacttgcatatatatttagaaaatcgtacagtggaattggtttaattggtaaagttttctaggaatgatgtagacgaaacaaataataagattatcctttaaaaattcacttataccacaatcaaatccatattgaatctcactcagaaccctgataaatatccactctcagtccatatatcactcaaaacttcaagaaaaaaagattcttcaaaagagcaaaaaaatcaatggagagagcaaagtcgaggaagcctcatatcatgatgataccatacccacttcaaggtcacgttatcccttttgtccacttagccatcaaacttgcttctcatggcttcaccatcactttcgtcaacaccgactccatccaccaccacatctccaccgctcaccaagatgacgccggtgacatcttctccgccgctcgcagctccggccagcacgacatacgttacaccaccgtgagcgacggcttccctttagactttgaccggtcactgaaccatgaccagtttttcgaaggcattctccacgtcttctctgcccacgtggatgatctcatcgccaaactctcccgccgtgatgatcctcccgtgacttgcttgatcgccgacacgttttatgtttggtcatctatgatttgcgacaagcacaaccttgtgaatgtctcgttttggaccgaacctgccttggtcctcaatctctattatcacatggatctcctcatatctaacggtcatttcaaatctcttggtaacactcttaatcatgttaatgatatgtttattacgtagtataacctaattatatttatatttttttaaaaaccaaaattgtgaggattgtcacaactcataggtatttggaaatttgtgtattatctcagaagaaaataagtggaaatttatatttacatcatttttgtttttgaaatatgtgccagatacccgtaaagacgtgatcgattacgtaccaggggttaaagcaatagaaccaaaggacttgatgtcatatcttcaagtaagcgacaaagacgtagacacaaatacagtagtatacagaatattattcaaggcctttaaagacgtcaagagagccgacttcgtcgtatgcaacacggtgcaagagctcgaaccagactctctctcggctctacaagccaaacaaccggtttacgctatcggtccggttttctcaactgattcggtagttcccacaagcttatgggccgagtcagactgtaccgagtggcttaagggccggcccactgggtcagttctctacgtctcgtttggtagctatgcacatgttggtaagaaggagattgttgagatagctcatgggcttttgcttagtgggattagtttcatttgggttttacgtccggatatagttggatccgacgtaccagattttcttccagccgggtttgtggaccaagcccaagatcgaggtcttgtggtccaatggtgctgccagatggaagttatttcaaatccggccgtgggagggtttttcacacattgtggatggaattcaattctagagagcgtttggtgtggtttgcctttagtgagttatccacttttgacagt

SEQ ID NO: 30305 - DNA, 1911 bp, Arabidopsis thaliana landsberg
  unsure (1)..(1911): unsure at all n locations
aacactatcaatcattatggaattataagtgaaattgttttgttctcaataccagagaggatagaatgggcttcagaattgttgaagtgacacaacttaattaagcttagattccaatatttttcccactcatattttgtcggtaagcacatttctaattaaggtttagataacaatatttcccccactcagattttttatctgcaaagttattttgctgaaaatgatagaagcaactgaaatttttaagggaaccttatttaatcacggtacttagtatttttaatataagtatagttttactgttattggatttgtgatttagaaagtaggatcaaaagtttaaggataatttattacaattaggtagttttaacttttaaaagtagagttagaaaattggtaatttaaagttaaaatttgaggaataaaactaatgaaaggataagtggacgttttttctcttaagaaaattaaaaacaaaaaatattcagtccattcaatttagattaactctaaaattttagaaaataatatttttagttgattaaaaaaccttaataaataaacaattcttggaaaatgggaaaataatcgattgaccaaaataaatgttcacaacctcatgtaccattgaccaaatatttttccacaaaacccattcattgtctatcataaatactttctacggatccatgtaacattctttggtcttttatttttatttgggtaggacattcattctttggtctttgatggacggagatgcatactcgtcgagcttattttagtctaagttgtacactgatcgattcccacgtcaagtatttggtgcatgttagatggngattgttcttgttaaaattaattggttcaaagtgggtggtatattaattttatggatactattttatcatcaaaataatgtccactgaccatatacgtttcaattgattggttaattctatttttattaaataaatagctaatggttttaaattgcaaatctcaattaaattaaatattttataattatttttaatcaaccaaataacaaatttggtttttgtaagataaatctaatttgagggtaagtgtgatatgatttaatatgtgccaaatttagaaaacgataaacaatatactccttatgttattttttgtttgattttttaaaaaaaacataaatattaagaaaacatattaaatgttacttttaaatgtattgttttttttgtgatttacaattttcaataactttaaaccaatgatattcactaatttgtattgaagtttacaatttatcaattataactaataactattgtattgaaaatttaaaaaatcaatctttttgaaacatttttttttctaaacaatcaaacaaaaaggaacagagggagtattagaaaccctctaacccaacaaaaaaatgtaatgtataatgtgttcataaacagcaccaactacccattataattatttcatgaacacaattgtggcagaataataatgatatgtcaaactgattaatgcttaatctttccgatttcagcctgtaaatattgaagtagccgacaacaagaattgaaaatcgcacaaattaggataacgtagaaaaatcatgttcgaaatggtaaaagttatgtaaacttaatttgaaccgagttatgtagaggaagaagaatgaacgtagacatgcctaagtgaatcttggtatgatggcttttgaattattgaagaaaagaagaataaaagtgttagaaagaataaattggcattataataaggaataaattctaagtgaatctagtattatatagttttttttgtaacactctaatactgtccgcgttatggccgccccatatggcccttaagacattaactagaagagaaacatacccgggg

SEQ ID NO: 30306 - DNA, 2470 bp, Arabidopsis thaliana landsberg
  unsure (1)..(2470): unsure at all n locations
gttggctttggccttatctggtcgcgaccgtaattgagtccaagttcgtttttgcgatttgggtctcttaatcagataattgttttttaatcaaagagggatcgaataatattttttataagattactatagttcttaatcgtattcctcgagagggggaatatgaatattgtacaaggaagatagacccaccataaattatgccaacttgtcttatgtttatagcatatttctctatagtatttatattaatgtctcttgtgacttgtcgcgtactaaaactcctatatgaaattgcaggcattcaatttaaaagtatatatatatccgttaaattgaatttgaaacttgtaatgttttccattcagtaaatcacacaccgttcgttaaccacgaggcagcacgactgtcattatctgatgagttcacacaacagagaatcatcaaactcgtcttgataaacttcaacagataccataaagtttcaattttttttgagaagtcgaacaaaagccaaatcaaagtgttaaccatgagattcttgttaaccaaaagagcattcagaatcttcaccccacgtttccagagactgtgtttgacttcttctccattctcctcaacctcagattccagcggattccccggcgattctgcgccggaatcatggagaactatggagggtcttctccgttcccctgcaaatttctctcctttatctccaatcacgttcttggagcgatccgctaaggtttacagagacagaacctctcttgtgtttggttccgttaaacacacttggttccaaacttatcaacgttgtctccgtcttgcctctgctcttaccaatctcggaatctctcgtggcgatgtggttagtctctttaaattgttcaattttctgctctgattagggttctcgatttaggtttagtgataaaagaggaaccttttataggttgcagctttagctccgaatgttccagctatgcatgagcttcatttcgctgttcctatggctggtttgattctttgtccgcttaatactcgacttgatccttccacattgtcggttttgttagcacactccgaggccaaaatcctctttgttgatcatcagttacttgagattgctcatggagctcttgatcttcttgctaaatcagataaaacaagaaaaagtctgaagcttgtgttgatctctcagtctaatgatgatgatagtgatgaagatagctcatctacctttgcttcaaagtactcttttgattacgaatatgaaactctgcttaaatccggagatagcgagtttgagataatcaaaccgagatgcgaatgggatcctattagtataaactatacttcagggacgacttcgagacctaagggtgtagtgtatagccatagaggagcttatctcaattctcttgctacagtctttcttcaccagatgtctgtttatccggtgtatttatggacagtgccgatgtttcactgtaacggatggtgtcttgtttggggagtagcagctcaaggtggtactaatatctgtctcaggaaagtctctcctaagatgatctttaagaacattgctgtgcataaagtgactcacatgggaggagccccaactgtgttgaatatgattgtgaactatactgtgactgaacataaaccgcttcctcacagggttgagatcatgacaggtgggtcaccgcctctaccgcagatcctggctaagatggaagaattaggtttcaatgtgtctcatctttatggtttgacagagacatacggtccagggacacattgcgtgtggaaacctgaatgggattctctttcgttggtggagagaactaagttgaaggctagacaaggagtgcagcatttgggtctagaagggctcgatgtgaaagatccgctgacaatggagactgtccctgatgatggtttaaccatgggtgaggttatgttcagaggaaacactgtgatgagtggatatttcaaggatatagaggcaacacgaaaagctttcgagggagattggttccacagtggtgatctcgctgttaagtatccagacgggtacatagagataaaagatcggttaaaagatgtgatcatctcaggaggagaaaacataagctcagtggaggttgagagagttttgtgcagccatcaagcggttcttgaagctgctgttgtagcacgtccagatcatcactggggacagactccttgcggttttgtaaagctgaaagaaggatttgataccatcaaacccgaggagattatcgggttctgtcgagatcattttccgcattacatggctccaaagactatagttttcggngacatacctaaaacctcgacggggaaagtacaaaagtatcttctgaggaagaaagctgatgaaatgggtagcttgtaatcgccatgtaagaaaacaaaaagcttagtctctggttcatgtgtg

SEQ ID NO: 30307 - DNA, 1987 bp, Arabidopsis thaliana landsberg
aattcagatatttgagttcatcactgcagcatttatgaattgatctcaataaccgccaatttcgttccttgtttcgaatttgcagacaaagaaccggacattgtccagacaggattgcgcttccaccaccaacttatgctactcaatctatgcgcaacagcccaagaacttcccgatcaaccagttttcaaaacaaaccatatgataatggtgtttcctctacaccaccttcaactactcataacgagagccaggtatgatttacaaagaaagaaacaacaatgcattgataatcttttgctgctcgtcacatctttttgttggataaacagcaacagttttgccccgtatgtctagtgagtgcaaagaacatggctttcaattgtggtcatcaggtgcatttccactcccgagttacctaagcatcgcacttgaatcaaaatcgttaactttcctttgtttttcttattttgctcatcagacttgcgctggatgtggggaagacctccatgtgtgtcccatttgccggagctcaatctcggttcgtatcaagctttattaagataagtctctcaagaactgaaggaacccgaggtggtctgagatctttcacagccaacaccatcccaacttagatctcatttaccagtgtcctaacatttgtttttactttgaggggaataaccggttcctctcaaaggttttgtagataatctgttgtcaattttgcattctcattgcacatgaaaaaaccacagcagactctctcgtgaataaaggatcctttctctgcggttacacatttttacttaaaagaatttgaatcttgaatggtcctatgacatatgtatcaaacaacacactactatatacctttcttgtttgaaacatctagtcttcaacacagtagcccagatggtcctgctttaacttccataattgacatcttatggggtcgtatctattctctgtcgttaaagattcataattgatgtaactgtcaacgaaagatggcaaaaacacaaaggctattataggtttctatcaaactgatcactttttactgtaagaatatatgcgatatacttttcttggtcttcttccctcagtaatgaacaagatcccaatctgagtctgctattctttcttactcttccacaagtttgtattagttttacgtatatgcggttaagcagtccgggcggtgatcctctccattcattcatttgcttacccagagtaaatctagtgtgtgtctttcatcacgaaaagtattaccacagtgataagatgtgtagattttcaaatctgaaaaagagataaagctatgtttcaagtctttgaataagattccagtcatattgctcaacaatctttagtttcagggaccctactaatatttttatcacgcaaaccaaagagacaaagctgttttgtgtttagtaaatacatattcaaagtagagtctttttagaacaacaaccatttaccatgaatttccgacgcgacatctctgctctgaatgaagacatcatagttgagcagctacttcgtagccatgatccagacggtcgctggcttgattccgaaatgctgcttcaagatgtcgatttcatcttaagctttgttctgcaaagggatgggagctatatccatcccttggggtccaattcttcaaagagttgtcttgattctggccaataacaatgccactaaactttcaggtttctagaccgcttctgacagagaattgtatcaccaccattgaagtttttgactcaaaggaaacactaccatacgctatcttcagaatctccgttcaggtaaactgatcatcctttcttctcaaataaactctttctgaaagacccgaaattgtgaaactcttgaggttgcagatgctttgtccatgtactgaggaaaatgagatccggaaaaggacaatggttttgtttgatcttctcgaggaatacagatgggatgcaaa

SEQ ID NO: 30308 - DNA, 2644 bp, Arabidopsis thaliana landsberg
tcttacttgctgtctacttgttacttacttggagcctctccaatggttattacgagaaatagatgtttcatccttgtaatcaaattccgcactaatatggacttcaaaagtactgtgcttttttacacttgtttttgagaaatatttatgtttttttatatgaaatgttatcactagtagttcttaaacaattaatgaatcaaactatcaattgtcaacgtacaaattttgataaatattttttacgcttgttcaagaattttagtttaaacatttattaaagtagaagttaaacaaaattgtttttcttgaatcatttgcattcttgatacaatgttttagattcgttatacataggaaaaagatagacgatagaaaagagagaattgcataaaatacatgagagtggtttagttggcccaccttaagtatgaaatggacaaatcacaagccttgtctttccttcaatcacatccctcccctttaaaagctaccatcaagtaaaatctccattgccaagattttgccatctcttttcaacacaaatctatcaataactatatatcaataaattcaatttttgaagtactttagtgtctctaatagtagaagatcaatggtacggatgtcgattcaattagatgctcacacgttactacgttagcatgattttcttattgcgccaatttcttaagactttattagtcatgaaaacctaacatttttaattatttggacagaaatacttctgatttgagaaaaaaactctattcacagatgacacaaaaatatttcggagttcagaaaagttttcacatttgtttttagtattacatgtttttagaaacttttgttttgatagaaataaaataaaaaaatgaaaatgaatttgcttaatttcagtgaatcttttattcatttacattgtataacagaacaaataagaataaaaatacgaaaacaaaatgatttgagataaggaataattattataagaatgaagaaaaaaaaaaaggaagaaacgggttaggggctcttgaaactacgacaaagcatgcccatcggactcccatcttgtacaccgcacgctcgacaactcataggcccactttgggccaatcttatttttatttctttactctaattaaccgttaattaacaatcgctaaccctctcacgaaatcaattcaggcggtttacttttactttgattttgtatataaattagaccacacataggctataaataattcatgtaatgttaagtacaaatcaaacaaaaaaagtttgtgtcccactcctcgtacttaaaccaaaaccctaaactataattcgttacatcaaacacaaaagtaaatagcatttatcttcactcactcacagccatatatacattattcttttttcacgaaaaagtatatatagtagaagaaaacaaatctttcacacatctttatatatgttatactgtatcaataaattctacgtacctatatagcaaacgttacgcaccatattatagtgttatcttttatcaaacatgtaaatccctatataagtcatagtccaagttggaacacaataatccactgatgaatctgttctcttcttctctatcactcaataacgtggaagaagcagtctctactgatcccttgttattgctctcttcgttattgtaatgaccgattttattgttatcttcttcatgatgacctccaaaacccgaaactccatcttcttggctcataagttgagaagcaacaaatttatcgagtgctctccaatccgtcgtcatcactgatgttttcttcttcttcttatctttatttccactacttattagcgcattgaagctcacatcctcttctattaaatgtcttttgtagatatttttattcttctccaatgatgtaattgacgtcaagctcactggtcttttggtaagagggagtgaagggctttcaagctgcggaagttgaatgaattgatcgcagtggatgaagtttaaaccgatatctgatccttctagttcttgcttgaacattaaatcttgtgcaaaaacgttttgtttctgcttagatacgtagttaagaggctccgtaactgagcgtactccactcggtaattcgtcgtaaaagtaacttgagctccaagtttctgtgttcttggcttgcccggtcattggctttttcttgaacgctctacaaaccacccacccttcttcctatgacacatacacaatcatattaaggaatggtttattatatttggtgttagtaactaagtatgccaaacctttaggccaatgtcaaacaaaaaaaaaaatgtttcttttatttgcagtgagacacaataaaagcatgccttaaaagtgtgagaccacaagatagaaagctagcaataagcataggtacatactcatatgcaagctaaaatcaaactatttttttattttttaaattgattttgagatattgcaagaactatgatactcaaaaacatttttcatagtatttacaaaatttgcttatctaaaagcttgataagagatttgaaaagatacgtataactcactttaataattcatgtatttatttagacgactcttaagactttaaagtttaaactctattgttatata

SEQ ID NO: 30309 - DNA, 3267 bp, Arabidopsis thaliana landsberg
aaattaaaaaacaaagaacaagcggttcgagagagacggagacaaacacggccttaaagtttagcgggaaatagcgagaaaagaatcttcttccctccaaattctcacctaactataaaacaaatctttcatcaaaagaagcatcagacatatgtcatcttttaaccttaacgttataatttaattttaccaagatccccaaattcacacataaaccctagattctaacgtaactctgatttcctccaattgcgacggtgattgcaatggatcagactccacggcggaatgttcgtcggaaattggttcagtcgtctttgctcccccataaaccggaggatgtaattgactctaatggagatccgatgtgcgatgaaggaggagaagtaggagatggtggtagtcaagggaagaagacgagaaaacagaaagagagaactccgaagaacggagctaccaagaaggtttgtgttcgtctataaattacggtggggaactactttggagaagattttgtaagagtgatctctctatttttttttctctgatttaggtggctaaaggaaagagtcctcgaaaaacaactcctaagaaaagtgcaactaaaaacggaattgtagctgctggtgatcagatgattgctgccaatgtttcacctccagttgggaattggcgcctggaagctaagttaagagctgaggtaagttaattaagcatgttttggcaaaacttggtgtgacttttttttgtctcatctaaaattgtttttttttgctttctatttgatcaggaagattcgcggatgtctgctgggaagcaaatacatccgtttttctcgacttggaaaggaggtaaaagaaatcaagaagctgttgcagcagagaatggtacgtgtcttggtcgagggagagataaaatcgtcaccattggccctatccatgtatttgacaagtttcaggtatgactaatacatatagggtaacttcttcgatcgtttgtaataataaaggaatctgaatagcaaaatcttcttcttaggatgattatccaaccacccttgattggaagaactggactttctatgagcaaacatctactactgagagtcctgatcaacaaataaaatttaactctcttgaacctcggcccaaggagtttgatttaaatgaattgccatctctttcacatcctgacgtgtgtgtcatcgatgatgaggagcctgaacaatgcactagtcaatcagaaggtattgcagaggcatcttcggtagtcttaatagaagaccaggaggagaaacgtgggtgcctcggcttcttagatggagcagaatcggtgatgacctaaaactttctcttttggtctttattttttggtttgttggaaccattcataataaagggttattgtctatcattctttttaggattgtgaagttcatgaagcaattaacttgtctgatgatgctggtggtgcagccaatatttctcatgaaatgcaacacctgtcatgtcgagaaaggtagtgattttgtaattgatatcagtagcagcacacatgttttaagttgagcatactttttgttctttctagaatgcttgatctataatttctaatctatgcagtaatgactccagtggccaaccttgtaatcgattatgggtagataagtaccagccaagaagtgcctcggaggtcagacaatttgagcatactgctttcaaagtagatatgcctgtttatatcttcttaccaaacacaaatttctcacactttcttacccacgtatcttgcaggtatgtggtaatactgaatctgtaaaggtaatgaatgaatggctgcgccaatggtatgagagagggtttcagccaaacaaagactttttgagtagtgatgaagataaatcgcaagatgctgattacaactgttctgaaagtgactctgactcagaaaaaagtggtgctgaagatagccagaagaatgttctcttaattgttggtccagctggggtgtgtgattagatattctgccatgaactgtcagtttttacgtctacaatgctttctgagtttcatgtttatgagtacaattgtgcctgtgttgcagagtgggaaatctgcagccattcatgcatgcgccaaggaacaaggatttaaaatcctagaggtatgaactgtttccgctatatgtatctaaaagacctagcttcctcttctggcatggaaacgtttactttcaaaatagcttatgtctctaatgatttttgtctacagtccaatacatcagaatgccgaagtggaacagtagttaggcagaaatttggggaggctctcaagtcatatagcctgtcaaggtacatagaattgcaacaataatgcttggatttgttattttctccatttcagtcggtactatcaaacttgaaaatagcgtttgtattcacataatttgttttttcaggtccttggaccctcttttcaattcctgtactgatggcaatggggtagaggatgtagttgaagtgatgcccgtattacatatccagaatgatggagctaacttgaagcctttaattcttttcgaagatgtagatatttgctttgctgaagatcgtggtctcgtttctgctatccagcagattgctgtgaaagcaaaagggcctgtggtattgactgccaatggtacttttcgtccatgctaaaaacattatttttatttcatttgcagttcaccttaattaatctgctgatggcatctgtatcacatgcatatttacagacaagaatcatgggttaccagacaacttagagaggatagaaatatacttttcattgccatcaaaagaagaactgtttaaccacctttctctggttagtattctgatgcgtaacctttaaatttcaatggattcttttaacattttttgtttcacaggtttgtgcagcagaggaagttaaagttaatcatggttcactagaggaaatgaccacgttttgtggtggagatatacggaaagcaattatgcaattgcagttttggtttcagagtaaaccgaaaagaggtattttggatgtaaattgctacgtacgagaaaaaaaaattagtgaatgactaggtgtgaatattttcagttttatgaaggtttagacatttgatttattcatggtttaatttcccatacacagccagaaaggtgaagaatacaggtaatcaagatctctttgagcatgaagctggccacttgctgcttcccaagataattgcacggga

SEQ ID NO: 30310 - DNA, 1341 bp, Arabidopsis thaliana landsberg
acgaaggaggatttcaaccagatgtgattctctatttatataaaatctccatttcttcctatttttttggattcttattttatctcattagattcgagttaatttttcttttctttttgtcatgtgggacggtgtagaactcgtcgagttttggctcatgggctgccggagaacccgagaggtgctaaaaatccctctcctacattataatactaaaccaaatatatacgtgagctagaaaccacaaccaacattaaatcatactaaaccgattatgtattattgtcatttactgtaattcaatccatgatagaatacaaaatgacttctagatttggtatgtatgcatataacctcatgctcataaaatttatcaaaaccaaagtccagtcacaccttatatgcaaatgacaattcttaatccataaattctacatttggttcacaaatgtccaacatgagaactaaagcacaagaaatagttttggtaagtaaacagaaaatgcaaaaagtgtgagagtattaaggggccaaaccatggtattttcatgcgcataccaaagttgtgtttctctacacttacgtaagtaaatatcaaaaactttcttctatgttttacagtttgcgtataaaaacttcagtgtaaggtagatgttacaatgtacatcaaacttacatcattaactgttgtttcacatcgtcgaagcaaaaatgattatatatctaatttcattactccctatcatcgtcgccaccctcatgctttatcaacgatggtggagatccaacataccgccgggaccaaaaccaaagtttctgcttggaaaccttcatcaaatgaaaccactttggacgcattctttctcggagtggtcagagacttatggtcctatcatatcggtgtggatagggtcacagctcactgtcgtggtctcgagctctgatctagccagacaagtgttgagagacaaagaccatcagttgtctaaccgacacaggatcgcaaggatgactcagaccggtactgatcttgtttggtccgattacagtccacattatgtgaaactgaggaaactctgtacactcgagctcttctctctgaaaagcatcgaaaatttcaggtccttgagagagatggaagcaagatcgatggttgtgtcgattctgaaggacttaatgagcaattcaggggatgatcaggagcgaaaaccggtgattgtgaggaagtacctagctgcggttgttttgaataccatctcaaggttaatgatagggaaagagttcgggtctgaagaaagaaaagagtttaaagccatcgttgagaaagaacatcttctcagt

SEQ ID NO: 30311 - DNA, 4078 bp, Arabidopsis thaliana landsberg
gacgaaataggcccaaaagtgaaattgtgttttgttagtaagtgttagctcactagagtttttaatcatagttgttacttgttagaacttagaagtgtagctagttgattaaccttgcttttacgtttggttatagtcttagggggatgatgtctagtggtaacggttcaagtacaagcccaagtgtatgtatgtagtaagaagtaaagctagtacaagatcatgcgtgtgtgttgttgttattattaggcctttagtatattaattgggctcttttcactatctccgtctaggcgtctaccatattgggccttaaataatcagtgaattacaagatttgtaataaaattgaaaagaaaagaaaaaaacacatgaaaaaaagtgaagacgtgacaaaaaaacctctagtccatgtgatcttcttaaattagtgtgtgtatatttaatacataacgaaacaacaaggacgaataatatgaattgaaagaataaattaaatgaaataatgtgaattaaaagtgtttcgtagtataataatatggaccgttggattaactgaaactccacagcggagtatcaacatcgtcgtagaagtcatccatcgttgcctttgagctatgtaactgtggagaataatcaaacggatctccgttggtgaagaagatctcattatgtccaaattcatacagcgatggatccatcagagacacgtgttcgttgtaatccacgaaagattccatcaacgataccaaatcaccatcgtcatcattatgatgatcatcatctggtggtgaagatgcagctgaagaagaagcagatggatggttatcgagtccgtcatcatgatcatgatcattttcatcggacggaggggtaaaatggtcagaagaggagttagcggcttgagcggcgaccttttggattgattttggggacaaaagggtcttttcgtcgatgttcataagaaaaggagaagtagtggtgatgttagggaagttgagattagctttaggtcccttaagacacaagagagcagcgtcgtaagccctagcagctgcttctgcggtggagtaagaacctaaccagattcttgtcttttgatttggcgccctaatttcagtaacccatgatccccaacttcgcatcctcacacctttatacttctttatcttgttcttacaagattgatgacgtagtgccgacgttgaagaagaagaagaagatgaagaatgagagagtgatgatgaggaagtagtaacttggatcttgagttcttgtttcaccatgttatgctgtaatgatgatattgacttatatatgcttgaacaagtgttgggaatatgagataaaagtattctgaatgacaaataatgtcaaggaaatgagattatatatagcatgatttgatttggggggattgtgatagagggggacaataatggtttatttaataaatttaaattttggtcaaatgaaatagtatcgtttttgtgtatgaatatgacgtttttggtgcatgacaggtgttttctttattaagtatttttcacccgaatactcacaaatggatatgtcagattttgtttcttatgtatagtaagcttaatcttcattaattattgtaagaatttcttttggtaccaagatagatcattgcacggagacgaatctcaaactaatttatgagatatgtaaaaagctaaattctcgttacgagcttctccactacttgaacgccgacttagtgaagtaacattccaacacgttgttagtgacgtttggatgaaggttaaagtaaatatttaatattggtctaaacttgaaagtaaccattgaattaattaacatttaaaatataaaaatctatgagtgtacagctagctgtacggaagctacttgatgggaaaattgaggattagtattgaggttgagattatttttgtcaaaagaaaatgaagtttatgtttttgatgacttatagctatcactttctgcaattgcaaattacagctgcgtttgaatataatgtgttgattaatcctacgatctttcgaggaaaagaacccttcaaacctgctcattggtctttatgttttaaaaaatatatatatatatattaaacgagttaattcattggtggatggtaaaaaaatcactaatacaaaataaaaaagtcactaagataacatgcataagaatgctattatactataatattatatatgtttcccgtattattattttcaaaagttaattctttaatcagattgacctttatcaaattaaaatggtttcatccaaatctatatgacatctaaatataacacagtttaagaaattgtagagtttatttttataatatacatcttttaaaattgattataggctaaatattgaatcgtaaacttttgttttcactaaaaatagaagaataattaatgaaaataataaagaaataaaatatagaaagggaagaaaatacataggattctgatatggagggacaaggggaggcaacttcacgaagtagcatgtgaggtcttagtgaggtctcacaaacaaaaatgataaactaaaataaacctaaacccttttatgaaaagtctaaacattttaatatatgtgtgttgtactctaaaatgttaatatatttatataaatagatatttttacgaatataaaatagttaatgaaaatggaaacgcgcagccaaatagtgaagactgaagtgagtgaattaatcacttcaacaacagctgtttccactctgtctcgctgcggcacaaaaccgcgttctttcttattttaccccccttctcgatgacaatatcttttctttctattatcatacgttttcaacacttttaacacacatagaaaacaaactgtaaagtgtaaatagaaacatacagtagtaggttaggtcaaatcttgataaaattatggagtacaaccacttaatttttcttttgtttctaataattttaggaaaaagaaaggcgaaacaaagttacgtgggattagagattgaaggaatcacgtgtgtgtttgtatcacatggatgcatatcaatacacaattacacatcatacttaagcctactttaagttaactttccctttttctctttttagagataggatgcagttgatattgtgaattactttgaggagattctccacgtcgaatctagctaagctactcagctagattttcttaattgtatactacaacctaatagtaaaaaatgcatgactattgtctaaattctccaaactgcatgtatataacaatcatacaagtaaaaggatatacgtactccatcagatcgacgcttatcgacaagtacttataaggtgtttgttaaagatattatttcgtatatttcaaatatatctacaatctaatgttatcaataaaattgtataatcactgcgtaatgaaaaattaatttagattattttctggtttagaagactctcgatacttataaaagataataccacaataatataagtgcatgcatgtgagaatatggagatttgtagatagatactaaagcaaaatgatgatttcaaaagaagcatgtgtatttcggcaaaagccaaaaaacttatatagaactttaagacacgcaagagcacatgatcgaaggagttgatgagagatggcatgttcttttggggacagccttgactttctcacaaagccttgagggtttatgagacatgtcttcgcttagacatttcacactttggtcctaagcaaacccttaaaaaggtcaaacagaggccatttttgtcagctttccagcccaaaaatattccttttttgcatgaagaaactaatagcatctcgagacggttttggcaatgaagacgttttagtttaccccgaaagtcacaaaaataagacaataatcttggtgaagcggtttcccataatgggcagcttcactggcaccgtacttcctccgtactttcccaacaaccgaacaaagagatggccttaccattacaaatattatcatacgatatctataattagttttaattctgaatataatatatgtagatag

SEQ ID NO: 30312 - DNA, 1190 bp, Arabidopsis thaliana landsberg
  unsure (1)..(1190): unsure at all n locations
gaacacttctatgcgattaccaggccaatctctaggaaaacttctcggaaactaatctaatataatattgtttcccaattggttcaaccatgcaacaaaatggtatagctactttctcatcaaagaagcctaaactaatccaccactcaatcttatgacaataaccactaaactacatgactataaccactaaactacatcttttgcttcttcttatcacgtctttcggtacacatatgtttgatcaccaacgactcatttaattgagatttagttttaattatgtggatcttttgttctccatgaccgtgacataacttttctcctatactaatcagtcttctttttgaaccaaaaagtcatagcgaaaatgaaaagaaatcttgaaatttatagtatatgactttctttttttgttaccaaatatttagcaaatttgtaacttcataacatggattttgcacgtgtttctaaaaaaaattattatgttattttaactaataataccccattttacatgataacaggttatttgtttatatttttttacggaaaacactaaactttttgccactccgatattaccgatataggaagaaaaaattagtttatctattaaagaagccgtaaatccgaaccttataagcttcatacaatttatccaatctattgtcgcctatatatctagctaggatgtttgctatattgatattgcttatgcaattgaacttagtttctctatggtaatctctaggaaactatattaatataatcgagtttccaattggtccaatcattcaaaaatatattggagctatatattctttgccatcataaatacctgaaatctgcaaggattatgaagtggctagattacctaaatgactagaaccatgacttatatttgtaatctctggtctaaagatccacatgattaaaaaaaactaaactaccattacttgcttattcttatcatgtctttcgtacacataaatgttcatcatcaacgactcatttcaactgtttttttttttgtgtggaaattttgtttctttcaatataaattttgaatactaattagtttttttaacaaaacgtctacaacgaaaagaaatctcgaaatttctagttaatgactttcttctttttttcgntaccaaaagttttagcaagttaatgacaaaaaacta

SEQ ID NO: 30313 - DNA, 3500 bp, Arabidopsis thaliana landsberg
  unsure (1)..(3500): unsure at all n locations
ctttaaaacatttatgagttatctttattttcttaagttcattgtgcaaacttactaagaaaaacaaatggaacttttttgtttttgggatcattgttttattaaaatcattaaagaatttgtactacatgtcttactcaaatgtggatttggatatggtcttatgcatatctaattaatttataattacagtgacaatttagagattaaaaaacatgacgtgggttgagatgatcatgccacgtgttgtaatcgtagaccggatcctcgcttccttgagactcgccttccttttgcttatttttaattttagcaaaagcaaaaaagtagacaaattaaaattaaaaatagattattcatttctaaggaaaactaaaaaaaaaaaattaattacgagaaaaagacaattaaagagtgattaattaattctcttatctctctctctctctgtctaatggccattgcaccttctctctttgaaaaaaaaaatccaatctttttctactttcaataataaatcaccgattattttgttttctcttcttcttctgcgatccttcattgaatttgatagcccaatttcgtcttataggagcttcatctttcacctttttgttcttaattgtgtttcgccattgacgaagaacacgaagaggtacgtcttttgttaattggaagtggaattttgggttttgattgttcaatttggctgatgattggtatgaataccaggtgagagagatgaattggaggacatttgggtgtaaaattttgaatcttttggatgttgggattttgtgttttctgggatcttctcagaaattctggggaagatgtgatgtttggttttaggggtttgagaatgattgatggagttactagtatgttgttttgaattatcggaattgacgttaaaaaagggatttttaggttttggcgtgagaggatgactagtattcagcctttgctacaaaaatcggagtctagagatgatgttcgtgctgagtttgagagaggtttggaggaattcatgcgtgggcacttggacgagtgtatctcatttgggtcttgtagttctgttcacaaccctgaggatgaggataatgaggatgatcagcttgtgaggagcagacgaaggtctgaacttgaaggggataatttgnnnnnnnnnnnnnnnnnnnnaagacgccaatctcaaattttgagccgttgggctgctaggcaggctcaggagatgattactacgattgagaggaggaatcgagagtctgagttgattgcgttggctggtttgcaaacggtctctatgcttgattcttcttttcttagggagtctcagtctcagtctccgtcttcaaggcgtcagggtgctgctagtgagaggcctaacactcaggcatctgggattttgcagatgtggagggaattggaagatgagcatgtgcttaacagggcacgtgaaagggtgagggaaagattgaggcagcaaagaagtgttgagtctaatactaatttatctagctctattgcttcggagagtcagctgagtgaaaataatgggagtctgagagactcaagtgagagtgagaatgattttgggtcttggtcacatgatcggaatgagcatggggataataataatacttccagtagggaacaatctcctgatcttggtgatggcgagagggagagggtgaggcatattgctcgtggatggatggatagtaggatcaatgatcattcatctaatgtaaggcagagagacgataaccgtagaccggagtggctgggtgatactgaacgagaaagagtcaggattataagagagtggatgcaaatgacaagtcagcagataggaggagctcgttcaacaccgagagaagataagaggtttacttcaggagctgataggattcatcacgctgcccctcaagttgacagggtccgtgtagggttagctgttagccatgaagaaggacgtccacctcatgttcgtcgagacttgcggagagttagaggtaggcaggcgttacttgatttgcttatgagggctgaaagggagagacaacgagaacttcagggcttgttggagcatcgtgcagtgtctgattttgctcaccgcaatcgaattcaggttagtttgtaaactaccaaattcatgtctacttctttgtaggaaatgaacggctcttctttctcatattctttttccgtacacttatgacattctgagataccattacaattcatgagctataaattttatttgccagcatgataaatatgttatattccgaatatacatgctaatcaaataagaaatcttggtatttgattttggattgtgataagaaaaagtgtttggaggagcgagagatgtatcctatttcatgctaggactggacaacaaacatcaaatattaacagtatcttagcaccttagacaaatgtagactgatttctaatgccttacgcttttctgcagtcgcttcttagaggaagattcttgcggaacgagcgacctacagttccagagagaactccatcaatggcttcaagggaactgcttcagctaagagaaagacaaactgtctctggcttaaggtaagatttccctccaattccattttaatggataaaacaattttttcatacagttttctgtcactttcttgttcaactcaataggaacagattcattgcatcataataatataactacactacaaacccgtaaaggactttagaaatatgaattttgatatccttgcatctcatgttctctcccctgctcactgaagataacataaaaatttcggcttgttctctttctgatctttttgttgtgttcgcattttgtcctttcatcttattctattaattgacaagtacttattggcatttagcttgcttgctgataattgcccacctgtcgactctgcttctgtctcagggaagggttccataacgggagggaaaatattgtccatgaaaatactagacaaacactgataacgataatagcaatacttccacaaatgctcttgcaattgcaatcactgctgggaattctcagcgtgtaaccgatgagagttcaacttcttccagacaagggaatgatagtcccattttgcctgataactcagaaagcaacctagcaaatgcggatagagactcggaagaggataccaatcacagaaggatctggcaggaaaatgtcccagtagatgagaggctaaatttggagcaaacaactctaacgcaatttgatgggtatgataacacagatataaatcgtgatgaaacctctgtcagtgacatgcaccgagaagctagtggatttgcagatgatgaatatcgcacacaagaagctcatggtgtttggcatgagaatagctctagacaatccgatgggaactagcctgggacacggtcagaagccctaaggagtcgccgtgtagtacagttgagaagattacataggtccatccagctgagga

SEQ ID NO: 30314 - DNA, 3776 bp, Arabidopsis thaliana landsberg
  unsure (1)..(3776): unsure at all n locations
gttcccttcttcgtagtgcatgtcaatggcttttcttccgcttaggatctcgagaagcaggactccaaagctgtagacatcggatttggttgtgagatagtgaagtcgatagtactcgggatcaaggtaaccgagagttcctgctggtagttctgccaaaggagagccgctatcgacaggaccaagtaaggagagaccaaaatcagctactcgagcattgtgttcttcatctataagaatgtttgatgatttaatatcccggtgaatcacgggagggcaagcgtaaccatgcaagtattcgattcctctagcagcttggacagcaatcgttactcttttgacccaatctagttgttctttcaaggccttgttctttccatgaagatggttgtgcagtgagccgtgtgccataaactcataaactaaaagcctttctccacattcttcacagtatccaagaaggctaagaagatgagcatggttgagtcttgataacagatcaagctccgtgcgaaactcatttgaattcttctgtttgtctgatgacattatcgctctcttcactgcaacagtggttccatctctcagtactcctttgtacacacatgagaaactccctttccccactattgattcttctttgaatccatcagcggctttttcaagttcctcataagtgaaaactctagcccttctgcgcttttgcagctcatcaagatccggacggattttgccattatctttcgtaaaggctgaatctttagaagaccttgtatcattttctgagcacctacaattcctcaatctgtacctaatgtataaagccgctgttatcgagacaaccggtgccaaaaatagagcaaatccaatctctgcagttgcaataggtagctgcagtgaccaaaactttcctttttccttgcctccactggtagccgaagaagagcagtttgaggagcaatcatgtgaggaacaactggagcagttgtaaacacaaacttgatcagatctctctgtgcatacgcttttctgatacattccaggagggcaactggtgctacagggcaagcaaatgtgagagccagtaaatttgcaaggcgagttttcttggttactgagttcatgagttcctggtggacaaggagtgtctatacagagtcctggtgagacagctaaagggatagaagcagggaaaccaagaccccaacaaacaggtgacatagaagtccctgtgagaactccgcaagtgaagtaattccccgctgcaagatcataaaagccgatacctgtaggagcaggtgtactcctgttcacgaaaaaaccccaacagaccgcactatgatcatagcgtttgattccacaagcataaaacttcccacctaccactgctaagagtggctcttttggtggtaaatcaagaatcttttcttctgtagaagtccctgtaacctcctcttcgaactctaagctctttccccaacatagcactcgcgattccaacccgtcaagaatgccacaaacatggtatccaccagctgcaattttctgaaactttttttcctttgggattaaactgattacttgactactattctcatctccccaacagaaaaccgacttatctttagaggacagcgcgcagttgaactccgaaccagccgaaagcgaatgtaactgcttatcaaagacaaagtttcttgtcatattgtaaccccaacaatcaacaagagaagaggaaataatgttgctgttctttcttcttcccactattggcttcctcaaaccacaaagatggtaatcaccagcactaacttctaaatactcagctcctttggtcattggttgaggaactcccatttgaataaatgcactgtttccccaacaataaggctgatgagatagcatcagaagcccacacataaacccatctccacccgttaaaccgatgaactggagatgaccaggagtcccatagaggattgctgagttcgatccgtagcaaaccacaagatgagacccatcagactttagaccacagaatacagaaccaccttctccataagaaattgcaattgaagacattgaaccaagagctgaagcaagctgccatatactagtgaaaagcacaagctttacaaggagaatccattcccttgctctcgtttcgaacattctcattcttttcaaagtcaacacacacgcttcttagttactgtcttcactttctgagacattccacagattgactaagagtatgacccttgattagtaaatagcaaacgagtcacacgaagttcacaaaaactgtggaactgcaatcaagggcatgcaataactaaaagaatagaaattacaaacaatgagagctgaattagtgacgaagaaacaaaggactcgtcagccagacaatctccggagatgtaggaaacaatcttgaagtggaaaattcagacaaccaagtcaaagaaggacctcttgtctcnnnnnnnnnnnnnnnnnnnnnnnnnnncacttactcctttcagatctcagaccgcaaggtaacaacatcataacatcctccaaagaccctttgaagctaagcttctcaaaaaaaaaatcttttctgccgactaaagaagtgttgagagagtaattgggtaatgaaagtaggagctagagttatacattcaacagtagctcatgaaaatcttgagaaaccaaaagagaaagagagaagagagagacatggagcttatcaaagagagagtcatgaagtactgagatggcattaaatgcgaccaaaactgctgcttctgaataatggcaaatgtaggtgacgccatttaatattaaagagttaatgttaccaaattttctcttcttgctttctcgttttttttttacttttttatttatttattcgaatttttccccattcttcccaaatttgagcaatctaacccaaaaagttttatgtcaagtttccatctctatgctcattggagtttaacacaagattcaatgagacattaactattattcattcctccaaagcttcctttttccttttttaataatctttttaatgggtgttttactttcgccgttgccgtcggtgtttggtttcgagcaatccaaaacattttagatcaatctcttaacttatattagtaaatggcttgtgaggtttcatgcacatatttttagttcaactctgtttctcgagacgcgagacacaaacatcctcttttgtcttctttctcctcatctccttgtgcccaacaaaagaaatgttttgtcctctttagactcaagatttcaaactaacagacctctctccctctctattctctgtgtctcattacaagaaccaaaattgaaaaacttaagttgactcgatttatatgtacttccttctttaaagttgacttgagacctttactgattctaagaaataaaaaaaaaactcaactaactatatggttcagacttcagattcaaagaataagaaccggccagtcacgtgctactcacatgctaatgaaccaatacattgcagacgcacagagccttggagactctacattggcgaatcaccttaacttatcaaacattcaacccaagtttttttgtgtaaacaaagatgataatctgcttctattcaacgacatggtgtacaacattgatctgtaagctaacctccaagattgatttatgaatgatgtgtttatcaacacagaattgcgattccagacaagacagccataaaaataataaaagacgaaccaaaaaga

SEQ ID NO: 30315 - DNA, 1788 bp, Arabidopsis thaliana landsberg
aacttttgttttgccaaaaaattcaaactattaaataatttttacttagagggagaaaaaaggaaagtgccccacgggagaaaaaagaaaaccaaaaatgaatggcaataaaacaaatgaaaaggaaatagaaagtgttacaactccgatcttcgattaaacgtttctctcacaactctcgatcactcgtttgtactctcaagaacttgaatcaacttaaagagaaagaaaacagagcacacaagtgatttgttacccacttcaacggatcgatgagatcacgtctacgtctggggccgaatcaattcggcaatccactaaaatcaagagatgaacaagtctcaagctcgagctcacaacaatggagtctctcagctttctattacaacagaataacaaactcacacacacgaacacaatgaagaagaagaagactttataaagagtcaacataatgaaaccctctctcgcgaaaagagtctttcatttaaccagcttgcaatgtgattcaatcgacttctgtaaaccggtcttcaatcctcataaccaagcattaaaccaaataccataacactccaccttgattctacttttcatcatctcctagtgaactgcacttcatgaatttaaccttcggcaacaagacttaagagtcttacctgagtagcattagaacgtctaaagctttctcaaacttctttactggtatgcactttgtgagcatatctgcaggattcacagacgtgtgaattttcctgacctttacctcaccagcttctatgatgtctctgatgaagtagaacttgacttccacatgcttcgttctatcatggaaggcattgttctttgacaaacaaatagctgactgcgagtcacaccacacggttgcaggttttggctgcaatcccatgtcttctagtaaccctctaatccaaattgcttcctttacagcttccgtaagggcaataaactcagcctgtgtagaagacaaagctacaacatgctgtaaacttgatttccatctcacagtgttaccaccaactgtgaaaacatatccactagtaaacctttttctatcaagtctccaccatgatctgagtacagtaaccaatgacactgagatctttttcttaggtatacatggaactcagatcatgtgatccttttctgtaccttaacagccacttgattccttcccagtgaactaatcctggtttactcatgaaacgactgactagtcctattgcataggctaggtccggtcttgtgctgatcatagcgtacattacacttccaatagcacttgagcatggagtttttactgtatctatgcattctgaatcatcttgtacagatgcaagtttaaaatgtgtaccaataggagtaatagctgacttacaattactcatattgaatctcttgagcacctttttcaagtatcctgcttgagataaacacaaaactccattcactctatctcttttgatttcaataccaagaatcttgcttgcagctcccatgtctttcatctcaaactcactactgagtctcttcttaaccttgttaacctctgacatattcttcgctgcaatcaacatgtcatcaacgtataacagaagataaacaagttcttcattgttcactgtcttcacatatacacactgatcatgatcacttctctgaaacttctcatctgtcataaacttgctaaatcttttgtaccactatcgtggtgcatgtttaaaaccatacaaggacttcatgagaacacatcctttgtgttcgttt

SEQ ID NO: 30316 - DNA, 1287 bp, Arabidopsis thaliana landsberg
acactatgcttgggtgtagcacaaaatcaccatgttataaggaaagtaatagttcttagtttatcaaaaaagtgtacctggacggaaatatacaaatgaaaacaaagctaatgttcagacaactgatagacattctgttttgttagagctacaaggcagaaaacaattgaggaaacaatcttcagacatatgtgacagtgcgcctgcaaagttctgtggaatcttttgatgagtagacagattgatatggctttaaaaataatccaacacatccatggatctagtcactaagactagaacccttcaacatttcacgatgttccccaaattgtaccacgaaaaaacgatcaatttctagaaaaataaattgacaataacacaaaaaatgatgcttacataagtatttaactgtctgacgaagctggagaagttgttgtgcttgaaatacttgggcaagagcaccttcgagaactccggggcactccagacgacgaagctgttgttcccgctgctccacgaaacgacctcattggtcaacggatcatcaaccatgtcgtaggttttactcaagaaaggcggtacggagttcaccggcggtggtattgacggtgtattcgagttcggcgatggtacggattcgggaaccgattccataacttcgaatgaaaaatcaagagttagttcactaaagttgatcgattgattgatcctggaagtttcttctgttcttctcaagctcaaatatcttttacagagacagagactctctcaagtgttgaagacccaatctttgatcttttcccttaaagctgaagaaaagcaggcatggccatttcggttcaattcagttcggttttgtacgattagttttggtagacactctgactgtcacctaaattaaacggtttcatttcgtgtattttgatttggttcggattaattcggtttaaaagtacacgtagcatcgatagcagctttttctgtttttctcggtgagtttcatacgtggcataatatacaccgttaaaatttaataagattatctcagatatttatctatacgacgcacgattatatcatttaattatgtatattaaaagccacgtaagacacagagaaaactttcctggctcttatctctctctctcttatactgacactgacactcgttaaatcctggaaagtaatttgaagtgaagcgacgaaacacaaacaaaagcgatgaatctggtcgctattcatcgcgtttccttcgaatgcgtttcgcgtttctctttgaaacataga

SEQ ID NO: 30317 - DNA, 307 bp, Arabidopsis thaliana landsberg
tcgtgttgcatccctctttttttcttttgggttagggctaaaacactatgtcactattacaccgagagttcatggtcgacctgggcatgtgaaacgcacaagcacattggcttgggcatggctgtagccggtccctgtctagagcgataccgaaacctaaagcgtatgagtcataaacatatggatatatatgaaccgtgtcctagctacaacgactatatatgcctatcgagctccagccacgagacagtgaccttgaccctggctaaagctaaaatgaaagtggaaaaggttgagtatgaaaaat

SEQ ID NO: 30318 - DNA, 478 bp, Arabidopsis thaliana landsberg
agtcagactaatattctcttctcttctcttctttgttaattagcttctctctcgcagccaaatctttctccttaatatcccaaataagttgtaactctttcagattgtcaccagacgcactactcggcttggcttggaatttggtattagctgccttaactccaggggaacgaattttgctttggctttggttctcttcaatgccagctggaacagagacactttcttctctttgttgttctttgcactttcttctctttgctgttcctgttgtaggaaactcacttaaccagttctgctcatagcgaaccgcactccaagcatgttcaagggtgaaattggcgccatagtcctcgtagaaaatctgatgagccaagttcaccaaatcatcatcattttggccacttgtttggtgtttggttgcaggcataaagcttccccatacttgttcacaccctcatttatttttgcaaatttc

SEQ ID NO: 30319 - DNA, 2294 bp, Arabidopsis thaliana landsberg
acaccgttgccttacgatgctgatcctaggtactttcgttttgtttatggctctagtcattcaggtgaagaatcagaaccgttaagaggtgatactgaaatgagttctgaagctttgggtgatggtggagccaagtggagtaagtctgattctgaagatggttcgaaagaagtgtatacgaaaggttcatcaacctttacaaagtcgaaaacaatgccggggatagaagtttattatgcagattcggatgatgaagatatttgtccaacctgccttgatggtaatactaaaaaattagtttgatgctattgttattattctctttgaacctattatatgcagttttgttggtaaagagtgtgttaggttgttagtagatctttataagttgctttcttggtttcatttcttcatttagtgcactcctgagtcctgagccattaggccattaatagtatagtttacgtagatgaggcaatcgttgcgagtgcattaaggtaatattggtttcatagttctttgttttaacaatatgcagattacactttggagaatccgaagataatcaccaagtgttctcaccatttccaccttagctgtatttatgaatggatggagagaagtgaaacttgccccgtctgtggaaaggtaactcgtcgctttctacaaaactttaaaacccggatttggtcgaatgtgccatcaatctccttcatcgatattaaaagtgcatcattttgtattagaatttgatatctccattttaagtagtggtccatttctcatacaattattggtcatatagagaaccatgagatgagttaactttttggagttaatgcatccatacctaattgtttcactctaatctttcaggtgatggcatttgatgaaaatgaaacttcttagcattgtaataaagacttgctcaaagaacataatggcgtctgagtcctgctcaaaagaataaacagagagaaatcacttgtacataaaactcctgtgaatatccagatgccttttacagtaaatatgtgatgtctcttaattttatagactcatatatcttatatacatttataaagcaggacaatgattggaaggaaaagtagtttgaatcattcaaaaatttgttatctagaacattgttttgagatcagagcaagaagaagaagagtgtttgaaatcaacttctctgaattattagacaaaccaataaagaaaaatcttattacaccaacttctttgaaaagtcaataacttaaagctcaaacaacagaacagagaatctccatagatgtaaaacttcaacaactcttgagtacactgattgtgtttcaagccgaggccgctttaaacgcactctggaatgtctcgggcggttgcgcaccactcagcttcaccttcccattgatctgaccaaacaatacaaagcatggacattagacttgaagactaaggcacccttcaaaaatggcgagtttcgccatgaacttattaaggcaatcaatctaaagcgctaaaacttacagtgtaatttggaactccggtgatatttttcgaatactttgccagttcttctttcacctttaaagttcaaaacagttcattcaacattatactacagaggaagaaaaaaacactaatgattagatgatacagaaaacatacctctgtgactccattgttggggtctgagaggaattcttctgctccttctatcccaaccttgttagccgtctctaccaaaaactctctattgatccacaagcatcataagttaaacttgagcaatctatcacaaaataaaactgtttcacatattctgaggacaagagcctagtgataaatacctatcaccgatgaactttccctgcgtaaagtaaccgataaacagttcctcaacaagtgtatgttgcttctccggcgcttgtttaccggtataatgtataagtctatgactatccagactgtttcctctgttcttatcaacaaaacatgttagaagaagagaaaataaatctattttcttgattgataaaaggaaactcatggtgcttacgtgagaccagctgtgtcaaactctaagccaagacctttaaagacctgtaatgatgaatcaaaatctcattttcaagattctctcaacaagaacatataagctatgttaaagaatgtgtaagtgaaaaaacctcggacattcttgcaaacattccttgatatctgtttccatatttctgtagataaaacttcttttactcacaccttctttaggtgcagatggatcaaggaaa

SEQ ID NO: 30320 - DNA, 3230 bp, Arabidopsis thaliana landsberg
atttagttttagccatccgccaagtgcttttatgtattctttctgatagatctatcactcctgcaaaattcgcgtgtgctattcttgaaccactgccaagagctggatggtgcgttcgtgatgatgatcatttgtttctttcaccgcttgtgaaacatctagagatctcaacacctttgagatctcagcttgtctttgatgatgtatttgcatcatttcccacatcttccccatcctgcaaaaaaatttgcataagaactcaaaatcaatttgtctaaaacatcataggaaaaaatatctaccaagaagcgaaacttacgcctcaacaaggtgaacgagctttaggtatagttgttcatccctaagacgattgatttctgaaactgtggagtccatggattgcatatcaactatatatcttgtatgcaaatgacttactgctgctttagctctctctaatgaatccgagtggccacctcgtttcttcacccgatttaaatgagcaacctttttctggtactcgattttcatgagttcgccagcctatatccaacaagaagtgtatcccaaaattagactctcaagagaaaaatatatcatttttgctcataaaactacccaaaacaatcaaaggggcttttctcaggagagaagattacccaaaaagactaaacatggttgcaagaatctttcctcaaaaagttaaaatcttttagctacactaaacaagcacaagcataaaaaagagacaagttttgatatagttaccttgacttcgtcatagagcttcttttcccatgctagcaatttgtcaagaacagtagcatgagtttcattctctttcaaatcaacatcaccttacccatcgtcagcagttggtatgccactgaaggacctagtccaagtgattacacgcatcactctagcagagtgatcaatatgacctgaaacaacaacaacacataatcttaaatattttagctaaaccaatcattttgtttctcccatacatttatcgaatcaaaattacctcggttatctgcaaaattagaatggtaatggagcctagtagcttcaagcatctcagaaacatcatgagcactttcagaagctttcaagaaattatcatcaagctcaatgaatacattcgccaaatgcgtcgcagtcaccggcattctcattcctctcctctctccgggaatccctatccctttactcttcttcatccctctcaaattagtaactttttccaattcaatcgtcacttcctctactctcttcggtctttcctccaccggtggtttccgttcaaccaccgtctcttcctcctcctcctcctcttcctcatcttcctcctcctcatcttcgtcatcctcagtgacgactggtgaatgtggttgaggaggcacaggccttgttggttgtggttgtggttgtggtggagtgtcttctagtgtggttccaggcatattctcaacattagggaagaagtaatcgtagaaaggttgttgttgctgttgctgatgttgatgctgatgctgacgtggcggcggaattggccgtgaattcgccaaaggaggaggtggcggactttctcctcctgaagatgatgatcttcaatcgtcgtcctatttcctctagtactacctccacggcttctcgatttcctaatcaaacgatcacgattctccaattcagaatcatcatcatcgtcatcatcatcatcgttatctagggctccatcttcttcaataccgttgagtccactaccagcatgaccaccaccggatctaccgttcatctccggcatagtagcagcacgttgaagaggaagcggtggaggaggaggaggaggaggcagagtatcaggaatcggctgaggaaccgcagcggaggaagaagaagcggttgaattagaaaccggagcggtggaagaaggaagaggaggagatatagcagtgggaagagaagaagtagaagcgattgctgctgcggtggaggaagacgagtgattagagactaaaaactcgccgtgagagtaatcggaaagagcagctccggtgtttttaagagccatagcgtaagctgagtgagcggcggcgaaagcgttacgagcagtgacggcgtctttcatcaattgttttcgttctttgcaacgagtaactgcttcttcgttctcgatctttgattgagcacaacccatcttcttcttccttaagaagctctcttacttcagatcgatcggagaagaagagattgaagaatactcgaaagctttagagttaagtttttaaggaaggaataataatagagagaggattgaactgatacgtcgtcgtttagttgttagaaaaggcattaacgctttctctaatatttttcgttttttgggttaaattttccatttttcgttgggctactctcaggggtaatgacgtggataaagttaaaaaaggtaacaagcgaatataacgttttctgtacttttgaatttttaaacttttaacgtataaaaaatcttttgtatcagtcactactcactagtaatataaggattataatgctttttttctgtcgcctaaaaatcatatatagatttatccaatacttatgtactatgtaggatggttatttttttatataaaaaatatcaaaatatatttacaaaatagtcaattttttgaggataattaataaaataatcatatattatagtattttgttggaacatgtcaaaaaatacatgtataattacataaatttctgttataacatgtttttttctctaattatatgtgatagcataatatattttttatgttattttctcgtattacatgttatttatgaaaaacacatgatcttttttgaaaaaatattatattcagtttatatcttttttatcgtgttattttgtactaatacatgttttgtaatattaagatcaaatgtgatttgttttaaaaaaattattagtttttagtaatagacagtttttattaagatcatatgtgattttgtttttaaagaactattcaagttaattttttcgtaacaatatttttttaaaaacatttactgtattttttaaatatcaatcgtttagttaaaaataatatacaaaacttaatgttatatgctatttaaaaaaaaaaaatcacgcaaatgttttgtctattattgatcttgcaacaaaggaatgatgattttgtaatttcgcttcttctcat

SEQ ID NO: 30321 - DNA, 3780 bp, Arabidopsis thaliana landsberg
agtctaactaaaaccacactgctttcgtacactggccttccgacaagtctctttgactgtttttatcttaagcgccatcaagttttaaagaagacaaccccatatctttcctcccatgaatcatcgtgtccatattgctatagttcatgaaaaaactaaatactatcgacaactgaagaaaagatccggatcttgtggaccgagtgaatggttgggcccaattagaatggtctaccctaacatctagccgtctacacgattgatcatacgtctaagagggcgaaaccaccaaacgtttggattttatctaaattgatgtacataaagctaacatgattttagtataaacattataagcatcatggaaatcaataagctaacatgattttagtagaaacattatcagctaacatgaattactaaaaacatttattttattttaaggaaaaacatacaatactaagattttttataacattttttctttgtaacattataaattgttttagtttctacattaattaaatatataaaataaattcatttaaataatataagaaaacggaatctttgattaactgctgattattggccactgattaatttccgaccccatcaatagatgagatcagacatacacaacttaagtagaccaaaaaagcggttggtgtaagatcccaaactcacagattcccaaataatagtaatactcttcctcttctcaactctcaccagtcaccagcagatcatcggagatgggcggagacggaaaagttttcaccttgtccgaggtttctcagcacagtagcgccaaggattgttggatcgtcatcgacggcaaggtcctacatctccgatcccagtttctcattcgattttccgttttcccttagattttgcatcttatcttcgtgagatccgaaattcttgagttgtgttgacttggatttataaatctagagttatgtagtaacaagtttggggatagatctgatctgatttgctagattaatgttacttttctaagtctaaatcacagagaaattgctaaaaacttacgtctttataattgaatgtgatagttggtgctgcttaagatgtctctgtgtgatcttgtatctgtagttaaagctagtaaggttcatgtagttcatgtatgttctgatgtatgaacttttgataacccacttaatctaggtctctgattgtgtggaattagggacttatatgacaaagtttacattttttgtgtgtttcattttgatggttatatataggtttatgatgtgacaaagttcttggatgatcatcctggtggtgatgaggttatcttgacttctacaggtaacatatagagatcactttctctgtttgttagttcatgtttatgttaacaagaatgtgttgttggtattcagggaaagatgcgaccgatgatttcgaggatgtgggacatagttcgactgcgaaagccatgctagatgagtactatgtgggtgatattgacacagctactgtgccggttaaagctaagtttgtgcctcctacgtcgacgaaagccgtggctactcaggataagagctcggattttgttattaagctccttcagttccttgttccacttctaatcttaggcttggctttcggcattcggtactacactaagaccaaggctccttcttcttgaaagattgaattgtggcctaagtgaattgcttgtgtacgacgtggttaaactctgtctctacctctgtttgtcttgtaagacatcattatattctctattccaatcaactgatagacctttgatttttaagccatctacctttgttgtcttatatcaatcaaatccatttacaatatcactcacacaccagtctcaagtctcacttaaaaagcagcaacaggtaagagaaaatgataacactgagctaatctgtgcttgcgcaagttctctccatcagtacctttgaatctgttctgaaagactgctttgatggagagcttgatcctcttgaagagctatgcccaaagaagctaagtttccccattttctttgagaaactgctcatgaatttgcgcgaatgagacctctgcatatctctcttcatacatatatgttctttctctaggtcgttgagtctcattctcaacctagctaactcgagcttcagttctcggttttctctcctcagagacgcatagttgtctttgggggacattgttgcactgagagctccgctattgattctccatgactgctgttgttgctgctttggctttggctcttcgtctgagtaagaagagcacaaggagcttcgaagcttgagttgctcaaagtagagaacttgaactatggattgcagaggaagccgctcgttttgtgcagcgtgtgctccagcttcttgtgagagtttctggaagtcaataagttttgatagtttcttcttgtctgaatctgataacccttgatgtgcctaagagcataaaacctaataagtatcaagtcacaacaagagtaagtaaaattttcttgtagcaacataccttaagatagagatcaatggcgcggtataaaccatcgtgaagggtgcgagcatgaggcggtaaggcttctgcgataagcaagaacttagaaaggtcaaggttagcatcgggagctatctcagcaagataactgtctacaagctttgcaactttaaacatggcggtttgtgaaggcgaatgtggactatcgcattcaaacacagactcttcatcctcactatcatctcctccttgctgtgagaaattcactaagattctgtgaaccgtgtcaatgtcgaacaaagtgtctcctgcatgacgaaaagacgggatcaagagatcgtcaagagtcgccatatcgagctgagaacctaacctcctctcaagatcaagcctgcaggaaactgaagtatcaagaatcactgctcttctcagtaacccgaataggaaactgatcggaaccacgaggttttcgactggcaaaagcgtaacaattgtctcaacaatggtttgttcatgttcagatctctttgttagctctctctcagcgtaactaaccaaagaagctcctatactttctggacgtacaccacgacacttcattgcattcataactctctgatacaaatcaatcctcagaaccgaaagatcttcgatccaccaatctcctccatcaccactgcttttcacttgtctgctcatatgaagcctccctgagctactatactccaacctcgaaaagcttgaagcgatctgctcagcgcaagccttcgaggcaatggcatcgatacatctacctatgatattcagttcatctgcaagagggagaagaatctcggattgtttcaagacttgaacacacatctcaagattcttgcatacgatgctctcaagatactcctctgttcttgaagccaagttatctttggagtactcttccgtcatctcgaggtaatcagagacacaaaagagctgtgcaacgttcgaagaagtgatctcgaagttaatcccatagcagaattttgctgctagttcgaatgtctctgctcctcctgggagattaagaagctccactttggagatatctgaatctctatgttctgcagctattctccggattcttccacttctagagactaaagggaactgagaaatggagaagcaaagcatgttcagtaatgctttacctgagaaagcagtgatggttgtgtactaagaatgcatataccttatgcagagcaaagtttccaccgt

SEQ ID NO: 30322 - DNA, 1953 bp, Arabidopsis thaliana landsberg
  unsure (1)..(1953): unsure at all n locations
gatattacatgtgagtattcctttgtgaacaacatatgagtacatgttttatcaaaaacttccattacctcgttacaaagctcaactatatggtccgggtctttccctcccatatcagcagcttttggtatagtcctcacaacttccatctttttattgtaaatggtgctacctactttaatatactcctccaggggaactggtcgaaactctgtctgatataaagctgcctttcaacatgtaaaaaaaaaaaaaaatctggttaaatggccacaataactttacaaagagtttcaatagaggtgaaaaaatagcttccgaaagtaacagatacataaaacctatcatcatccatttaagagatctggagatacagaggtcttcattttacaggaaacataaattttattaacaatctcaaacagtatctctgcgcaatttcatatataccatattttataaattcccacagacatgcagaaaagtgtcatgcaactgagtgagggcaaaatatatacatacacacacaaattgtgatttgttttgcttacttgaagccagtcagcaactgcgccaacatttggcattgtagcactcatacccacaatttgtaggccatgagcaggatcagctttgccactgctagtccctgaactctcaccactacttgattctgaactgccttcaccagcagcataacgaagtttcgtcaacataagttccagaagataacccctatgttggtcacccacctatataaacaatgatcaaaagattccttttaatgcatttgttatcaactatatgaagatagagcaaaatacaagcaaagataaaaaataaagatgttttcagacagttataacttataagcttatccgagatccatgcagatgatatatgtgaaaaggcataccatatgtagctcatctataactattatcccaagttctgacaaacgaccctcttcaagcaagcgatttatcaaagagtttgccttctcaatcgtgcagacagccacagaagtgtctttaggaagtgttccaccaccctgatttccatagtaactacgaacatgcttaccaagtggttcaagaaggacctcaaggtgttccgcctgcacccaatttgaaatgcgattaaacttacagaaagtaatattgcaaaacgtgtaggatgcttggagaaacaacagaaaccttctcggcacaaatggatacataaggtagtacaagcaatgccatttttccagttcttatgacccggcgcagcatcaagacttctgcaacaaaacnnnnnnnnnnnnnnnnnnnnnnnnnnnnnnnnnaaattgataataaattcttgtaagatagaagcctcctagtgagattaataatactgctatcatgatccaaagaaaatgtatgaaaaagaaactttgaatcagattcatagccaacgatgaagataccttgtagaagcacaatatactagattccttttctgcaaaacaccatctacctgaagacactcgacctagaaaattaacaatttgtattcagctcatgaaaaggaccttcagaggcaatagcatgcgtacaaacaggcatacaagaaagaataggaaaactttttcagatatgatactgacctaaaatcactcattaatcaacggcgcatatttagaaagtataaatgcaagatataagaatagagtcgaggataaaaattgtcaataaattttgtgtaagttcatgaaaaacattaaaaaataagaaaaccaacatacatcacatgtacaaccacggcacaagtgatatgataaatgtcatgaaaggaacaatgcatgaagagccgattaactttggatggcgaatactagcagcaggctctcaactgataaaataatttatgaactgcaatagagaaacagatttacatctatctatctatcaatcaataaatttatct

SEQ ID NO: 30323 - DNA, 2365 bp, Arabidopsis thaliana landsberg
ccttttcggttaatctaactaagtacagttacactaaaaaaataaatgaaataacgataaagttaaagttgagtaggaaacttccaggaaattgccaataggtaaactctcacacttatcactccccccatttatatatgtcttcactttctccatcgaatcattaaattcacattatgaaactcgccaaactaattccaaaacgtttcttcatcagatccaaagatcgttccactgtctctaagtcccccacggctttttccttcggatccgcttcctcatcttccggccaagactgtaaaaactccggtggtgatggcggtggcggttccgttaccccgactagcattctcccggaggttccttctccttattcctacgtcgagattctccaagcgtttaagttgatagacagagacaacgacggagctgtctctagacacgatcttgagtcgttacttagccggctaggtcctgatcctttgacggaggaggagatcaacgttatgcttaaagaggtggactgcgacggcgacggtacgatccgtcttgaagagcttgcgagtcgtgtagtctctttagatccggctcgtgactcgactgagctgaaggagactttcgagttctttgacgcggatcgtaacggtttgatctcggctgatgagcttctacgagttttctcgaccattggagatgaacggtgcacgttagatgattgtaagcgtatgatagcagatgttgatgaggacggtgatggttttgtgtgcttcactgagttctcacgaatgatggatctccagcgttgatcttcccttttcttttttttcaaagttttttttttcttgtttttgctatgcctatgaagctctttttgcccttgttctagggttacgagtatcttttgttttcttgggaattagtgttttttttaagctgaataagctgtagtgctaacgaagaaaagatgaaattttgagtatgaagtaattaataataaagattctgatataatccattcttaaattaaataaattgcataaagatgcatttagatttgagaatttactcagtttgcagctttttcagtcaaaattcatttataccattaatgctaggacatgtgaggcacaataatttttccattaaattgtgaaagaaaaacaatggtctaatttgtcagattcctcaaaaggcatgttcttaatttcattgctcctttgaatatataagattcttgtaccattttctattttcttatattctactgccatttttgcaaaatgttagtataacatttaaggttttaaaaaccaattggccatgttaacttagctcgtcagtgtatgtatgagtcgtagggatgattgataatagaaatacattgtagatgaaagatgcgtgtgaagaagataatagtgaagtaatgaaatagtcctaattaactactttaatcccaggtaaaataaaagcaacatgcataaatatatgaattcagatcagactaattttgaggttgatggagaaggagattttcgagtagtagaagcaggagttcttttagcagaacagatacaacaacaatatccgttgtaacaaatcggcatctttcctgttctcttacatcttggaatcccaatctcaacacaatctctatccgtttgacatatatctccaacactcattgtcaccaagcctgtatatatatacgttcaatagtataagcaaattaaggactaatgatattgaaaactataagtgtttgatatatcgagattgacataaattacttacacgacgagacaaggaagagaatgacgaagaatgctgaaattttctccattttttttttcacttatttgattgaagatggatttttggattcataggtgtcccttgtaatttatacaactcgtgattaatggtttggtctttgttcaaatctaataggatatatatcagttaaatacatgtccaaaataattggtcaacaactaaagtatttccttaattattttgtcaacgaatattctttttcaacttgtgattgttaagtttccaaacagtgaatcattagaagaatttagagattacgagatagaattatttcaagaaagtatcataattcataacttaaatattcaaatcaatttcataatctccgaatcatcctaatatggaaacttcaaaatttaaagcaatagagaaaagaaaaaaaacaatattagtatattactaaaattaaagatattaatttctcaagatattactcatctaaataaaactgttttgacacgtagactaagtgaggacgtgacaagtctcgaaggctgaagaccactctctcactctgcttacttgatccatt

SEQ ID NO: 30324 - DNA, 1846 bp, Arabidopsis thaliana landsberg
catgctctctcaccattactgttaaaaaaagaaaaatattaactatgacccacgatatttccttttaaccgtcaactttttaaaaaactttagtaaaataacgcaataaataccattactgccaataaacttcacagagccaaagaacatgggttaacaataggcacaactacagtatatttttactgtaaactgaaaatatttaccaaaattaaaaatgataacactacctcggaaaagcacttataaatagaggattggtgcgagtaactgacattcatcatcatcatcatcatcatcattcacagaacacacacacacaaaactcgttaaaacaaagatggcgaattactcaagtattcacattctcttcttggtcttcatcacaagtaaagagcaatcacactctgtttctgtttctgtttctcctctgttttatctgtttctaaatgagaataatttcgatactatttcttaaaactatatttttttatgttcattcgtcttcaaatcacaacataattctccaaaacatatcgtgttttttcttcggatttaacagtttttattgttgttgtttgttttgaaattgcaggcggcattgctgtttccgccgccaccgtcttcactttacagaacagttgtccttacaccgtttggcctggaattctctccggcaacgacaacaccctcggcgacggcggatttcccttaacaccaggcgcttccgtacagctcacggctcctgcaggatggtcaggacggttctgggctcgtaccggctgcaacttcgacgcctccggccacggtaactgcggcaccggagactgcggcggtgttcttaaatgtaacggcggcggagttccaccagtcactctggctgaattcacacttgtaggcgacggcggcaaggatttctacgacgtgagtctcgtcgacggttacaatgtcgagatggggattaaacctcaaggaggttccggtgattgccattacgccggctgcgtcgccgacgtcaacgcggtttgccctaacgagcttcggctcatggatccacatacaggaatcatcgcggcgtgtaaaagcgcttgtgcggcgtttaattctgaggagttctgttgtaccggtgctcacgcgacgccgcaaacttgttctccgactcattactcggcgatgtttaaaagcgcttgccctggtgcttacagttacgcctacgacgacgccacgagcaccttcacttgtaccggctctaactacttgatctctttctgccccacccggaactaaaaaacaggagctccggttcagatttcacgtttcttttgcttagtagcactttggttcatatttttccattttaaagatttttctagtactcagttgttacattcatttcattggcattgttgttttgatttgtatcttgttttatattttacaaagtattgattttgcattacctattttatttgagatctggaaaaacaaagatggaggcttcattagagattttctttgtttcatatcattttgttcttgatggacctaattacatgagagagcaataacaactactagtgtttaccaaaagagagagagctaaactatttacccaaactttttaagccgcggaatgattaaaacatgtgacccgcgcagatatttgttagtctattaaaggagatttagctgatgcagttaaggatcagtgtttctggcttctttggtcttccacttggcaagccttcttcattcctgttgctgcctgaacgaatcccacaataacctgaagctcatccatttgctgtaaacaagaacatgtctcagactaatccaaaatcagaag

SEQ ID NO: 30325 - DNA, 1535 bp, Arabidopsis thaliana landsberg
  unsure (1)..(1535): unsure at all n locations
ttttataaaaccaacaaaaaagtttattaaattataaatagaggtggtttatttttaatcgtcaaaaaaaaaaaaaaaaaaaaaacatccataattaagccttttgttttctattatttgttgtccaggttaaagaaaaagcttagaataggaaaggattagtaagatacatttaggttttaaactacaacgatgatgaggtcagtgcatgataccttctttttccatgattttttttttttttaggaatttggatttcatattgatttaaaaggtttcaagtaggctaaagttacgatctatggttattctctttgatttcaaattgaaggctaaagttaccatatctagggttattctctctgttgaacgatccatagaactaaatgctttggggaatttgcatctgatttttctgactagaatttgttgtttattaatctttgtgcattggaaagcccacaaaaattgcatcacgagtcttcttcttcaatgagttcctctgacatgccgattatctcgaaacaatttgaattaatgtcgatgactgaccgagttctccgacacaacaaaagattactacaagagtcaagatattctccatacactttagggttagtgatcttcatcattcccttttgaaggtttattttcttactcgtgttagaaagtgaaaagtatcaatttgtgcaggacaaaagagaagcagaaacataaacaganagaggaggctgtacaactaggagttgagctctctctctttgtcgctgaagcaatgttcttattatcagatgacatacgttctatgttagtcttctgtttttggctattcaagtatgcagggaagagaaactttgacggtcccgtggtaggaagagtgttttatgttattcagtatgtgtttgaaacatatatcaaacccaagaatggagtctataaggatggtggcaaatcgagccaatgggaacagttcaaaacgtcttcctatcatttttcttttggagtcagagttttggctcgcattgtttcaattcttgaaatcggtggcttagtgaaaccgtctggttttaaacactacaaccaagagcttaagaagctagaggagcatttgagatctgtcaaggatgtatcggaggcgaatgggtttgcgagagaagctatagagtctagcatttttcacttgtggaagtctctctttgaagcaacaccagaaatgatacaccctagtaagagtaaagttcttgagctgtttagccctcttttgaacgaagcaactctcgaagcttgctctcgacatcttacttctttatgtatatgaatctgttttttttttttttgtcaataactttaagaactttttttaccagattatccgctttaaaatttgctcgacgagaaatcaaacatttcgtgccagagttgttttttttctttctaaataaatacttcgaagacaatagttatgtatagagaagattgttgtatcaaatgacttacaaggaactctagatcggataagatcacgtctgataatg

SEQ ID NO: 30326 - DNA, 2903 bp, Arabidopsis thaliana landsberg
ttaccagctgaggcgaaaaaaactggtgtatcaatgaagcaggttactagtggatcgtctagagaatattctgatgacgaggaccttgatgaagagaatgaaaccaccggttccttgaagccagaggacgttaaaaaatctagaaggtaatcattactttttctccaatttcttgtcgtttgaagattacatttatagagccttgttcttccttttaatatttgtaggatgctgtcaaatcgtgagtcagctaggcgatctagaaggagaaagcaggagcaaacaagtgacctcgaaacacaggttttgtgttgtatcctctcaacacctcatttttgtgttgaaggatattaatgagacctaatttgtattttgataggttaatgatctaaaaggtgagcattcatcacttcttaaacaactgagcaacatgaatcacaagtatgacgaggctgctgttggcaatagaatactaaaggctgacattgagacattaagagctaaggtaagaagacttaagtattatcctcctctcctttttctgaactaccctttttttgtatacagttttagtaactcccatgttatgttaaggtgaaaatggcggaagaaaccgtgaagagagtaacaggaatgaatccgatgcttctcggaagatcaagtggacataacaacaacaacagaatgccaataactggtaacaacaggatggattcttctagcattattccagcttatcaaccacactcaaacctaaactatatgtcaaaccaaaacatcgggatcccaaccattctacctccaagactcggaaacaatttcgctgctcctccatcccaaaccagctctcccttgcagagaattagaaatgggcaaaatcaccatgttactccaagcgccaacccgtatggctggaataccgaacctcagaacgattcagcatggtaagctaaaacatggctctttcttttaagaccattgaacaatttaaaaccatttgaagtactatgatccctgtttatacatatcagattcctgtctcccctttttttgctcattttacaggccgaaaaaatgcgtggactgatcaaacaagaagcgggtttcgcactatattaatgtctatgcatctgtaatttgtaagtgttattaagttacgaatcatgagaaaacatcttgtgaaaatacagtctcatggcttatatatatatataagctctgtcttataacattacaagattcttatttgagaatcgtctttctatttatagctaataacagagtgtatatctgtttttatccaatggtaaaagagatatctcacatggctttactaatttcccctatcattaaattccgacaacctcggcgatttccatggtagatcgatcaagcattcacattttctcgtcagaaaacacacaaaaaaaaaacagaggagaaaaagagacgacgacaaacaagtgaaagaaaaaagtcgtcgttcttccaatttttttctcctctctcttcctctgtttaacggcgtacgtaagtcaaaatgggttcaagtaagctaaaacgtgccataggagccgtgaaagatcaaacaagcgtaggattagccaaagtcggtggtcgaagcagttctttaacggaactcgaaatagctgtcgtgaaagcgacgcgacatgatgactatccagcggaggacaagtacattagagagattttatgcctaacttcttactcacgcaattacgtaagcgcttgtgtggcaactctctcgcgacggctcaacaagaccaagaactggtcggttgctctcaaaaccttgattttgatccaacggttgctaacagatggagatagagcctacgagcaagagatcttcttcgcgacgagacgaggaacgagattgcttaacatgtctgatttcagagatgcgagtcagtctgattcgtgggattactctgcttttgttcggacttatgctttgtatttggatgaacgtcttgattaccggatgcaaggaagacgagggaaaaaaaaaagtggtggtggtggtggcggtgatggtgattccggcgaggaagatgatcatcgagggacaagcaccgatattcggtcgaaagctattgtggttaaatctaaaccagtcgcagagatgaaaacagagaaaatcttcaacagagtacaacatttacaacagcttcttgatcggttcttggcttgtcgtccaacaggtaataattaatttccttggaacacacgtttttccactttcggatttcttggttaataagttaggtcttttgcaacaggtaatgcgaagaacaacagagtggtgattgtggctatgtatccgatagtaaaagagagttttcagttatactacaacataacagagatcatgggagtattaatagagcgattcatggaattagacattcatgattccatcaaagtctatgaaatcttctgtcgagtttctaaacagtttgacgagttagatccgttttacggatggtgtaagaacatgggagttgcaagatcttcagagtatccagaattggaaaagattacacagaagaaacttgatctcatggatgagtttataagagataaatcagctttagctgcacaaacaacaaaatcatcatcaaaaaggtctaacaaatctgaggaggaggagagcaaaacagagtatattcaagaaaatcaagaagatttaaactccatcaaagcattaccagcaccggaacagaaagaagaagaggaagaagaagagaaaatggaaacaaagaaagatgttgaagaagtggtttcaagcaagatcaagagggtgatttgctggatttaacagatgaagcgggtgtacggcaggaacggttggtgatagtttggcgttcggttatttgatg

SEQ ID NO: 30327 - DNA, 2650 bp, Arabidopsis thaliana landsberg
gcaaccctgtcactcttacctgttcaaattcatctcaggctccgtcatcatgttctaaattactataacaaaccacataaactaagatatacaatcattgatatatagttgttcaatatggctttaccatatatgatgccttaggctaaattagtctatggtggctcattattaaatatcaatttcaaaggcaccatgagtgttgttgcactggttttgccttccttgaaaagacgtatacatgcattatgacattatgcacctctatatgtccaagctcataattcttatgtactttacttgaaacttaaaaaaaaaaaaaaaagacagatgtgtgagaaaatttactaaccagaaagttcatggctccagctttgtaatgatgaaagtgatttggtcttttctctcttgaaatgtaaacaacatgagggacctctttttcgtctcccacacctcccttgttttcccataccaccttcacataaacacataaaacaagatttcaatgaaattgttataattaactcttttgttttgtggtgattatttgattttactctggaaaattgtagaattaccttaactatagttgaatgatcatttgattttgtgtttaagaaagcttcaaagtcatcttctgcatccaaccagtgggaacttccagtggcatcttctactttctggcttaacttctcgtactccctctttatattaatacaaaaacacaatttcaagaaaattcccaataattattacgaaaagaaatgaatgaatcttgatttttttcagtttttttaaaattcaaatgtcattgtgttaattggctgaagaacttgtttatatttttatcaatcacaacaattttcaaaaaaattatagataaacattgtttgaagaatttgtaaaagacaaacaaaccctttaccttagtcatttcccagtctttactgaattcagaaccttctgctgcttccggagagtttctgaagtacataaaaggagctctaactctaacgttgtatttcttgcagaaaggaacccaaatcttggcaaacttagaagcttccttgagagagaagtaagtgagaggtgaacatccatcgtccgacacataacaagctagtttgttcgccggataattcacagctaacagtgaaagcactgtgtttacaacgataagcggtggctcccttactggatcagctgtggtcacgaacatatctaccggtggaagttcatgaaccctgaaatgaaaagttgctatgtcatttcaaatttttagtttcgaatgttttctactcaactaaaatgaaatgatatattaggacttgatacaagtttgataagaatattgctttttgtgtatatataggaaaatggtacctttcatcaagtctttcaggatatgttttataatcagcaggactccattttatgttggtaataagcaaccatacgaaggtgaaacaagtttcacagaggaaagccacgatccaaacggtgtccttttggttcacatgtaggatacggtacaatagaagagaaaggagaagacctagaatagtgagatccacagctcttaagaaatagcttttgtgtgagatcctttcacaaagaggagggagaggagagcttgattccgccatggaaggagatttcttgaggtttttggatatgtttctaagaattaagtaaaaaatatatatataatttgtatacacttataataaaaaggagtgatgagaagatataaaattgagtaagctttttttgtgaaaactattaacaaaaaaaagaacaaagaggtcatagtcaagtgaaattggactagtttgttatttagatacatgaataaaaaatgcaaatattatttatttataaaacgtatatttattgtacacattgatatgaccaataaaatttatgaactttacgtaaactggaattaaacttgtagatagataccaccactatactgatcctaagttaccatcaagtgaaagctatcatgttggtttttaatatcatattagaagtttaaaaaaactagacccgaagaaacttttttcaacgaattaattactcatatcgaagtcgtttttttttcgttattaataaaacaattcaattatatagaacgttatcttatataataaaagattgtcaataatatatgtatctttgtctatttgtggtgggttattgtgtggtccgattcaaattaggataacgataaagtatgtcttcttactcctgattcaagtttgcgctttgtggtgaatgatgactagtcgccactcgtcacacacaaaatgaagtcaagtaatgtttcttcattttgttattggtttttgttcctaaatcacttatctagatattggcttcgtatgccctattttatctcttaaattttcaaaaaaataacgtccacataaacagttgacttcaaaccccaaaagtagaaaggatgaaatcattgagtcattttcatgaaatcgaaaaaccacgaatcttacaaaaacaaaatcaatcaggtcctgtcatagttttaaaacccacaaagataaatagtgtattttttttttgatcagtcaaataaatagtgtcttatatggatataagctaataattgtgagaacgagacaaagcc

SEQ ID NO: 30328 - DNA, 962 bp, Arabidopsis thaliana landsberg
atgtgataaaatccactttctttcaaatcaacaagcttcacagctccgtcaacaggatcaaaaaccctaatcaaagcttgaatatccacagcaacaacgtcacagatctccaccattttctcaagcgtctccggtaaaatctcgccgccgactccaacggccattccgaaatcaaatctcgaatcaggtatatccgaaggaagaatcggatcacatgcagagactcttttcaacacccgatcagcatgaccgatcccatcgattcccagatcgaaatacgcctcgaaaactgttgtttccttctccggagccacgatcggagagtgggtgacctcgtatctgaagtcgtgtcctactttggagaccaagtcgcaggagacagaggaagaatctaagacattagatatgaaagaggcggcgccgccgagagtttcagctacgacggatccgttttggattaaaacgtcgtggcaataatttccgacgatgagaacgcggcgattgggaatccgacgcggcgagtgagacgtttgctgcgacggaggaggattcaacgtcatgatcgcggctggtgcagaggatcatcgagaaagtgaagcagaaggaagaagaagaatcatggaattagtaagacgaagaagccgaccaacgagaagaagaagaagagacaaaactaatggctataagctaatacgtaacgtcttgagattcgttccctgctctctgtcttatgatatatgtgtcgcgagggagatgacgcgcgcctaattttcctcctttttttttttgtaaccgaaataaaatgatgttaaataataaaatagagaatatgatcattcttctccaattttattttgttcgaattccttattctcctccacttatccaagacaatttctttttgaaaaagctgtcacataccaaaacaagattcgaagcgcacggcggctcagtggactttt

SEQ ID NO: 30329 - DNA, 868 bp, Arabidopsis thaliana landsberg
aacaacatcaacaacagcaacaacaacagttctttctccaccatcatcagcaaccacaaagaaaccttgatcaagatcacgagcagcaaggagggtcaatattgaatagatctatcaagatggatcgcgaagagacaagcgataacatggacaacatcgctaataccaacagcggtagcgaaggtaaagagatgagtttacacggaggagaaggaggaagcggtggtggaggaagtggagaacagatgacaagaaggccaagaggaagaccagcaggatccaagaacaaacctaaagctccaataatcataacaagagacagcgcaaacgcgcttcgaactcacgtcatggagataggagacggatgtgacatagttgactgtatggctacgttcgctagacgccgccaaagaggcgtttgcgttatgagcggtacaggaagcgttactaacgtcactatacgtcagcctggatcgccacctggctcggtggttagccttcacggccggtttgaaatcctctctctttcgggatctttcttgcctccgcctgcgccgcctgcagccaccggactaagcgtttacctagccggaggacaagggcaggtcgttggaggtagtgtggtgggacctttgttgtgttcgggtcctgtggtggttatggcggcttcttttagcaatgcggcgtacgaaaggctgcctttggaagaagatgagatgcatacgccagttcaaggaggcggcggaggaggaggaggtggaaacctttatcaatccaccaccatatgagtatgacaggccgtatctgatgttaacaacctatcatatgaggaaaccctgtactatccaggtagtctataatgtatgag

SEQ ID NO: 30330 - DNA, 3986 bp, Arabidopsis thaliana landsberg
  unsure (1)..(3986): unsure at all n locations
tttaaatttgtgtaatcgacttatgaatatatgagttcttttgcgtccaaggcatacctacgcttataaacgacagggattgaacaaaacataggatttttttattattgaaaccctccctacttgaagttgacgataaccattaataacatcgattaatggaaatatgttgaaactagatacgcgtgcatatgtagacaatagcccaaaatgacttggaccgcactaaaatagattataaaaaaaaacatttactataaacaataaagagacgaaccaattgggcttttatgtcaccaataagaccaaataaagtttgaccaacttttttatgtttgactttgcagtgttgtgtagtacaaatgtaacaaaaacccagagagacacattctcatcagatcacactttaaaaacttataaaccctttcccaaaaataaatatcccttgatgactcctacccaactcccccccaacaagcttattccatgactcaaacccaccaaccactggatctgaccggaccaggccagactaagtaaggcaccccatctgacttttacacagaagaccagactctctaatcataccctttttaaccagtgcccccaaactctttaagctccttcgactcttcaaatcgtcatgttcagctcctgtgcaagcaaaaccagactcacagattcacacaaggtagacacacaggcagatttactctgtttgctagtctaacctcagatgcttagataaattagtcccaagtagtgagttttttttaccttcactggaagttgaatccacctggtggtacggctgcatcattacctcctccaaactggaagccttgtgcagagggatcaccaggtggtaaagtttcatcttcctcttccaaccagtacgtttcaagaatcttcactgccttctcatagatttcgctgttgtcatgactctgcagattctcaatcttttctaatccctcagcatcatcgatcagctgtgcataaaagtttacatccccggtatttcctgtgaccttttcagcttccccaactttcaaaatgttctccaatccttccagacacacagtgataatccttggatcagggcacaccaaaagatcacacagtggtttcacgactccctgttccaccatgtacctaaaacacacaacggaataacttaattgactgtttgaaaaataaccaacaaagattctaaaggagttgagatcaacagatcatggagtttatatcggataatcttacttgatttggtcaggagaaccacctgaagtgnnnnnnnnnnnnnnnnnnnnnnnnnctttctttatatcaaactccgcattttgaagcagattgacaagagggcaaatcaaaccagcttcacacacagcctgcaataccacaacaatattagagaacataaacacacagaacatctttcttcaaacaacaaaaaggcttctgaaacatgtcttccaacattagtgattagtttatgagaaactgataagctgagcagaaacaacaatctttagcaaaagttcacctgaatctggtccctgtttccagcagtgatatttgagattgtccagcaagcttcctttttgatgctcttcttatgattgtgagtcagaaggctcaaaaggctaagaagtgcaccatgactaattacacactgtagaaccaaccaaaaaagaaagcaaaataagtgaggaatggtacatgtgtgagattcttaagagtattatacatactgccttaaattagtctaactattcaaaaggaatgttaggtattgcataactagggtaaaaaacatgcagggggggaaataaaatctgggaagaattgacagttcccattctagagattcatctaggaagaatttgacaagtaacttttgacaactaaatgtcattatcaacaaactcagattcagcgttctaagccagtgtatttcattcttcccatcagtattggaccatgtatcctgaataatatgaatgaatgacactataaaagaacaaacatacctgtgtctgcagatcatctccagtgacaatgttaccaatactacgaagggcaggaataagcacagatggtgattgatgcctacagcaaaataaaattgataatattcattaacacataacattcattatacaaaagcacggtgaaatcatgggatttgaaactcactggagaagctcgacgagtcgaggaacaacacctgcctcaatgacagattggattttgtcatttgtgccatcggaaaggtaagagagagcccaacatgcatccgttaacacttcctcatcagtcgaatgaatcaggcgttcaagggctgggagtgctggacgaacctgttattaagagatcacaagaattaaaaagaaaaactccttcatctttgggcagagattaagataggaatgagagacaaacctggtcaaagggaggctgtggcttgcccctgcagaaattagagagggtccaagtagcatttctcagcatcgagagtttagcatgctcattcaactgagagagtaatggtatcaaagctccttgaccaaggacaagatctctgcaccgtggagaatcaccagcaacattccctaatgcccacacaggcttacacatgaaaagattaagaaacaaactagctttagaacatgcttgttcccgaaaacaaacaaaattgacagtatattgagtcatgagaaagaaccataaacacatatcttacctgctcacggacatcatcactctgagaagccaatagttgaacaaaaatcggaacagcaccatgttcaatgaccacctttgtattctctgaagtcccagaagcaatgtttgtcaatgcccaagcagcctcaaactgaaatcacacacacacacacaaagtaattagtatcagaagacaattctagcaaaatatgacagatacataacgaatccaccaaacctgaagctgtggataatcctctctagtgagaaattccacaaaccgaggcacaacaccagcatcaatcacttcttcaatcggaggactacgctcaatagaaagcaatttccggaactgagtagtcgcttcaagctgtaaacttctatcatctgaccaaacaccaccaaccatagcaggcaaactctccaactagccaaaaccaaaaccaaaatcaaaatcgaatcgatctaaacacaatacaaattcttaggaaaccggttccagatcgctagtaatattaccttcttctcaacagttgatgaagcaggaacagaagaaggagcgaattgaggtagctgattagcttgaaggccttcacgacgcttcttctgtaagctttcttcacgcttactcttacggatctcgaccatgttgtcctctctcctccgtcttccttcctcagcatccaccgccactttgtagcggttccggcgaacctcagtcttagcgttaggtctcaaagacatggtggctaatacgaatctcctcttgcttcgtggcggtgaatgaaaaatgagccaacgagagtggagacgatgtatgtatatatatgaaaagtgtatgtatagaatcggcggattggtagaggatgataaaccctaaatgaagtagaggggaacgagaaaagaggaaaaaaggcacagagagaaagattgaatttcgttggtttacaaaaacattttggtaaaatctaaattttaagattcgatacagagaccattaatttacttaagttgacttgtttattcattagtcttttcgcaccgactaaatttaatttaaaataaaatacatttttttttggcaaaacttggttttgtgaaaagtatattatattcgtttaagaaagtttagagtagagaacttcgcatttgagtttggcgttgaggaagacgtgtgacgcaatcctcatatattgggttagattagtctgatagagccataacgattgcaagtacctctggtagcatgacctaggggg

SEQ ID NO: 30331 - DNA, 1797 bp, Arabidopsis thaliana landsberg
aatctctcttctcgtggagtatttgatgtggtgactgaggaaaatctggtagcccaagttgaggatatgcctattcaatccacagttgttggtcaagagacaatgcttgaaagggtttggaacactctcatgaaagatggattcaagatcatgggtttgtatggaatgggtggagtgggaaaaaccacgcttctcacgcaaatcaacaataagttttctgaaatagatggtagatttgatattgtgatgtgggttgtcgtatctaaaactccagagatctacaggattcaaggagacattgcaaaaagattaggtcttacgggcgaggagtgggacaaaaaaaaacgaaaacaagagagccgttgacatacacaatgtccttaggagacataaatttgtgttattgttggatgatatatgggagaaagtgaacttagaattggttggagtaccgtatccaagtagagaaaatggaagcatagtagtatttaccacccgttctcgagatgtttgtgggcgtatgggagtcgatgacccaatgcaagttagttgttttttttcctaaacaagcttgggatttgtttgagaacgtagtacgagaaaacactatgatatgccattccgacgttcctgaacttgcgaaacaacacgctgaaaaaatgatgcgaacaccatatatactgaccgtcattggacaaactaaggcatgcaaaagcacagcataagaacggcagtcacgctattgatgtgttaacttcatcagccggagagttttcaggcatggaagacgaaattcttccgattgggaagtatagctatgataatttacaaagggagcatgtcaaatcatgtttcctatattgctctttatttcctgaagattatgagattaagaaagaggagttagtagactattggatatgtgaaggattcatagatgcaaaagatggtaaagagagagcgataaacgaaggctatgggatcatcggtactcttgtccgtacatgtttattgatggaggaaggatggaagaaaacggaagtgaaaatgcatgacgtggttcgtgagatggctctatggatatcatctgatcttaaagatcaatgcattgtgcgagccggtgttgggttacatgcagtaccggaagtgaagaactggagagctgtgagaagaatgtcgttgatgaaaaatgagcttgaaaagatattgggttgccctacatgtcctcaacttacaactctcctcctccaaaaaaaccacaaattggtaaatatttccggagaattctttcgattcatgcctaaccttgtcgtattggatttatcatggaatagtagtctcactggattaccaaagcaaatatcagagttagtctccttgcgatatcttgacttgtcatatacaaacatcgaaaggttgcctgttgggttacaagagttgaaacaactaatacatctgaatttggagtctatgaagagtttggagagtattgctggggtatctaagttgttgagtttgaagacactgagactacaaaagtccaaaaaggctctagatgtgaactcagcgaaggagctacaactcttagaacatatagaagttctaaccatagatatcttttcaagtttggttttggaacatttgttatgctctcagagattggcgaaatctattcaatatgtagagcttatagaggttgaggaagaatctttcaaaatattaacttttccaagcatgtgtaatatccgtcgaattggcatatggaagtgtggaatgaaggagataaaggtcgagagg

SEQ ID NO: 30332 - DNA, 3351 bp, Arabidopsis thaliana landsberg
  unsure (1)..(3351): unsure at all n locations
ttctctagtcgtcttctctaatagcaagtgtgacaagacaagaagagggaaaaaaaacaaagattagattaggttgttaattaatcaacgttcacttgatcaagcacttaagtatgaaatatagaggttagtaattataatatagtaaatggcaatattgtatgtatataatttaggtggatggttaattattttggttagtgatgtgattagcgtagaaaagatgtgattagtcaaagagatgctttgcgcgtgagaggagggaacgtgtaatatgtctttttttttttttttttttgttgttgttaactaaatacgtgtacactaatctaatcactgtaatctgttgagatctctttgtttttctttttgagggacaatcaattatgtatgttttctcttttaacaaatttgattgattctctactaataaaagtccttttaaattgttatgagaaacaaaaaaaatctatttaaattgaatgtaaatcaatataatgtttcgttttttgaatatcactgccatttgcgaccgaagttttatagattaacttgttgtattacctttagctcttggtcttgatttgttttagatatatcttttgggtttatgttggtcttgatttgttttagatatatctttggggtttatgtttgtttacatgaacaacaaacataatgtcacaaatgaggattatttttgtcttacgcgattagctacatgatgaatatatctattattatttgataaaaaaaaaagagaattgacaacaaatttcaacaaagaaacaaactgtcttatgacttacaaacaacacaatcattttcttttttctctactctatatacaacaaaaagaaacacaacataaaaagaagaaaagtttcctctacattacttcattcttgttcattacctttgaggatattgaacttgcatagtggacatgtcgcattcattttcagccatttcacaatgcacgtagaatgaaagtggtggttgcaaggaagtgagaccagctctgctccatcttcatatgaactcaaacatatacaacagtcctacacataccaacccaattcaaaagaaagctctaagcttcatataaaacatccacaagataactttcaaaacaaaaacttacagcatcctcgggaagaagcacacgctcgtttcctaaattctcactcgctgcatccacaggtatcattttcccaccaccgtcactttgcttttcatcattgttcatcgtgtgaaacctgtacttgggaaggatgctgagatctgcttctgatgcaccctcctaaacacacacacacacatatcaaaaggcagtttattgctttcatttcttccaaaagggttactgttatagtccatacctgccccgcgacggcgtaaagaagagcaataatacaaggtaggcaacaacagagggcgattccaataagacatgccagcacaacgcaaaagatggcaaagaacacatcaaatgcaaggaaaacaaaggttaacctgcaaacattaataaacataatgatgtcattaccattcaactagaagaaataaacattgagcaaaccaacacataccaatacaaatgcgtcgcgttttgcagaaggatatcaccaccagaaacaagccagtagaatccaacaatccaccagacaaatgatattatagtgttcattgattcacaagtcttagtgctgaaaataattgattctcataaatcattagtaaatcattttggctaaagatttatacagcacagataattgaatcgagagctaacctcagaaacctctcatcgttgtcttcatcttcactatcctgattcgtagcttgagcagcttctaaatctccaggtctgcttctagcattcctctttctaaactcaagccaaacaaggacaacatgaacaagacactgaatcgcataaccacagatccaaatcctaataggaacatttggcttctcttctttaaaaaccaaaagcataacaatcgcaacaagaacaaaagcagtgttccaaagcatatccaaagcaacaacaggtttcgagtaaccccaatcagctcgtcgctcttcaagctcttgtgcagctgtttctctaaccaccatcgaagctcctcgtcgtcctgaagctcgatttaatagaaccgcgattacaggttgacgacgtggtgatgattgccgnnnnnnnnnnnnnnnnnnnnnnnnnnnnnnnnnggaaggtgattcaggtgaagacatcgttgaatccgtctttgcttgatacagaattgagagagatgaagataaatctagggtttgttgtgtttcttgtacctatcagtaccactcaaaagtcaaaatagagacaagagaaagtactttaataagtgtatcggtgattcataattgtcttaattcttaatttgctctttaaacaatatgtgttaagagttagagattagaggattacagacgttttagtagtcaacaattagactggtggttaggaaattgagatttttaacacttgtcttctcggttatgtttaagagcaaatgtggtggtgataatgttgaactagaaatatgtaaataatgaacaaaaatcgatggttggtagaggatttcatgatagcaaaagttgaacaacattagaagtttagtaagaacttaaattcgattgtagtggtaagcacttagtataatctcattttacctcagtttgatactttgattagttattttcaaaagtttttgtaacatttgtcttctaaaattccggtttaagttaattggaacttaccgacttaacatttcttacataataatttttttttaacatcatataattaattattctaatgaacaaaagaaaaaaaagattaacaaactaatttcagtttaattccaaaagcggtggtacaccgaaatagacaagacaagtaagaacaggattaactgaaaccctaaacaaccacaatcgatctgggttcattggattcattacacaaaccggagagacatgtcggagaaagagcaccctcggctaattctacacaatttcctgtcgccggcagaatgcaaggttgtcccttttttgcttaattttgtgtctaatcatgtgggtttggttaattttgaggtaaaaacaggaacttgagcttatacacaagagtagcagtacaattgggtacagaccaaatgtcttctccactactctctcttacctcattgccactaattctccttaccttatcatcccttttgtcttcattagaggtcaatcttttaaaactcaaagatttcgcttttgtctttatatcttacttttgtgagattcaaagggatgatcttt

SEQ ID NO: 30333 - DNA, 3133 bp, Arabidopsis thaliana landsberg
agagacgcatatgtggcttccgatccttaagactcatattgcatggagaatacaataagcctaagaagtttctgcttcatgatatcattttctcttttacctttgtgttgaaatcggagtccagatggatgctagatgatttcaaatctctgtgaactacaggaggatggcactgctcgtgaagatactgtaatcctctttatgaaaaaagaatactttcgtagcatacatatatatgttcttggagatcacatggaactactaaatggttgaaagtattatcaatgaatggactttacctcgctatatcaactgctatcttcatcctgagctgccaagttaaacctgaaccttgactaggcccttagagcattcaaaagcacaacaaaatcaaaatcagatgacaaaagatggaacaaacatggatcatatccccttaccatgtaactgactctccaaagatccattctgcatcaactcatacacaatacaactcgtttgccgatatacgcaaaaccccaataaggaaactatgttctgatgcctgatcttagccaaccaatctacttcagtctgcattagaaaatcaacaagagaaagcaaaaaaccgagttatggtttatcgaatgagatggtgcgattctgtataatcatcttaggggtcaaacctcaaactgtttttcaatgtctgtctccccaccgccatcaagtttcttcacagtgactgaggatttttcatcgagacatgctctgtaaaggcatccacgaccacctcggctcaacacattactatcactaaacttgtttgttgcagattccagcaattgatattcataaacagggatggttcctttcctcacagaatcaatcttgtgtacaatcggtttcgtggttacactcttcaccgaatcttcagataaccaaagcaccaaaataagccataacaaaaccaaggaaattacaaaaatataaagagatagaattgaataccggatttgcgtttgataccggtgaagctgttcttcatattcctgtacctccatagcaagagatacacaaggaacatgactgtgacacagagcagagatgatgagactataagagcaattagaatcttcttgttcaagtcctggcgaagcaccactttaacaatgggaggtcctgagcaaagttaaatttaaataagggataaaattcaatttatttgcttaattatcggaaagttttcagttttaattgggaaacagtatcaattcaactaaattcaattcctttatgaaagtatgagcaaacacatttcgacaatttcaagaactagtaagacccaatcaccaaatattgatatttttgttcttaggggcaacatggagaaaatttggaaaggggaaactaataagtacctggggattgagctcccattcgtggagaagcctgagaaatggggatttcgggggaagcaccagaaacgtagacaacggaagattcttgtgatttagtagcagtggagaagaagaagaaaccaagaagaacccaaatgggtagcaaatgacgaaggagacacatatttaattttgttgtctggtatcaacaaatatgcagagaaaagacaaaaagagagagagagagagataaagagtacgaagctgcttcgtgttctatctaattcttttatggagatggtgaaaaatgctagagattatctttgtctggaggagatgtagacaagagacactgttggagttgggaaacagagagagagaaggacaaaggttttaggtgtttggtcttcatgtggcagttatgaaaaggtggacaaaaaggctaataaagcagcaaagagtgcctaatcccagacgtggagttgtggagagagtgaggaggaggatgtgtagttagcaaaacagtttcttcccattagccaatctttaaaattttgattttctctctaccattacaaaaaatttaacatcccaatgttagagatgatgctgatactactagttgacaaatagaattaaaccttttatacgtaaagctaacagatttttatctattaattaaagccttgttcctttttctttaacgtatagttatactatatctttattaaattagaaaaatcaagaatacaaagaaagtacataaagcaatcaaagtacaatccaattacataaatggtgtttttaatgttccttcatattcataagtttagtcttttaatttccaagaaaaaaaaaatacatcttgtcgtaaaagaaattattatttttaatcagattaataaaatggtgtgatatatggaaagaatatggattgagaatggattgtgtaatctctcgatagagttgtttgcatcgaggcacagtaatccaaatgattcgattgggtcactccccaaattcaattcatgcggatttagtgaacaaaacgacaagtcatggtttaatagagtgcatccaagaattttattctttttatttttaaaaaatacagacgacaaaggtccaaaagtttgagcattattcatgtgaactctctatgtctgtcctcttcaaactttaattaccgacacaagtggtcactgactagtcacaactgtacagttgaataacaactagacttattgagggccttacaagaataatgagccttttatatcttattgggtcaatacaagcccagttttgaaattttgaaatgaatcagtcgttaggcccaatatctgttggaaaaacaaatatagttattgggccattaaggaataaaaagccagaacaagcccagtttcgaaattttaaaattggataaggttaaaagccagctgccagcgaaattgaaggatgatatatagttagttacatactgtgtttgttgttagtttgatttgagctaatcttcatcaaatccatcatccatggatttacctgaagaatgttgggaattaatctgcaaagctatcgatgaagacgattatcgattcctggaatctgtttcactcgtatcaaccttgttcctctcaatcaccaatcgcgttcgctctactttcgtcgtcaccgatcgagctgttcctttactcaatcgtcatctccttcgattccgcaacttgaagcgaatcagttctctgatttcactc

SEQ ID NO: 30334 - DNA, 1659 bp, Arabidopsis thaliana landsberg
atgtatcactattgaatattggtaatagagtacgggactaggcaaagagtgtttgcatactcttttactccttccctcagagcttccacttcttctggcttccagaatttctttggtctcctgacatgtggtttcgccaatccgcctttctttaatggagatacactcagagttacaggggttggtcgacgaggccgaactctgctagaccatgtttcctgactatccgaacctttctcatttacattatcctgttttcacaattaaaccacaaattcatgaaccaaagaacaagatttttagaaagcatcttgagggaaaattgactaacactcaccgatgcttcgttatggtcttgacagcctgttccagtcctattcacccgagtaggcggaggagtgacatctactgagtgatcaattgcactgttaggttcttccccttgcctagtggaagggtcgatgtgtccttgaatctctactaaatattccttcagctctcgagcagccatttcgtctcccttatcaagagttggctcatgttcctgatcttgtgcactcaccttatcaaccccatcaggattctccacaccacccacttcttcaacatcattagctttctctctattacctcttctccgggaagcatatggtgaatccttacgcttaagaaacctctttcgagcttctgattcaagagaagaacatccaagtagtgcccactgctctttgagaagctgattaagatgagagatggcattgtacctgatgttagtctcacgaatctcctgataaatctcaggttcctcaaacgccttgtttagctcactctcccatttcaacaactcacgagtcaccaagtcgctctctttctccttcaacatcccaatccgattcctccaaatcctctcaagggcatcgccgaagaagccatccgaagcattcactggccacataaacctaagcgtacattccacagcagtccagcaatacgcagatttgagagaccccatgataaccgaatgttcttgtaacagaagcttctcaagaatttcgaggagatcaagcattccttcgtctacggtaccttgaatcagggaactggagatatctcgcaaaacagcagttaacttgagttttacacagtcgtcggaatctactggtttcagagccgataacagtggagaagcgtaaaccctaggattttgttggcgtcggaggaaaaattcagctacccatttgtccatcacttccatttccaagactttgcaagtaaaagatgcgaaaacccgcgatcagttttcgccgtcggtgcgtggttagggttacaattttgggaagaggaaaagctccgaccaactatggtggcaacaacacacgtgtgaatcattcaaatttaaaatgtgtttttttcttttaattaaataaaacgagacattcaagcggcccattatataatcggcccataacgaaacgatgttgtcctgatccgaattgggtgggtgacccgagatcattggagacagggattaaagttttttcagttaaaaaacagtaatgacttttgagcaatacaatgttgatccaatacaaatatggccggagaaggagacaatttgtccgtatttgtttccggcgaccagagggataagcatttccc

SEQ ID NO: 30335 - DNA, 1257 bp, Arabidopsis thaliana landsberg
  unsure (1)..(1257): unsure at all n locations
atataacacaattcttctcattttcattggatgcatcacatgatgttcagaattatacagcacacaaaaacaaaacaggggaaacagagaaatgcggttaaaagtgagaacggtagataagtaagtggtatcaaattggagtacgaaagtaataaaaccttttcattcattttaagtgttcttgtttgttaaagatgagtggaaactcatcgctatactcagagaagaaaccatgttgatctcccaaattcttnnnnnnnnnnnnnnnnnnnnnnnnnnnnnntctttctttaggccacgatacaacgcaactacacgcaattctcaaaacttgcattatctcatcatcatatcctttaccacagatccttctatcaatagcatctttgcttctaccattactcaaatgcttactcacccactccactaaactctccttaaacccttcttcaccgttgttaatcaaaacaggcttttgtcctgtaacaatctcaagaagcacaatcccaaacccatacacatgtccactcaaagacgcaaccatagtgcttgaatactgaggcgcaacgtaaccaaacttgccgtactaaacgagctatctttagagtcttgagactcactaagttccccaaaccgtaatcaataacacgagcatcgaaatcttcgtcaagaagaatcacatttgagctgatatattgatgcatatacaacggttgacatccatggtgcaaccaagctagccctctagccgctccaacagcgactctaacccgagttggccaatcaatatcccattgctgcagctgagaatacaacgtcccattagccatatgcttatacaccaacaatatctcgtcttccacaacgcaaaacccgagaagcggaaccaaattcggatgcctgatctgacctaacttgttaatctcagacctaaactgtttctcactaagctcacaacaactactaagcctcttaacctccaatgtagacccatcaggcaaatcagctttgtacgagacaccacttctcgacgaaacaacgatattcccggaatcaaaaccgctcgtagcttcaatcaaatcaaccaatttgatcttcacaataggtttctgaaacagagtaacttgcacaagcttatgtgatctcaacaaaccaatccaatcactatcatccttacattttccggcgccataaccgtagttattcatcttcctcctatctctaataaagaaccaccaaaacatcccaaatccatca

SEQ ID NO: 30336 - DNA, 1616 bp, Arabidopsis thaliana landsberg
aaaaaaccacgccaacaaaccaatccaatcactatcatccttagatttccgaggattatgatcattcttcttcctactaccatctctaggagggaaacaccagaatatcactaaaccaacacacacaatcaaatgacagctccaataactccagccacaataataatactcagatttctcccattcaacgcttcacatctcgataaaggcttcccgcaaactctgttactctcgtaaattgtacaactgctttctagtccacaatacagctagttaagctcaccaatagatttcacaagaaggcaaaactgaaacctaattctcacacttttcgattacaaaacaatatcagctcaaaaacagaattggattgctatctccctaaaccctaacattaacgaacaattcaaatgtgaaaccagctgctccaattcaaaattgaaaccaaactagtttctgtttaaaccaatctatagagttccattaacgatattcttatccagtttccatcaaatcaaccttaacattagaagcacaaaattggaacggacctggaggcatcagagtaagaagaatcagaggaatgggaggagtgttggcttatacggtattttttcgaggtggatccactcaacaaaattggaaaaatctgggatttgcacatagagaaagtttgggaaagctgtcccgaagagatgaaagttttttttttccttctttttgttgaattctgtcaaccaataactgtctgccacgtgtgcggctctctctaattcaaaaagctctctcaagaaagccgactctctgcaaaatcacttgttttgaattatttttaatcattttaatcaagagaactctatgaatttgtcaagagagcttcccattggaggtgctcttacacttgtcaaatgacacttgagagcttatctttcttgatttttctattctttattttatttttataacatttttcatttattgctttgaaacataatttacaaagagatcatacaaacatgataaaaaaaagttaggagtataataaagaacaacaaaacgatgaaagttctggtccagaaaaaaaaaattatgaaagcagattatgaccatttcttttgtttcttcttctggaaaacttactcgtactaacggatttgataatccgttattttctgtttttcgtactccattgttttcctcgctaaaggttatcttaattttctttttaatttatttggaccaaaagcccaataatttgtttcctcaacttcaaatatttttttttgttcaaactcacatattagttatttcgaaaaatacatataatttgttttttgctaaacgaaaaatacatataattctttgatttttgtaatgatttttgattaaataaaagaatatgtacatttaaaaaaaaaaaaaagtctttgcaaaacaacaagcatcatgaacctcaacaaataatctttgtttgtagattttttttaaaaaatatgataaaagttaagttttggtagtttgcgcggcttggagtcttggacttttatcattggaccagttcttcatattgttttgctaaattgttaatatcattaattaaaaatgaataatcatgt

SEQ ID NO: 30337 - DNA, 2922 bp, Arabidopsis thaliana landsberg
caaatctgtgaagttttgtaggacgaatctaagtttttgatcatcaacttatatctctagtctccaccactgaaagttttcagcctaaattttggctcgggttgtttggtttatgaagcttttatagtgtaactacacagctgatacgaagaaaccaagtgtaaaaacaaaacagctgatacgaagaaaccaagtgtaaaaacaaaagaaaatattgaaatagtaaacaatttgaatggaaaagatccactaaaaagagacggtgatggtgagctcgtttgcgcgaagacacctgtgtgttggttttgcaatacgtaagtgacacgttctagttatcatcattcagatctcaccgacctcttctgatcttttgtaccaaagtatacttgtttattcgcagatcttttgtagacttttcacctttttaactgccagtatcgtttagtggaagacgtacattggtttttacgtcttctatttctttcaattcaatcatcaaactatcaaagcatcttcatgactacaatagctttctcactagtcacttgtgggtttctcgaaaacaggcaaaaacataaataaaaccccccaaaaaaatgaattagccatttactattttcacatttcagtttttaaccttactttggcagtaagtatgagcagtgggtccacagtaaggcccatgagcccaaatttctctgtcgtggtctatataagtgcgcctaacccaaaaccctaaagtctctcgaaaaaccatcaccggggaatctgacggcggcttagtaccggcggctactgcaaaaaggattgtgttcttcttaggcttgatacttgccttgggaagaatataacaatcatttttgcggtagctaaaacgctaagctctatcgtcatatctttatcattaatacttatttgatatctaaatatcataaaaatggccgctcgttcactctccggtgccgttaaatctctttgctccgccgcatccggaagtctgtcttgttccattgtcttaaggtacttatgtttgaaatgatcccattttttcaggttacaatatataaacatttacacactctttcatttgcttagatcgtataaagaatttataattctaattgaataatagttgatggtttgaatttgagtgaaggctaaagattgatctatcattaataaacgtaattaatttacttagatctattaaagataattatgcatgatagtatcacgttattttctacgttttcgttatgttatttagtcatttgctgtttatataatcttaccttcaaaataaattattggaatgtaggaggagttacgttgctacatcgcagaatgtaacagcagcaggattgagtaagggaggttccaccagagttatggtggggaagatggaacagagaggtttagatcaagaggcagagtctgcttggggaccagatccagttactggatactatagaccttccaatcgtgcggctgagattgatccagctgagctcagagagttgcttttgaaaaacaaagcaaagtctttctgagaattttgattggttggttgacttggttccagtggaaggttgtcgtaggcgactattctgattatgtgtgtttatgtttgtcttgtatcaactattaagtaaaaataaagatcacattaactagttaaaaatataatatctgtttggatcgactaacacaacatctttagtataacagttcttaaatgttttaagagataaatggggatatacgaaaaatagaaaacgttgctaattatgactaaattatgatacttaacaacgtcaacaacaacaaaacaagatgatttcactatggcattatattttgtgaccacaatcttatacttgttgttgttgtcaacatcaaatacaacaatagaaaatgatggtgctttttcataccccatataaaattttgttgattcttcatgcccatagttttgttgaggctgctaatggcctaatagtcttagaaaatgcaaacggactattgagggttgagaatatgctgtaattcggcccacttctgggcctagtcgagtgaatacgtaaggatcaatcatcaatacttggttgccacaatagattatgaatcagtgaaactgtgaagggttcaagatcttagtatatatcataactaaatattatcactttgtccactaaacttaaaatgataacatcgattctatgctataatgagatactgagataaacgttttggctgcttttcctcctttggtcttagctagtggtgctattttaaaacttttcagtactttttcgttttaggtttactgatgtgtttgttatcggaagagttttgtctctgttcaattttttttagaaaatatttttttttgaacatgtattatttctcaacatttgtcagtctaaacgtgttgtcactcacatttcttcccccaacaaatatcaaacatgttgtcactctcgttttcatatatgaaattgaccatcaacaagtattgaggaggacatatccctgagctagtcattatgaccatgttgttgtgtctgaaatgaatatcacgatccgaacgctaaagggaaacgtcaaagtccgagagacgagtaaaactgaaatatgtttgctccacaaatacagaaccgtacgtacgtctgtatgactgtatacgctcacttgcaatcgaacgtacacaacgacacaagacgtttttttacgaataatatctcacaaacttaaccgtcaagaatctcaaaacttatccaaacaaaagagttactaagcctcaaaacatagtaaacactccattctttaatcttccgttaacaaaagatgcattaccattacaaccccccttaaatatggtaacatccttctaaatttaaatcctaatttttggcccaaaaa

SEQ ID NO: 30338 - DNA, 3316 bp, Arabidopsis thaliana landsberg
  unsure (1)..(3316): unsure at all n locations
caccgttttgagttgtgtctaacactttgattgattctgaaatctggattcgtctcctccattaaacatctttcgtctgataacaccgatccatctctttctttctctctccgtcgactctcgttcttaaagatgaaagctttctacgtattcgttgttgctcttcttctcaccttgaattatagggttcgtttttgttccttcgtgtcttgctctcgtttacggaattgcttgtatgtaatgacatggatctgacttttgtttgtgtatagggagaagcaagtggttctgttttcttcattgatggatccaacaatcaatatcttcgtccacgatcatccagtgaggtaatgattttcgtcccaaatgtgtggatgaccgatttgaaataatctcaaatttgatcattttatatttcaatctaagatcgtttctggaaattatacgagtttggtccattgaagtagtaaaataagatctattgtttggtctaagtggcaccaatttgtagttttcttgtctgtttttttttgttattttgatattgatgagagatcaatggacagattgcaaatttatgtttgacaagtactaaagtttgtgatttaatagttctttttgatgaattttagttaaatctcttttctttgaattgaaatgcacaggcacttcccatgtcgcctgttgaaatatctgcagcagtgtctgccttgttgggttttgcaccttcagcaactttgacagctgatggctcatccaaggttattttagtattatagtagagttgtttttctctctctgggttaaagtcctgtacttcatcgtttatttgttttgcattttgttatagttgaacaagattctaaaacctaatccatttgagaggcctcgcgctgcttttgtgctagaaatcgctggagctgatggtatgtgattggaaagctttagttttctgacatgaaccaaaaattttagttgtaaaatattcaagtgtttggttttttacttgcagatatgcttttggaaacctcccctagtcattctttcttgggcaatgccataaggagcagtattaagtctgattcgtacaaagctgatactgaacttccaggtgccctatcagcttgaataccagaaccatctgagcatgactagtttctaacttttttttctttatgggtttaagtcttactttggatattctgctaatcttttcaaaattctgcagacaatgaagtggttgttgtgtctgtcaatgaaccctcctctgatgtgactgacaaggacattaatgattttgttagttaacagcacctgtcattctaagtgcaaacactatttttttttcctttttaatattatgtgaccacaagttaatggtgtggttataatatacttaggcatcttggttgggtggannnnnnnnnnnnnnnnnnnnaccatcgtctggattgttgagtatccctctggctgggggtgctaatgtggagttcaatttggaaaaggtaatattcttaattccatgaaaaattgtatgattttatgtgggagaggttgctgtattacctgtagatattgtgattttcatatgaagaaggcacatgacttttgtttctctgggcaggaagcagagaggaaatttgcattgaaccttttgggtctatatcagaatatcagacaggcagtcagcgtttatgacgatttatctcatggtattgacagaactgccgaattaacggttggacgctttggtggtatcgatgtaagggcatttttgttattctgtttttttccctttcctcagtttctcagtcttggtatataaattagagggtggagttcattgcatacgcaaatgtgtcacctttagtctcttcaaaacttatgacatttctgttgatcgtaataatggctgttggttgtgcactcttttcgggatactcctgcttagctatttaaggaatagcagaggattcgaaagtgaattatgataagatctcagggaactggaaatgttttgagctggttgtagtcgtctaagctatctttacacttattgtatccaaggattgcaaggctgataaggaccttgtaatgagtttatatcttgagtttatttttcattgaaaatgtctaattgttcaaccatcatgttattgtacttagcttatatttgtttgcaaaggttgtcaatgtctctaatataatttattctttctggaaattataggctttagcacaggagtatggacaaggtatggctaagcaagggatggatgtattactttccacattatcaaagctattcaatctgttggagacatctcataaaggtgaattgtctctctgatttaataaactcgttttcaaagatatgtgttagaaagtagttcaagatggggaactcattctctggaacatttgtcttttttcttaactgaatttatgtaagctgagagatgtattggctcttgtaggccaaattgttggggttatcgtccttgatgagagagtaaaccaagaatcagaaaatcttttgaactttgggtcttcccgttcatctgcacgctcaatggtggaagtggagggaattccaagtgcagccattatcgctgaggttatacttgttaggctgactcttgcatggttgactggaatcattcttctcattgcaactatccttggggtaagatctcattactactagtctactaccaagcagattctttggccaatgtaaagttgaatgtttccacctaaagtggcctattgaagaactcaatcgtagtttgaaaactgaatgtattaagtcactcgaagttgacgtacttgtcatgttggttgcaggtatacttccttatgaacatgcctttgacgaaggatactcttctatattcaaatgtaaagctcgactaagaaatgaaacagagcttcaaaaacggcaaaaggacactgattttctctacaggtcgttcgtttacatatttttgtgtgtatcaagccgggtttctcaactggccgcctttgaaaccggtgttatttgaatgtttaaagagaaggatgaaacttttgctggtcagagcagttgatgtgttatgtgtatattgccatattggctgcattctctacttataaatattttctttcttacatacattctgagtctcagacctaataataaaagaccactctggacacttgatgtgtatcttctgactctagcagagcttttgatcatgaatctgaatatattattgcaatttcttcacgagctttgttttgcataagacagcatcattaggctgatcatttacaa

SEQ ID NO: 30339 - DNA, 801 bp, Arabidopsis thaliana landsberg
ggctaacaacatgcacttcatcttctggatctatattatagtatagattatggaatatgattactactatttctttttggtaaattattggctcatataatctattgatgaaccataattaggtactagataataaaaaaacataatagctaataaaatcgtgaataattcggtaagaaaaggttaaagttgtttcaatacactcacctaaacaagtcgattatggtccaaaagaaatccaattgagataaattttaaacttttcgttgctagttaaatgtgatttaaaatatgaaattttcaatttcatacaaacatgaaaacattttatttaatcatgtaaattagaaaatatagacatgttatatcaacaacaatggcaaaaagaaaaaggtcggttttcaaatctattgatattttccgtatcctattaattttgcatgcgatttctgaagaaaaagttattttgattatttagagaaattttatactaaacctaatttgtcactcgtgataagctcttctctcccttggaaagccatgaagaagaccagtgttttcacgtccgacccaaaccgttcggtccgaccggttaacccgtgatccgaacactttttcggtttgggtttagtgctaaaaaaacaacaagttcaaaactgaaaaaccccacaaaaactcgcaattaacccgtgaccgggtgtgggttttaaaaagttctcttgattttacaataaaatatgggattttagactttattcaattatttttaaaagttttttcaggtcttaaattcatttgatg

SEQ ID NO: 30340 - DNA, 1370 bp, Arabidopsis thaliana landsberg
attggcgttaccttatgcaccgtattggtgggggctgaccgttggtggtatgatgggaaccggtgctcacgggagctcattgtggggtaaaggaagtgcagtccatgattatgtgaccgagatcaggatggttagtcctggttcggtcaacgaagggtttgcaaagattagaattttaagcgagactacgactcctaacgagtttaacgcggctaaggtttctcttggcgtccttggcgttatctctcaggttagaaaacttaaaatttcagtttcagtttttactacaaagctatatcatatttctaggccattttctttagatgtttacattttgtttttgtttttttaaaggtgacttttgaattgcaaccgatgttcaaaagatcgttaaagtatgttatgagaaacgatttagatttcaatgatgaagctctaacattcgggaaaaaacatgagtttgcggattttgtatggctaccgagccaaggaaaagttgtgtatcgaatggacgaccgagtagcggtcaacacatcgggcaacggcttgtatgatttctttccgtttcgttcacaactctctgcggcaatagccatcatacgaacatcaggtacttctcgtctatcctttttctaagggtttgcgttgacttttaaaaactgaacgtaaaggtacaatcttgttcgtataaaaacaaagaaaaaagggtacaatcttgtccataaagtttatctttaaatcaaagaaaaacattatccgatccagactcccattttgtatgaaattttttactcagtaggtttcattttcatttaagtcctattaaattttttaggtattaaatttaaaccattagttaaccaaaaacacaagataaattttcagtggccttattagaagtagttggtccataacccttaatagaaccattagttaaccaataacaaaataatcaggttatttttgaatttgtatataaaattataactcttggatccaactaggcaactaccgatatttaaataagagattatcaggaaaacaaaatgttgatatacagaattctacacgtaactttaatttgttttggtttataacaataatcaataagagacgcaagagaggttcagagatgccaatgggacgtgtgtgggagccacaataatttcatctacactgtttgctacctcatacggtttgaccaacaatggtaattatttcttttcattttacttacacgttttcattgattttacgtacagagaatattcttgcttacctacctttatgtttcaataggcattatattcactggttatcctgtcgttggagccaaaaccgcatgatgtcgtcaggatcgagtctagaca

SEQ ID NO: 30341 - DNA, 2517 bp, Arabidopsis thaliana landsberg
  unsure (1)..(2517): unsure at all n locations
gggatgtgttacgatgcaagaatattagaacaatggaaggtcatcggctaagagttggagccttggcatggagctcatctgttctgtcttcaggtagtagagacaagagcatacttcagagagacattcgtactcaagaagatcatgtcagtaagcttaaaggtcacaaatccgaaatctgtggactcaaatggtcttcggacaatcgcgagctagcatcaggtggaaacgacaataaggtaaatatataatcatcattctgtgtctgaagttaacatgaattttcaagcatgtgtaatgattctaggatcttgcagctgtttgtatggaaccaacattcaacacaaccggttttgagattctgtgaacacgccgcagcagtgaaagccattgcgtggtctccacatcattttggacttcttgcttctggtggtggcactgctgatagatgtatccgtttctggaacacaacgacaaacactcatttaaattgcgtagataccaacagccaggtaaatccggttatgctaacttataaacatctgagatttcacattgtggttttatagctgcataatcttctttccacacgcaggtgtgtaatttggtatggtctaagaacgtgaatgagcttgtgagcacacacggatattcccagaaccaaatcatcgtctggaaatatccaaccatgtctaaagtaagaattctttgttcttatttcgtttttttttattggttgctgaattttgggattttgatgatcgaacctgttctgttatagttggcaactctcactggtcactcgtaccgcgttctgtaccttgcggtgtcaccgaatggacaggttactttttttctttttctcgttgctcattcttcagtcatcatcttatatttttgcctactttcttataacacttgcatcaacacacttttcttgtatttgttgcagacaattgtgacaggagcaggagatgaaaccttgagattctggaatgtcttcccttctccgaaatctcaggtaaagaacccgaagcatattcgcgatttctaatcttcaaatcctgtgaaaatgaacaatgtataacacacaacattctctttctctttttttctattctcagagcagggagagcgaaatcggggcattatcttttggtagaacaacaatccggtgacatcttgagtcttgacatgattttcgaaatcagggcgaggaagaagaagctaaactcagccagattagttggtcgtcctaaccaaacctccgagagattgtgtgaagtctaatgcaaagatgagaaagaataaattagtggcaacagatcaaacctaagttttatgagttttgtgtgatctgcgtttctttagattttcttcttagttagttgtacagattggattttaattgtaaatataatatcttctgaaacttttaattacaccaaagaaaaatgtagcatgtagattttatccttgacccagagtgaaaaggttataaagatcttcatacttaacctatgttcaaatttcttttaaaattttcaccaaattgtgttgtgttgaagtaaaatgttatatggtcgacatggatcaacttctctcgattatctccctgcattttccacgcgaacgtggtcccagtgactgtaacacaccatgcagaaccaaataaagtttgattcattagaaacttacagaatcatttcagacatttagagatgtgctaacaaaatataaatgactaaattaaattatgactacggtggcgaaatgctaaatagggatccaggcatcaggaggtaaggtattttcgtgtggataaccaaagaatttttgtgtactcaagctaaatttgatatatattatgaaatatcgcgacatttggtaaaatagtctgttattggccaaaatagcaagcaagtattatgaataaatgcgcatggatggatgaattctgatgatatagcttcatatcgtataaaatatatgtttgttaaaactatgtgtgatatcagataaaacaattgacctaaacaagaaaaggttaaggtcatatcctttaactaattaatggaaattgtaaagttagttagtgcatgtaatcaatcatcattatagtttctaatattttaattactcattcacataaaggggattttgcaccatacaaggttttggaactgtcaaccgcattcttgtgtttcacagttaacaaaaatttcatgtgtcgtcgacgtgtcgtgtcgtgtcgtgatcagttggtgggacaagaaaaataaagactagtctttgcctcgccaaataatttcgcccccacgtttttaatacaaacaatcaggtgtcttgtttgtttcttctaattattataaaagaccgagtcaccttctgttcaaaagtgaaaaaatacgaaaataaatttacgttgcacttgtatacggacattaagaaatgcntcgacccaccacccatgactatcagcatactattagattcagaattttgggacccgatggt

SEQ ID NO: 30342 - DNA, 6465 bp, Arabidopsis thaliana landsberg
tgttcttatatattacaggtatgcaatctagcttggtctaagaacgtaaacgagcttgttagcacacacggatactctcagaaccaaatcattgtctggaaatacccaaccatgtccaaagtatgaatctctctgaccttatattactttccatcattgagcatcatcagttatttaatctgtgttttttcgtttgttcagattgctactctaaccggtcacacataccgagtcctataccttgcggtttcacccgatggacagacgattgtaacaggagcaggagatgaaaccttaaggttctggaatgttttcccttccccaaaatctcaggtaaaaaccaactaactctacttgtgtaattacttaatgatcacaaaaatgctatttctcagaagagctgattcgatgtttttggctgtgtttcagaacacggatagtgaaatcgggtcgtctttctttggtagaacaacaattcggtgagaagttactttcaaaacacacagaaaaagtcataaattcttgatttcttcagcagcagccagcttgagttggtcgtctcaaccaacttttttcacacgggagcagagagtcattaaattcttttacacacggatgcaacaagatctaacccttttgatttaatcacgatctttgggtttccatcaagatgcacaacattttcccccaaaattttccaaagtgtatatctttattcaaattttcttcatatatcaaaatatagtttcttttgtatttatttacttacaaacacaacattttataaaataagcccatgataataatgcaataattcgttaccattctcttatattacttgttcttcttctctttctgtatttggtgtatttggtcgtaaattagatagacgaatggggtcagagaaaaaaagtcatcttgatttggttataaaatgaaaaagatattgaagaaagagaccaaataaatccaagaaaataatttggaatcattaggagcaagaagtggctgatacgctttgcaaaaccaccagagagacaaagtcttttgccatctctttaccttcacgtttctccttagtttctcaccgttacaccgacgaattcggtccttaatatacgtctattgttactttggtgatgattctcatgaatatcttcatatttctaaactattcttatttgggatattagtataactttaaattggtgatgattctcatgaatgttttgatatattaaaatatatatgttcattaaacaacaatttattcatctttatgtttgcattgcagtagtactataccagtctgtcacctttaatattagctaatctgtaagaaatttacattttgatcttgtggatgagatacaatacaagtatacaactatgataaagacttcagagtagacacaaaataccatttgaaactttaaaatctgtatttaacctacaaataatcattattttcctataccacattatgtacaccaaaccaaaccaatatttagatccaccaaaaggaaagtcctgccatttccttttcactttgtacaaactaccaaaagaaaaacttgtaatttgacatttataatcactagagtttctccggatttggagtagcaattccttcagtctgagtcccagagtaaccatttacaccttcattactaagactatgagaccatggaatcgagctaacggtcggaaaacaacaactacactcgtccgcgcaccgagcctcgggaagagtctcagtcttgtgaccatcaggcgaaacagcttcccaaagcggaccccaacattcgaccttgttgaactcgttgacattagaatggaaatatacccaaacaagagcttcttgtagctcaggatagttgttcaacaagttcccatctccatgcacaaaagctttcaacacctgcatatatcgtagtaatcaacatttgttttacatgaaccaataagaaaaagtttcttttgaaattgggaacttaccactggtagttctttgcaaaagatgaagtaccgaaaactttgcaaagagatctaaaaggaaatggccaccacttatgtgacaatgaacgtgaagcgacattttccctttcactttcttccattctgccacaacttcatcccggtatagcctatttgcccatccttgcaactatacacaacatttctatacatatcagcctctaaagtgttaaagattctggtgaataattgaatatagacacatacatagcctaaaacaatcatgcataagcctctaatagttgctccaaatgatcaattacataaatattctactcctataaacagagccatgtagatatgttaagaccagagagagaggtgtttttacctgagaattgtttatggattgagaaatagctaatgttagtttagctgtaatgtcactgtgagtgagtgtgtaagtcctagggagccttgaaggatgcttcttctcatcaacccctaagaagagtactttcaatttggatgattcgaaaatcgccggtccaaacaaccttgcaacctgcaccgatcccaaaagtttcaagttccatcaataaagacagaggcatagatatatccataactgagacacataaaacaaagatatgtcaaaatgattaagagaacaaatccttacgggaacaatcgattgattcttcttcttggatcttctattgttgaagaagagtgagctgctgctgctactgttactccgtttgtctgaataagctggtttcagcttcgttggtaacaacatattcgccgacaaactacacatctctgctctcttgaaacccaaatcaaaagcttcaatatttcagaaataacaacagaacaaaacgccactaaatacagagagactcctttcacgaagcttggatacaattttttcacgcgagttcttgcgtgttcgtacactgaaaccacaatcaaaaagattgtaactttaagaaataaatatataaaagacccaaaatttgagcttttcctttgcttgatgattgcttgaagctttggttttgaattttccttttgagatcttccaggaatttagggttctttgtgatgcgtattgagttggttcttgtgtttaaaagggattgttgcttcacgtttcacacttccgtgcccaaatctgaacactcttttggaatttttctgaacacgagagagtgccacgtgttctctaatctttgcatgagcttccccatgtgtcgtcatggtggggctaacaactggctctaaccgtctttttggataactttagccatctcgttgcgacaaagagacacagattcggctctaaccgaacctaactcacgtactgtagttgtcagtcgaacctaaagcaatacggtttagtttcggttcaatttaatgtcattcgactcgattactcggtttagttattagacctgtgaaactcgagaggcttcttcgcttgaatcgtcgtgaacaaggacaacaaacgcaggtattgatggaaccagaggagtcagagagtcccatgttgatccataaggatgttaaaaagggctgaaatttgtgatcaggtccaggtccattaaaaaatatcgggctaaaattgggctggcctgttacagagcttttatttttttcttcttcttttacgttaagcgacgtcgtatcttgtaaacaacaaaacacgagtactgttttttcttcttctttctccttcaatctcttcctcaaatcactctttttggggttcgttttgtttgtgttgtaagcatccctgttgtgcatttcgtttatccaggtttgtattgcttacctaaacaagttcaagttttcgattttggtttctaggtgtttaccagtttcgccattttgtggtttattgtttggataatttgatttctttggattttgctgatacccatttgtgtgtatagaaatttgattaatctggatactaaatttcgtttggagaaacactgaaccaaaggaatgcgaaatcttttgatgatgattgaatagttttagtgcctgctaatactttagaacagagtcaattttttaaggtcatgttatagaatctgagtctacttgtcatttgctttggaacaggtgaattcttgcaaagccttgagcagctttcagatgataaagactttggtctctccttatagtgtatgtactctacctccaccactctttgagtcttattcttgtttagttcaatccacgtgatccagttttaattttatttaattcctcctatgcgtctgttaaagtcaactattttattctttatgtagggatttggatctcagaagttgaagtttgacagatcttctgagaaagtgaagacgagagcagtaagaatggagctcacaatcactcaacctgatgattggcatcttcatctccgtgacggtgatcttcttcatgctgttgttccccacaggtcttataaacatcctgcaatctttcttttctttccttgctttactttgttttgcagccacttttttgtttgctattggtgtttcttgtggaaccattgtttgttatgtatgaattcctcaatcacaatcttgtgctggcgttgatgcttgtgctgtacatgatggttaatggtgtatgtaattatgtgcagtgcgagtaattttaagagagcgattgtgatgccgaatctgaagcctcctgtcacctccactgcagctgccattatttaccggaaatttatcatgaaagctttgccatctgagagtagctttgatccacttatgacactttatttgactgacaaaactctacctgaagagatcaggcttgcaagtaagtacctgtgctttctccatcttgttgcaaactaatcagatacattttcatctttctgattgagattctacttgctaatgttcagtttatgcatatatgatcttgttattaggggaaagtggtgtggtttatgcggtgaagctgtaccctgccggagcaacaaccaactctcaagatggtgtcacggatctctttggaaaatgcttaccggtactagaagagatggtcaaacaaaacatgcctttgctggtaaataaatcatacaccacatagacttgtatttttgtctttgtcttgtctgaggaatgttttgattaggttcatggggaggtcacagatccgagtatcgatgtctttgaccgcgagaaaatcttcattgagacagttctgcagcctctaatccaacgccttccgcagctgaaagtagtgatggaacacatcacaaccatggatgctgtgaattttgttgaatcttgcaaagaaggttttgttactatcttattttcatttcttgtcttttggtttttgttaatctgcatagctcataacattttgttgattatagggtctgtgggtgcaacagtcacaccacaacatctccttctcaacaggaacgcccttttccaaggtggattacaacctcacaactactgtcttcccgttctcaaaagagaaatacatagtatgttcttcactttccttttgaacattaatatttcattttttcagcagctttcggaagatcattgcttttacttcattgtacaggagaagccattgtcaaagctgtaactagtggaagcaagaagttcttcctcggcacagatagtgctccacatgaacggagtagaaaagaatcatcctgcggatgtgctggtatttacagcgctcccattgccttgtccctatacgccaaggtctttgatgaggtaaactgtgtaacttcaaacagtttactttcccggtttgtgattccttatgttcataactttaacttctttaacattcaggcgggtgcgctggacaagttggaagctttcaccagtttcaatggacctgatttctatggccttccgagaaactcgtcaaagatcacactgaagaaatctccttggaaggttccagacgttttcaacttcccattcggagagatcgtccctatgtttgctggagaaacccttcaatggcaaccgttgaaataatgtggtgatttgaagttgtcaaattttttctcccaaatcagtgaactcgtgtaccttttggattgaattttcttacggctgagttatgccctgcattttttgaggaataaaagcaagatactgaccaataatgtttattttgtgtttgaatctgtctattttctctatattgaatctaaatgacagtataattctcaatcagtgtgggtctgattcctagtcctcccgacgaagatgttccattctcgtaaaggctaggcagaaatgctgttgggtgaagtgtagatggactcattggccaaggtatgcgttcctccatattcactgatccgcctagattcggttcttctgtagatgggtccatgtaagagactttcgcgttagtttcatcttcagttatcatctctgtagatgtttgcattttcccagcaga

SEQ ID NO: 30343 - DNA, 3841 bp, Arabidopsis thaliana landsberg
gtttgaaatttttatgcgtttgggtatgaattcacactgcagatttgtacatgtaggaaaatacacattgcaaattgtactggtaggaaaatagtcttttcccagtttatttatgagatgagacataacaggattttaggagacgaatctcgatgaaattactcaacaatataataacaaagtcataccattgtaagcacaaaacatggacaaaattatttcagttacatgatcttgtgtattgaattgaaatcagtaagatttatatattaatcaattcgaattatcatcatatacagcgtaatgtgtgtgtatgtatatatgaatatataatatcattgcaagtctcatgtagaagaaggatcaatataaagggacgtcgtcgtcatgtgaggttaaacctaggcatctcgtctgcaccgggtaattctactacaaccacgactataattgtgaacagggacgcgaggtttatggtgggaattgtgaggatgacatcccgctggaggattaggaccacggcaccggtcaagcacgcctggatttaaatactttcgacctttgcgagcctctgattgcaccaccaccacagcgacacaaatcaccaacaagattatcatccatgccttcatttttagtcaattaatatgttgatccttcttcttgacacctttgtttctgtgatttaggagaaaagtggattcatatatagagagcttagagaaaactctaaatttagctaatccatatttggggaaaccgcaagatgtgaaaatagaattttgcaagatatatactttcaggttgctttttttgttttgacttcatgtcttagcagttagcaagtcaattgatacctattcttatttgtttttatttgacatatgcaaaaatatacatcaatgacgaagaaaaaacttcatggtagggttaatgggtaaaaattgagtattatgtctaaggaaaggatatctatggatagttgtccattttgtctcaaacttttttctccattaatagtggtgactcacaattttttactattttcaaaaagaaattaacacgaatgtttgcaaacttttttctctttaaatagaagttctagacctatgcttatacttatacattttctagagtcgggatcgacatttaacataatcggcttacttagatttaatcatttgtgaagtgcatttgaaatgttttgcgcttcgcttattttacctctccactcatcaactcgcatacatacatgagcagacgtagtgagagaagaacggtgcacatgccccgagtcaagttttagaaaaaactattctcattgtaatttgattacttttgatagtaaaaatagttgtccccacaaaattttggttcaatcgtttccttgcaccaagtacctaattttgttttgtcttttctagccaccgttagattattgttcttaacaccatgatcatcggaataatgtatatcttacaaaattattatattgataagaaataaactaattaaagttaacatttacgtttgtattccctaacttagttaacttttgtttttttctcagttacaaaaatcttacaatgtgattccttttctcccaaagatctttctttttttccctaaacaaataaatgaaccattatatatgctttcatctaaattttttactaacttttctttcaatatgtgcatgtatatgatttatacagcattcaatacaatattattcaatataaaaagttgttccaatatggttgtctctcctttcccaaattgtttttttaaaccattgacaccatacatgtctaaaatcagaaaggcatgatcacaagaagctcccaataattatcgagtatacaatggtttagagtaaactatacaacttcgggtcgagccgaggcattacaactacttcgaccgggttaatctttggcaaggctaaaccaggcccttcagccatatccagtggttcatcagacactttgtgtaactcaaacccttgaagcaatctagccaacagaaagtgtacaactcttagaccaagattgacccccggacacgacctccttcccgaaccgaaaggaatgtatccaaagtcgctcttttcacattgtgatttatcctccatgaacctctcaggcttaaaggttttggggtcaggccagatcttgggatccctatgaagtttccatatgtttacgagcaagcgtgtgcctttctcaacacggtatcctcccacgaaacaatcttcacgtgcttcgcggattcctaatcattcatcactttttataaccaattaggttgaatatttacaagattaataaggtcataaaataagaattataatgacaataaagattctttgatttgtgacctgttagaggagccggcgggtaaagtcggtgcgtttccttaacaatagcttgtaggtacttgaggttttgtatatcggattcttcaacccatctacctttgccgacactattattaatctcttcttgtgctgcttttaaagcagctggattgttgagtagcagcgataccgcccatgtcaaagtgatggatgtgctgtctgatcctgttaatgtgagagcctacaacaagaaacagaacatatatgttggtatacattcatttcaaaccatgattgaattaagtcatatatatttctcatataaacactacattagttcataaattatttgtttgtgagattttctaacatatatatccaaattaacgagaggtgaaaattatatgtgcataccaaaattgttgccttcacaatgacatcgcgtacgtgtccacttatcacaatatcctctggtaagatgtctagcagtagatccatgattgttctttcttgatccttctcatttcttgatctcttcttgagatgttcgtggagccacttggtgttgactgagtcaagctccttaaatagtctcttcatttgagaattttttgcaaaatccaaccatcccaaccatggaataacgtcgcctatcataggaatcacagccaagtactcgcaatgcttcagggcctttttataacgccattcctcgctattcacttcaccgaaaccaatcctcttccccaccatcttcctaaggattatattgaaggtcaaaaactcaaataacatgtcaatcttcactatagaagttccaccattccctttgtatatgtgtttgatcaacgtgtttacttctgaagaacgaatgtgaccaagcatctctatactctgttttgagaatagatggacggtgataatcttacgtaactcacgccaatagtctccatagggagccagagtcagacttgcattgttgtagcctacgtaccgaccaaaggctatattgggtctggttgctgtagccaagtcgttggtggtgaaacaatctttcaccgtttttgggtcgctggctacaatcagtctataaacccctaacttgagggagaagataggaccatgtttttcggacatggcagccaatttcttgcaaaggagttctttgccacgcaaaagatggaggtgtccgaatagaggcagagctcccaatggctcaggaatcgtggagctatcaacttcacatctactcaattgttttctgaggaaaatgtaaccaaagattacaagggccaaaaagaaaagagacagctggagagtactaaagagaaaagtcatggtgatcactttgtttaatgtatgggataatgagaatgtatctttcttttactcgtatatatagtagtatggaatggactatgaggtaatgtcgctttcatttactaactatatgtatgtatagtaaacgcgtataacctttag

SEQ ID NO: 30344 - DNA, 3217 bp, Arabidopsis thaliana landsberg
ataagtttgtgcgtctcacacatccacgactccaattcccacttctccactcctcatctgattttggttcgaacccttttaagcattggcacattggagtaccggatctcacacacaagccaaaaggtccacatctaccatatagatcacacgaggttagcggaccctcaaagtgcttgatccagtcggttccattattccgtgtaatcctcaatgatccttctggcgttagcttgatgtatgacaaattgaaatttctcagaacacaaaaagcgaaaactcctgtgccgttgacttcatcttggaccattcccaatggattcacatacgatgcatccatttctggtatcccagtgaaccttgttcccgcccatggaccgcttctccaataaggtgacgagcctttccttataaggccttgcgagggtacttgtggtgtaatctcagctacaaactccccaggcgatggatcggtctcactcttccaagaagtcagcacacgtttcttgttgttaggaatatcgtacatgagagatgtaagaggtagcattgtatcaccaagatgctcaaaactttgccacaaataatttccagtaacattatctacgacgacaagatttccggtgtctaaaagctcagcacgacacttgttagatgtgggatctcctccagatgaccacaccagatcttttttgctatcaagcaagataagacttccattgctgctgattgtgagattcgccatagtactagagactggcttttctctgttagccacccaaacaataacccgaggagtgactttcttgaaccagattccaacatactgattcccagagttgttagaactgaagaaaccaagctcatatgatccaccaggagagctcaaagttacccctatcgacaaaggacttgacgtggtaatagctgcatagccatagcttgagaataaggctgttatcaagagcaagcatgcaacaatacgcatgttgacaaaaaaaaaacgttattttggtgaactcaaagaattgagagaacaatcttcctcaagtttcatgtatatacataaaaattcatggggtctgcttctacttaagacacctaataagttgaccaagcttttgttcacaaaacttgacttattcaaagttcagctctctctctggtacagtaatgcaatatgttcctttctaatattaaacagaataaacaataaaacattgaaacattccaattgcattaagtctaaaaagaagtcaactttttctccaacctctgaaaaatacttttaagctttcacacttgtcaccttccattccatgaaagagattaacacaattaaacaggacccatttgcagaatttacctggatgttacataagctttccatttctcgaataatctcctaagagtgatataatgacaaaaccactattagataagccagcttaataataataacacagtacacaaattttagtttacttacagttctctcaattaagagcaattcaatgtacctactttctcgagtcgcttcaacatgtctctttggtaaatctgttgaaaaaagaaaccgcacgaagtcaaaatatttgaaagttaaatctcactcagtcatttcgtcgaacacattcagtgcatatcttattgtagaagcggtcaaaccttaaatagtgcaagactaaacaattttttaaaaagaaattgtgattaatcatgctgagatcatctgggcataagtgattcgatccaaagtctcaaactttggctgagaaacaatgtcaacaacacacaattgatgataaaagacagacaacaactttagagataaaaaagaattcaaaggccgtgagaaacaagccacactctcgatttgtattggcttgggaagattaagtcaaaactcaaataacacaaatattcgtcgtgcctttggagatttgtgccgtactgttgaagtaatatctctgtctctatccctcgtgcataagggattaaatggtttttgttttgttgttttacaataaccaaggtcacctttttttgaatattaaaacctctaaaatttacaatgagattcttttgtagacatgtgtgatcattgcttttatcgaccaactatagcagtttgtgttatattattgacagagtacatagtcttagactctgaatcactctcttggacttgcattgcgaatacgggttgttttggtttcggaagatccattgtggttgtaagcattgacattacttgtgcaatgttgggtctatccccggcttgttgttgaatacagagcaaaccaatctgaacacatctcgctacttcggattcagaacccgagctagagatatcttgatccagtaaatccgatccaccgatttcgcaccaagaatcccatgccttcaaattcgatgaacacagtcctattagaaacattttgatttatactcacattcaaggaagatatagagggcattggcttacaaattcaagaagagttttgccttcctctccaatggtgaaacttgaaatcctcttgccggttatgatttccaatagcagaactccaaatgcgtagatgtcggatttctcagagaacatgcctgtccaagcatactctggagacatgtatccgctgttcattttgacaaaaattcctcaggttgattatttaaacaagtaaacgcttgttatctatctatagaggaggcagagatacatacagcgttccaacaaccctgcgagtgttggcttgatgttgggttccttgaaacatccgagccaatccaaaatctgatatttttgggttcatttcctcgtctaaaaggatgttgctgaccttcatatctcggtgtacaaccctaagacatgagtcgcggtgaagataaagaagtccgcaagcaataccttgaatgatttcaaaccgcttgggccaatcaagctcaagctttttcgtcgaatctagccaaattaaaaacagattggtcaggtccacacataaacaagggaacaagagtaccacatgaagaacataatcggaaagatgcagagatatacacaatgagggactgaccaaagataaaggttttgaggcttttgatggcactaaactcatgaatcaaacgcttacctagtccgtcaatgcgtcatcccaaaaggcggaccaaggttctgggttggaaatacaagatgagtattattgcattcatgaac

SEQ ID NO: 30345 - DNA, 2266 bp, Arabidopsis thaliana landsberg
caatgaagttgacctgaatctttagagacaccacaaacagagttcctcccagaagctaaaacctcgaattcttcattattggagaaattcaaaaggtttgattttggtccccaacaaaccaagtctccatctttagtaacaccacaagaaaacccatctccagaaacaatcttacgaaacatgagactatctatataaggattatgaaaagaagaattccaaagaagaccagaagtgaaattagtgttatcactatactcccaacaatgaacaggaccataatcaggacctgagtaatacaatccactaatagcacaaacatgattgttaccagaagcaatctgtaagtaagaattatactgaaaagctcgaggaacgagattctcagaaggatcttcaaggttccaacaaaacgcacgcgaagtgttcgacgtaatggcgcagagaaaaccttcaccaccggaaagagaagtcattggaggagaataaccggagatttcacctgggggtcggtttaatgatcggttagtgtttcctctatcccaacagatgacttcttgcttcccacttgcgtcaatggcgcagaagaatccgttttcgccgaaagctgctgcgattgtgcctgttgagccatacgcagaaactgtaatgatgagtgatgaaatggtgatgatgacgaagatgtgagaattgggttgcattttggtgtttgagctgatgaatgttttggggagaatgattgaagaagaagaagaatcgatctgagaggtgattgagtagacatgttaatgaatgcagttcttgttttgttttttgtaaaagaataaaaattgtaataataattggaagtgagctgtttatgtctgcgcgaaggttcattggagagagacagtccaagtttacatattggtcagggagatggaatttaccaaaccaagaaaaaaaatattaaatcatttttattatatagtttttgtatgaaataaatgaaattctgtacggactttaattttgactgtgaggatcagagctctgttatgttattggaaatggcgacgcattacaaaaaaaattatactctaaagtccaaatcatacgtgattatcgaatgtggcatactaattttgtgtaaatgataaaaacaattcagtgtttttaaagtgtgttagatagttataaattactatataagcaaattaaggcaaatgtttttcacagcaaggcaatttattaggaaaggaaaaaaggctggtgtcgtgcaaattagagtacgggcaaaaggatttaatagttgactttgcatttaatcatatgttcgaatagctagcacatgcctttctccacgtgatattagcttaaacagtgccgttaattaaaatattcgtcatagcatttacttgttgtcaacattcgataatattagctataaccagtgttttcacgcccgaccggttaacctgtgacccgaacacttttccggtttgggtttagtgctaaaacccaacaagttcaaaactgaaaaaactcacaaaaactcgcaattaacccgtgacccggtgaaccggttgaaccggccgggtgtgggttttaaaaagttctcttgattttacaataaaatatgggattttagactttattcaattatttttaaaagtttttttcagttcttaaattcatttgatgttttagattttggtgaagactttacaataccgccttaaaattgaatcgaatggtgagagagacaatcgagattagttgtttgaattcacgatgttttattaatttatttctgtcattgatgatctcctaatatatttgttacggtgttagacatttagttggatttcaaatttttaaccactttattattattgtttgattatatatatatatatatatatatttgggtgtaaatgattttatattttgttaaacataatataattttatatttgattaaatatgatatgattatttgtgttttatatttataaatactaattttttattttataaaatactctaaaatttctattaatattaaatttattaaataaattttaactaattaacctgttgtccaacccggttgacccgatgacccagtgatccagtgagccagaatgtagtccggttcatcgtccgggtcgggtttcaaaacattgtaagaagaccttcaattacttctgaaacaagttaatcaatcacgtcgttcgataaactcttggatcacgtgactctcgttggatatgtcaatttatta

SEQ ID NO: 30346 - DNA, 4595 bp, Arabidopsis thaliana landsberg
gtgcagacccaaaacagcccaatggtttgtgtggatagtcgtatctccggtaaaagagacgaacgagtagcataaaagcattacgagtgtaagaatcttcatttttaggaagataatctgaattgaagtttggaatcgatagtgaggtttccgaatctcgtctccgatttagattgtagacttgatatataaatcacaaagataatctattgaaaagaatttaccagtacgaaaaagagggattacggcgtccacgatggaactccagtcagaaaactagcttgccggcggaggcgtggaaggaaacggtgaagacgggagcaaacgacggagtaaataaatccttttatatgattactttgtctattttgttgtgaattattggataaattgattacattaaattatcgttaaaattttattaaatggttttttactttcttaaattcaatatagaatttctctttgatttttttttcaacagtttgatttcgtaaaaaattccaattaattatcccaaaaaagaagaagagagaaatgaaattccactaactatgtaaatttcgagacaaaatcagagaatctgtaaagaaaaatcttaacataatctacattggactataaaaactaacgtaacgaatgcaaaagcatcttaaaatataatcgcatttctcaatggaagaaagaataagtcatgaacatttaaaagaataagtgaggaacacttcaaaaagaatatatggcttccgttggtgtgtgtgtattgtagagacaaaaaagaatcactcagagactggcaataagaagctaaatccagaattctcccggattaaaggtggcggttcgatatccgctatttcaaatttctccatcgactttgataaatcatcaaccgagaaagggatgctgcaaaatcatcaaaacctgttagaagacgtcatcaaagtgcccataacgaaacttgttggtcttgtaacaacctcgagtcgtcatccaaaaggaatgagttgctaacagcattgttcgaatcttctgtcattagcaccctcatatttgctattacctattatacatagtcagagagagagagagaggtatatctatgagctaattaaggatataattacacagatcatcagtagcttaaggtgatcacttacgtctggagagacgctatgggtgccgtatttgtcgtcccagtacatggtactgattctgtataactgttgtatgcttagtacctgtccacagtttcaatttatcagtaaatggacacttacaaagccctgatttttcttttcttttcttcttttataagaacattggcaagtgtttcataaggaatataagaaagttgtgatagactgagcaggggatacaacaacttaccgggcaaagatcatgactgatctcatcaagagttttctttggtttttgatgtacaacctgtatttggagcaagaattatttttttacccttatgggacaatcctgaaggtttaggtagaagataaggcaaggttaccagaaacccaatggcctgtctaatatgcttaagctcatcccacgaagaacccgcatactgaaattgttgttgttagttaatcagttagtgttgttgaataatgatagcagactgctaagagagataccttatttgtggccttaaaacaccagtgttccaattcagacaagcccgctttgacgtactccccattactaaatgaacaacactcgcgtctcaataaaaggctgttgtggacaacaaaggaagcatttgattagtagaacatagcctagcaatgtttgagactagagataacggggttttagatgctaaagattcccgtaaaaacctgttaaacagctgaacattgatgaatgagaatatctgcgtaaacaccttacgcaccaaaaatgaaggaacctaacagcataaatagaagattcaaactccgggcaatccggaacttgttaatatttagaggaattggaatcgcaaaggaactcacattgtttgattttagagtattgaggaaatttgtaagactcttgacaattccttgccaatgggcgatcagtgcctgctgagctgcagtgttgcccaacggaacgagatgctcctttcactaaactagccctcgatgttcttggtgcctatttgaagttgcagccagatatattcaataagcaagaacaacctcttttttcttgggaacgtgatggctgtaattaatggcatacctgaatgcacaatccaaggagtggaaaaatcaccttcttcaagttatcgcgaatcattccgtatatcttttcaacataagctgtgagctgctgcttaaacagtagagccggatattttgcttcaacttgtctaaaggtatctgctccacctcccgcagcaccgtttatcatggcaagatttacacctgggggtgccccgcggaagctctaattgatgataacaattatcaaaattaaagttataacgaaagaataagcttttgcttcattgtgttgatggatctcaaaccatatatataactctatatacctgactcatccttccaaatagagtggcagaagatgaacggcggcgctgcggagccatcccagctgcaccactagctttgagtgtgcgctggaggagtaataggagtgtcgaggtattggataaccaataggccaatgtattgttgttatcttgagtctgagagatcaactttcgcaacattattaatccaatacacttgcaatcacaattagatacctataaaaactaggaagctgaagccaacctcaatagcatggcctattgtctgaataatgcgatcaaagacactggttcgttcaacttcaaatgacctccattgcagtaaacatttgtaaatgatacatgctgtgataggtcggttcccctggaatcccaagtgttgaacaatggagcggataagtaggtcttgattttcttgctgcttctcatttaatgatttctgtggtttatcctccacttctgagggatctctatggttaatcgaatggctatgcagatcctgattcaaatttaaagccattgcttcatcatatcaaaacctaaatttgagactgacagacgatcaaaattaaattggtaaaacatatttaccaagtttgacctcgcatccactgcaagatgaccactctctgaacctctctgtaaatattaaacagagtaatttatcaacttctgacaaaagcaacaaaaagatagctgtgggctaatatatttgagattacagttctagtttacctgtaaaatggaccgggagcggccagagagaaatttattcggtgccatggacacagcctgctgccgtaggactttattctctgattccaagttgctgcacttttcttccatcctgatcacattaacttctagttcagctcagaggaaaataaattaccagcaaaatcagatgaatagaaagattaataatatcaaaatgtttatgatatattcttaccttgtcagtgattcttggagttgctgacctttcttctctgtctcttccagttttttctttttgtcttcgagagactcttgagcttcttcgaatttcctcactgcatcatcagccctttgtttttcgttctctagagtaacctgttaaaacacaaatgattactgatgcctagtagactaatatgtaacaatgaatgtaaatctcaaatttagatggaactgatttgcaggttgatagccactgacagcaagtacctttacactctccagttcctccgtcatcaattcaatcttcttggtatcttcaactaaaatttgtgtttctttgataacaggaggagcttcttcagcggctttctttgcagcttcacgttccttcagaagcaacgcatttgtttcatcaactttcttccgcatttcttcgaatgaactcttaagtttcaaaatctcctgagtctttgcttcttctaagtcaccctataaaattagttcagcgctagacattatatatctactccaaacatgtctattaaaatgatgtttctagggcaaataccctcgaacgtttctccaactggacacggtatgtgagttcctcgactttcttttcaagcatatcctttgcctctttaagtgctcctgtttcccttgcagcctgaagataatacaaatgttgagtatgttaagataactaatctttgaagcagtcacttagttactacaaaaggaagaagacaagataatttatcagtttcagcttcaaagtcccttaaattagcatcctgattttgaaagtatttatcaaaaaattatataattaatcttgccgacgcatagtttccatctcaatgtatacatggcatgatagtttccacgaaaaatatcatgtattatgatagtaggcttttgactatgtgatgaatatatatgtgaataagaaactagttgtaccattttgagcttcctaagttctctcttagcaagtctgcctctccatcgtgtctgagataggaccactccatttttaaactaattgtagtacgagattgctctgtgacaacgccactgagcctgccgttagtaacaggat

SEQ ID NO: 30347 - DNA, 1652 bp, Arabidopsis thaliana landsberg
atcagcctacacacgcaaatgatactcattaaagtcattccttgatttatttccatgcttaaatccaatgagataactaatcagtatgcattttgatccattaacagtccattgacacagtttcacgcgtaacaagtgagaaaaacgtacacacttttaaacccaagtcttctccacttgtaattagttgcaaagtttccgatttttttttcctttagcgagatgcttatctgccgctttttttaatgcctgcaaatgtagggagtagtatcctggacgcattgcatgtggaatggaatcaaaagaccttgctatctctttggaaggaaatttcatgctgatactctcgataaactgatggaactcttcccaaactacacaagcatcgtgtagggctttcgagcaattttgattgattgatgaaatgcaatgccaaggaggtattcttttgactcggattctttggccaacgttcagttatacccatgaatcaaactaaaacttttaggcaatatcatggaacccctagaagctgtatctcactgtaaagtccttttacgagcagagaaaatccgaaatcgtgtgatctttgagaaagcttaggaagtatttggggttttgtcattttggttggggacgttgggacatttttaactcatctgttgtcactacatctcattgttatttatagaattttcagagtgcttttttgtttttctctctttttgttggagcactttgttgaatatgaaatgaaaacaagatatgaggcttatacagtttaaaaaaagctgggcattttgatcataattttggagttttatatcaataactaattatacaaactgctatgaagcattttcctctttttagcagacacagttctctagaactaccctcttattactgcatattacaaaaaaattatattacaacacccacacgatttgttcatcgccgatgtcctagagccaccaccggaatcctgaccttatgccctcggctaccttttaactttacctccccgaagctgtatactccagaaaccgatctcacggtcatagtgactgagaaggttctagtagcgcctggtctgagtgtcatcgctggtgggttcacttcgatggcaatagacggctgcatccttgctgttattgtgtatgtttcttctacctctgctacattagtaactttccttgttactgtctgggtccccactagatgagaaactgctatagatggtgcattaaagtttgaaggatgtttcatgtcgtagttacaggccgtgtttgtgtaatttcttatctcgtgggcgctgatccctggggttgtgcataagaatcctagatagtcctcataacctacaagagaagattgataggtcttatcaaccagatatcaaaaatctttggtacatcattgatgagaaatagaaattaatacctgcatcaaagataagaccaggatctaaagcagcacttggattgacatgaccacttccataatcgaaaggagtggctttaacaagcgttacagcttctgtgtctgaatattgctgtgcctgaagaagccttcctgctctatctatgactgttgaggttgtcatcaaagctgatttgatagcagctgggctccattgaggatgcttctgc

SEQ ID NO: 30348 - DNA, 1369 bp, Arabidopsis thaliana landsberg
aaagcaattttactcttaacgctcatttcgacattacaaatgcatttttatttatctatttttttcgtcgaccgttttctttgacgatgtttgttatatgattctaaaagcatccacaatggtagactcttagcaaagctcttaacaaatatttaaaaaattatataatttaaatattagataaatctcttaaatttggtaaaacttaggtcaattgtctcttagttaagagacaaatagtcgggttttattaggcccactagttcgttaaaggctaaagcagtgcccggttcttatagcggaggtaactttaaatattgggcccttactgaaaggtaaattagttgggtttattgggctttattataaggcccactaattcagcagtaaccctaacgaaaccctagcatatattagttcttaaacttcagctgagagaaaaccctaatttctcaaagagtctaaagagacggagagtgagagaagagagaaacatttcgagacaaatggccgccgccgctgctcgtcctctcgtcaccatccaaaccttggatggtgacatgtccaccgatcaatcctccaccgtcgtacttcccgacgtcatgacggcgccagttcgaccagacatcgttaacttcgttcacgcccaaatctccaacaacagccgtcagccatacgccgtatcgaagaaggccggtcaccagacctccgccgagtcctggggtaccggacgtgccgtgtctcgtatacctcgtgttcccggtggtggtactcaccgtgctggtcaagctgcgttcggtaacatgtgtcgtggtggtcgtatgttcgctccaaccaagatctggcgccgctggcaccgtcgtgtcaatgtcaacatgaagcgtcacgcaatcgtctcagctatcgctgcaactgctgttcctgcgcttgtgatggctcgtggtcacaagatcgagaatgttcctgagatgcctcttgttgtgagtgactccgccgaagctgtggagaagacctcagctgcgatcaaggttttgaaacagatcggtgcttatgatgatgctgagaaggcaaagaacagcattggaatccgtcctggtacaaggtaaaatgaggaaccgtcgttacatttctaaaaaaggtcctctggtggtttatggaactgaaggatctaagatagttaaggcgtttagaaaccttcctggtgttgagctctgtcatgtggagaggcttaatttgttccagcttgctcctggtggtcaccttggtcggtttgtgatctggtccaagtctgcctttgagaagcttgagactaaaaatggttcgtttgagaagccatcagaaaagtagaatgggtatgtgcttcctcgtg

SEQ ID NO: 30349 - DNA, 1345 bp, Arabidopsis thaliana landsberg
gtagacttttcagactgtgaggcactgtctcatgctagttgggatacccattccaagtgcagtggcgatggcaacagaaaatattcactctaagttaccagtctgtatcaaattcagcaactgcttcaacttggatcataaagctctccttctgcaacaatcaattttcaagcaactaatcttgtcaggtggagaaatgttttcatatttcactcaccgaactactggaacgtctctgaccaatatccctcttcttcacatctctccttgtcaaccattcttcagatttagagcttgcgccttggttgatactgaatctatggacataggtagtgtatttttccaggtccaggtatcttgtcggttcacagacagactcgggaactatttggattccccttatcaacacgaggtcttcgcagtacttgagaagggtagtcatatggttatatctgactgctgtttcccttttaacgaagacaatgctcctctagctgaacttatctatgatcacgtggatatacagtttcactttactcaagacaacgatgagctcaaactaataggatgtggtctaagactctctgaagccgataatgatctaggcaatgagattgatggcagtgaagagtgggaagactgcaacgatagcgatcttggcagtgaatctgataatttagaggcagaagaagacacgtgagaaggaagcttacttgaagaagaagatattttttatctgtgccaaacttgtttacagcttttggatcgggcatgctgattgttgtacatcttctcctgcgtgggatttgagggtagtgagctagagaagatgatgctctagagctctacttgtatgaagattatattgtacattgagatgagagaagagagaagagatcacatcttcaaacttatcagaatctgatcacagtgaagaaagagtgtgaagacaatgatgtggagaaaagggaagcagtgagagaatgtagattatctaatgacatgtggcttgttagagaaaacttttatctaatgacatgcatcttcaaacaaagttttctctttttgttttttgttttctacaacttcatctgcagatgctttgttgaagtaattcttgtaccatatatataacgattgggaattttcttgctgactctactgtaacttaaacgcaaatgaggaacatgaaatgttgataagattttctgttgtattcaagtttgttacatagagagcctcttatttaaaaagaggatcctggtttgcctactttgtcccagtccttactaaacctgtatactcaatttaaaccggtccagaagattcaaaatcgcgaagccaa

SEQ ID NO: 30350 - DNA, 1396 bp, Arabidopsis thaliana landsberg
  unsure (1)..(1396): unsure at all n locations
cctcaagaggataaagttttttcgttttaaaactttttttatttggttcaagatgttgatgaggctaatgagaatgggtcactgtcgataatccaaatatggtatacatagaatattttgaaaatatgggtgatgagtatcaacaagcaagttttgattcgtttgttgaatttagtctcgaactttaaacgacacatgatcatattatacatataacatgttaagaagaatttactttaaaactcaaagacaaaaatattttgaaaaactttctcatgggaatatggaatgttaatatcctctacttgtcttgtgacaattttaaggtcggtcccatcttttttgacaaaagttaacaattgaaaattagttagttatgatatatatagctaattcggttttaatttcaagtgcttaatgatagtagtgaaacaatatatgtattcaactacctgatactgttaattattgtatcatgtgtagagtagaaatctaccatatctactcaacaattatccaatctagaaactctcgtctttaaagtagcatacacattattcacattaacaattgatttgcttttacacataaataaattttgaaatagcctctttttatctgcataacgaatatacatactaaacaatgtgcaacgaggatgggtgtttatgcaaacgttgggggggggggaaagaaatgatattggtgatcttatgacgacgaagacatagagaagcatgtgaaacacttcctaaagacaatgtcgaatcttgaacaaaggatattgtgctacgatacaccaactgataagatgttaccactagaagttacttttattcgcctatgaattttaaattcattcttaaactcatgaaaagccttttttagtctgaatgacacaagtgtttttaggagaaacaaacgttttgtacaacttcaaatgtgaaaaatgaaacaaatgtgnnnnnnnnnnnnnnnnnnnnnnnaaatgataaaagctttcatgtctgtgaagtcaagtaatcatgttgtgaatgtaaattagtgttacagatcactacatatataaaacataaagctctaacgtgtaaactctagtatgaacttgttaaatattgggtaaaatggggaaaaccaattttgtcgaaatgtgtgtggaagtggtgtaacaaaggtcatattaattaattgttgctatataagatgaaaggtctctttgttttaaaatttgagtatctattggatgtaattttacaaagtcaatttatatttttctatttagaaatgacaacagattaagtgggagacctttgaagaaatgaaagaagttgaaaagtttgaagtagtgaaacttagttttagtaaaataaataccaaagtggaaagagtacatttt

SEQ ID NO: 30351 - DNA, 3427 bp, Arabidopsis thaliana landsberg
tataattcaaataaattttaatataatatacatattaatttgcaaaaattctgttaatactaatcgagtggttttcataacaagtcatcgtgaattatttacatactaatatatcacaagaaaaacgtttatcgtaatttagaacactggttagaacaataattatttatcaaattgttttttaaaaaatgacaaaaataaaagttaggatttaaaaaagagaagaaaagaggaatggtaattgggtaatatataatgtaccgtgcaaaggaggtgattgaagctctttgttacaattacaatgcctatatgagctgtggtttcaacatccgcccttctcgtctctctctctttaccttcattgcccaattcctctaattcttcctcctttctctgtctctcggaatcagggaagataaagttcttccttttttctccaaaggtgattactttaagctcttttgcccttttttttttcgtgtcacaacagtttctctgtgggctcgactgaattctctccgaccatcatcactctttcaattgttatttccaatggagtttgtctgaattgaatttgcatagtaaaggtcagagatttgtttaagtctctcctcgcttttctgttcgagggtttttcttctcagaatccggcgagagcattcctcagttctttctgtttgttgaatttgatttctcttttatctgctatgggattttagttttggagccattgagtatctaaattttccaaattggggacttgtttgatcttattgtttcttcttgttctgcaggtttggattttcttctaggtggagtaggatctgcgtttattttatcattatggtctttataaacagagtgctttaattttggtagctgcaagggattgattactcgttagagtgtgtatttatatctgatcaagatatgagtcgtagggtgaggcagagagtggaggataatggaaagtataaggttgattcaccaagttatactgtgattggagttgaggatttagcacctaaggttcaacagtatgtgaattggactagtttgccttatgacacagtgtttcatttgtttactcgattgaattatcgcgatagagctagcttagcctcgacctgtaggacatggagaagccttggtgcttcttcttttttgtggagttcattggatcttcgagcccacaaatttgatctttcaatggcagcttctcttgcaactaggtgtgctgatcttcagaagattaggtttcgtggtgttgactctgctgatgccataattcatctcaaagcaaggagtctgcttgaaattagcggcgactattgtaggaagattacagatgctacattgtctatgattgcggcacgccatgaagctcttgagagcctccaacttggaccagatttctgtgagaggatcactagtgatgctataagagttatagccttttgctgtccgaaactaaagaagctacgggtttctggcatgagagatgttagttctgaggcaattgaatctttggccaaaaattgcccacagctcagtgatcttggattcttagattgcctgaacatcaacgaagaagcattgggaaaagtggtatctcttcgctacctctctgttgctgggacatcaaacataaagtggaaagttgcattagaaaattgggagaagcttccaaaattaatcggtttggatgtctcaagaaccaccattgaccatattgctgtgtccaggttgttgaaatcatcgcagagcttgaaagtcttgtgtgctttaaactgcccttatctcgaagaggataaaagttacagctccaatagattcaaaggaaaggtcttgcttgctgtgtttactgatacttttgatgagctagcttctatatttgccgataactcaaagaaaccaaagaatatattttcttactggagagatttgataagaaaggataaaagcattgacgaaataatgctttggattgagtggatcatttctcatacacttctacgaattgcagagagcagcaattcacaaggattaaacgatttctggctgaatcagggagctacgttgcttctcagtttaatgcaaagcgcacaagaggatgtccaagagagagcagccacaggacttgcaactttcatcgttgttgatgatgagaatgctagcatagactgtggaagagccgaagctgttatgcgagatggagggatccgtcttcttctagaacttgctaaatcttggcgagaaggtcttcagtcagaagctgcaaaggctattgcaaacttgtcggtaaatgctaaagttgcaaaggctgttgctgaagaaggagggatcagtgttcttgctgatttggcaaagtctatgaatagacttgtggctgaagaagctgctggtgggctatggaatctctctgttggagaagagcataaggtacggtccccttgtaaagttttaaacacacattgaaccttttgctctttcactgacattgttgtttcttatttttattttttttctattagaacgcgattgctcaagctggaggagtgaatgcgttagttgatcttatctttagatggccacatggttgtgatggagttctggtacacgcttgccacctttaaagcctcacacttttcatttggaaatatccaaaattaacacttctggctaagtattatcatctgaaagattgattatcaaaactagtacaatctagtttatccttttgtattagggttttagatttaataattattatgaagttgtagagacaaggtatctcggtcgtaaaatacaagaattttgctagatttggtaattcgattttcgtggtatccaacactgtttttagtgttatttttctctatatttgttctttctaaaacggagaaatctacacttttttggtaattaggaacgtgctgctggggcattagcaaatttagcagcagacgataaatgcagcatggaagttgcaagagcaggaggtgtgcatgccttggtgatgctagctcggaattgcaagtatgaaggagcacaagaacaggtatttccttgttttcgaatgcacctcatttttatttttttattgattcgatgcttgtagtattttgagttccggatggcagtgagtgtgtgaactgagtttgtgacaaattgtcttatttcaggcggctcgtgctttggctaatctagctgctcatggtgatagcaacggtaataatgctgctgttggacaagaggctggtgcattggaagctcttgttcagcttacgcaatcacctcatgaaggtgttaaacaggaagctgctggggctcttttgggaatttagcatttgatgacaagaatcgagaatccattgctgcatttggtggtgttgaagccttggtattgagatttccttttattttt

SEQ ID NO: 30352 - DNA, 3387 bp, Arabidopsis thaliana landsberg
tgaattcattaaaactttgatttaattttaattctttgtaggaggaatttacattcaagtttcgatctactgatgaaattgcgaggcaaaaagctctaaattatgtatatcttcttcaaggtacattatcagaatctaatggttatgttgagccaaactaaactatttgttattgagaaaaaatttaaacaatcgtgtatatattttttttttgttaggagttagttctgtgacatttagtgaacgaagcaacttactaaccgtcaagggagaaagaatcgacaaggctaaaataatgaggaagatagataagatttttcaaccgaaaaattcgttcttttcgtgttttagtcccaaatactagtatggtgtttatttatgtttttatacttataagagtatttggattttaggaataattttctgaccaactgtcccttttaggaatattttctatagaagtgtttggattgttattaagcttaagttatatgagtctactcgtacatatatagtcttatcaaacgaaatctagttcagattcagataattaggaaaagaacacatgtaataaccgacagaaaaacatattatagcctcataactaaaattctatacctccccaaaacaaacaccatacgagtttaagataatagacatagatagatacacggtttaatgtggaaacgttgaaaaccatagattttcgatagccggaaaaggaggtttcacactctccatctaattggtcaggtctggtctgatccggtccaactcggtttgattcagtttatgtttggtctagctgacgtagggagggtccatgaaaacccactgaaaaacttgctcatactgaacggcagcgttttcccaagagtagtttcgggtcattcctcttctcatcaatccttcccatgactgtttatactctctgtacgttgctgcagccaacctcaaggcctgagatgtatttaacataacaaggtcatatacccacaaaaaccataaaccacaaattctcttgagaaatggggagttcgataaacttaccgagaccatgctatctttcgacaagggagtgaagacccacctgaaacattaaactcacaaaagaacgatttataagatcagaaatcatttgaatttgatgttttttctaaaaaacagaattgtttattaccctgtaccagcaccagctccaccttctgcataagggttgaaattctcaaccgtatcctgaaaacaattatgatcgaattataagtcattacccttttagctaccaaaccattctctcattctgaacatattttgattttgtatttatcagggttcttgaagatttaaagaaactcactctgagccctcctgtgccatgaacaactggaatggttccgtatctcattgcgtataactgatttaaaccgcagggctcgaatctcgacggcatgagaagaatgtcacagctgtttattgatggattacaaatccaatgagatatttgtggcattgttaaggttttctacaacagttccttttagattatctaacaggttttatcatgtcttctggaaatttgaaagtctaggctagagtgatttgtttttacccggctgtgattcgatgagagatgggaacattgaacccaacccaaccgcggaatttgtctctgtatgtttcctccatacttctcatccagctttcatattttggatcacccgaaccaagcatgacctgcaagtaaccaaaccacattaaaacatatgaataaagatatcttatcaaaagaaacaagtctttcactaaaaaaggaatattagaatgcggaaaaccactacatcttccactaaaattttccataattctgcctcaggtttaagaaatgtgcgaaaacagtgctaaagacaggagatgagaaatgtgtatcacacatgtcacgggtactgcatgtgttttagtcaaaccgttcaatagactcacttacgaattgaatgtcatcaaccatgagatcaggaccagcggtttggatcagatcaatgcccttctggtaatcaagtcttcctataaacccaatctgtaaaggtattaaaacattcaagctacatgagcgattataagacaaaacagaacatttcttataaaaataaagtggctttgaaaaatcaccataggacattcaggcctaatgggaagacccaattctttttgtagtgccatcttgcatttgatctgcgattcccaaagcagacacaaaaagtgaattcactataaagcattggatttaggcacctttactcaagagaacttcacatcaccttctcggagacatcatcagcagagtaatggaaaggaatgtgttcatccgtggatggattccattcatcaacattaattccatttgtgatccctgtaaacatcaccggaatatcagctcagaaagatgttttaagtgtaagattataaaagtcggggtttatagaaacaagtaccatttataacacttttccgactagagagcaaatcttgaagaccataaccaccttcaacagtagtgatttcccatgcatagccctgaaaatacagaaaacaaatcccaatcagaataccaacccacacaatttcagaatcattaccgtaagtgaatgtggtcattaatatcagggattatgtttacaaaagattcatcacctggctgacagtaatgatacggtcagaggtcacaatagcacccttgagaacattaaccgcttcaccggtgtcaagggcatgagttcttgcccacgttggaaatacccacccgactgctccataccattccgaaggcaatcccaagttggtgtatgtagctgctggctccacccccttttagaaaagagccaattcatgaaatacaaaaataaccaattaacttaatcaaacacaacatacataactaactaatcacagtaagctaactatggggcattatacgaaacttacaactatataaaaaccagaagaagagatattacatatacaggtctggaaaaatgtttatgaatttacctgatgagcgaggttatggataatgagaatgcttcttgcatccttataaactccatatgggcgatactttgcggccaaaagtctggaataaaagaagatacacgatataagtttcaatgtccacaaatcaaagcaggattctgcacatccgttaaaagataaagcctagagtataaggtaaagagatcaagaaaaggttacatgggaacaaggccggcatgccagtcattgacaaggaagagtgatttctctccataagtgaaccctccaagaggcagcacgagaggggcttcacatgcagcatggcaaagtaacgtgaaccgaaactgtaatcagaaaatg

SEQ ID NO: 30353 - DNA, 2526 bp, Arabidopsis thaliana landsberg
  unsure (1)..(2526): unsure at all n locations
tttaaccctcatgttaacctatatcctacagtgaaaaggtaaaactaattgctattgccatatattttatactgactctaaatgattgaaattcaccatctctcatctgaaaatcctctaagagcacaagaaattgcaacactagctgagagcacgagaatgcaacataactattgctgcagcnnnnnnnnnnnnnnnnnnnacaaaaaatttatcagccacaaaacaaaactctatgttatggtgttatggatgttttatgctcaaagccagtactgtcactggtttctcgttcaactaatacaaaaacattagggtgacaaccatacctgcgtactcaactttctttcacgagcaagaagatacaacgctcctagcagcaagcatagaccatgaccccaatcaccaaacataacagcaaacaaaaagggatatgtgacaactgaataaacgcagggcttgcctcttgatatctcgcaacactgccaagtaagtatcatgtcatacatacaatgtggtgatcagcggaaataaactggcatatgcaatcaacaaatcatttgattaagaaggtacggaatgaagaatgttaagcgttgttagaaagcagccagttattctaaaatcatgaatgtatgatgagggaaacacgggaccaaaaacttgcatctaaatgatgatgttttctcattaccatggaacattacaatagtacaaggtaatgatcaaaagtggaactaacccgtaagcatcaataatctcctggaaggcatttgtaagtttgttcgttctgaaataggtgggaggtgattctactgcttgcattacatgaaatataacgcccacctgtgaactgctgtcgaaagttgctcgctgcaggacctcatgaatctgcacataagttgttgatgaattgcacttacaaggaaatgatagtcgattgtgtaaaagtgataacaacgttgtagtatacctgggtcttagcaaatgtggggcaccaaccttcgccaacaaggcatttcttggttacatcaaaatttagcatattcagagtatcataaacagctttttctctccgaacctaccagtaaaaggccagctaaaatcacggatgtaacataatgtgtggaccataaaatcccatatatacttcatctaattaaaggggaaaaaaactaattgcagatgttatttcttaccgtggtgatccagttagttaagctatagccaacagaattaagggcattattccgatggcgagttccagcatctaatgtggcttccagatcagagagtcgggataaaacctacactccagatacattgatatttaggaacagcaatagtgtgatgcatacagtgtgaaaaagaaatcagcagtcacatatgattggacagtaacaaaatcatatgaacaagatgaaatcaacttgcaggaatcgttttacaaaaacagtgtatagaaatatcttcaatagctctctctaaataagaacaagttctggaatgtttaacttacttctctagtaagctgcctctgcttagttgtatcctcggggacaggatagcaatttgcaccaaatgcttcacatattttcaatatttttgttcttgcttgctccccagagaagaataccacaaatacaactttctccacctacgagcacaaaaccagttagtaaataagcatccaactgaaataacatatgattatcactgagatcagagattatcctgaccatttctgatgttgaaggatccatgatttcctcatcagaggttgtttggttgaaaagcatattgcctcgtgttgcacgaaacaacattctttcaaacttaagaagtttgtctttgttgatgattccactaataaatctcaatcctgattgattagagtgtccaggattcatttcctgtgaataaaataactgttttcttagtaaagataaaaatgagactccaggtagcaacagtaaaacggaaactttgacatgcaatcacctgctcaagtaaagaggcagtctcaataaaaccgttattcgagtaggtgctttcatgtagttcaatttcttctccaattgcatgagtattacttgagacaaggaaaccacttgcctggaaaaaaaggtaaaaagagcaatatatgagcttacatcttagcgagtaaaagttggatgaaaagtgagcaacagctactgcgctatacaaccttgtcaattactagatatagatctgagacgaaaggcgaatacacctaccttttcaagaactatcttgaattctagaagttcgttatatgtctgccgaagcttttcactgtttgaattcatttcaagtacttcatgctcgtgatcagcaagttgtctctgccagagaaagtaattgacgatgcaaaagaaaaagtataaatttcataaaaaagcaagcctgatcccaaaataaaagagggattaaaataaagacttctcagccaaaacagaattaaaaattgaattctgacctctaaatctccaagtgcaatatctg

SEQ ID NO: 30354 - DNA, 2407 bp, Arabidopsis thaliana landsberg
acggaactgcaaacagcagatcgggttcaaggagacaacagaagtcgttgggaggattctaactgtcattgcaataagcgaatgctgatgaatcgaaggcggtctgttcatcagcacagtgtctccatccattaaactccggaatattttgtctccggtttggaggtcattgacttgaatagccaccaatctatctcctcttctcacatgcatctctttattgtccaacagtgtggggacaaaggaagtgacaagcctttctttattgcactggttgagatgctctgatacttgaagcctttttgcgataccctcgggtatgccaatctcgttgagcttcaaggacggatcaccaacaactactgtccggaatgtatgatcacttcttttaccgagcagcacgtctttcatgaaccttagaccgcaaagttttggtgtatcagacttcttctggtacggatttgcggaatctttgctcgaagacacagtttccgaaaagagctgtgcaaaaaacaagaattactactaaccttcacaaatgaacagaaagaagagtttaaatctatcagaaactactgcttactctggaatattgcatgcattccatcacacgagaactcaattcaagtgtgtttccctcaaagccgactagtttcttgtagatccgagtccgttcatccttcaataaatgtgacagaaactcgaaaagataagagaaataccatagtatatgataacaaattatataaacaagcgtttttagcttacaaatattagtcgagctccgttgaactgatgaactatttcggttacacggtaaccatttggtgtaacaggaaaagatgtcagaccaagagagttgaacatagggatatccttcttgatgagcctctgatcaatccctaataacagagcataaacctgcaaaaaaggtgaaattttcagaaaactgtatatagtaagaagtcatggagatggtacatttcactcttctatacctgtgcatgcgttattattcgccttgttggtttcaaacagctctcgtcgatattagagtcttgtggcaaaaaactccaatagtcaggaggcaatgttaacactccccgtttcttgagtttcatcagactctcttcgtttacttcaacaatgattccggatcgcctgaagacttctttagtagttaccctaaacttcattagaggataaccagtattggactgatatacaacaacaacaaaaaccgaaaattagtgttggaacaaagttttaaactgagaaaattagttgcaatcatatattcttacagtgcagtatctacatctctcaggctggtcttcggtaatctatatcaagcaaaaatgacattagtatatgtagttccaaaacacacaaaccaacaaaggatttggaaagactcgtgaacctgaaactgcttttttcgaatgtatttacaccccggacagattttgtttaacaacgcagctacctccttgaggaaatacgggtttattatcgagtacgcgaagtttataaccccgaaatgccctaaaacagagagaaaagtagcaaactcagggaactaatcataaaatgagctaaaagattggaacaatatttgcaaaaaccagattctttatgataccttcgcaaacttttcgatctttgctgccacaggttctgcagacagaatccggattcggtaatcctagccgagaatcagtcacctgattcggtgcttcaacctctagcacagacattttatcctataataaagtaccattacattaaatatttgctccatctactcataaacaaatcaagaagaataaataaggacaacacttactcgatcattgttgtttgaaatgctaaaacctatcgaggttagagttcccacgggaacctgaagctcctcgcaatcgtcttccatgttgaagagtttcctacaagaagaaaaaccatcagtaaggaaaatttagatacgtaagtaaaaacatcagtttttataagcaagttttagtgaccaattccaatgtgcagaatatgaaacaaaaccaatatttagcatttagacagacaaaaccaaaaaactcgctctgaccaatactaaccactgagaaacagacaacttcacaaactatctctgtgagtggccacttagaatctagcacgaacccaaagaaaagagaaaacatgttcagggaagaagattctagctcaaaaatatttgaagaacacacaaacagttcaaactttgaacacattattgaaaattaacacttacttttgtaacataaaacagagctaaaactcccccataaatcctcaaaaaggatcagtttctatatgaaaactctagaaatcaaatgtaatgtgcagctgaatataaacaaaaggcaatcttagc

SEQ ID NO: 30355 - DNA, 969 bp, Arabidopsis thaliana landsberg
taacaccctacgaaggtgttcataatcatccttgtgagaagctcatggagactcttagccctctccttatgcaacttcagttcctctcaagagtttctgatctgtaattattgaatgttaattagtggtgtaatacattaattatgctttaatctctccattgaccctcaatctccaaagagacaaatgtatagaataaatctcataacatacatgctttaggtttattgagacattgatctatgtttgctttaatttgattcgtctaattgtccctctctcgtggattatttgtttattttttttaggtgaacgatcacatttaaaccaagtgtagttagctctggtaaaaaggttttaagcaaaggttagaagttgttggtttgaatgatgcttggaacaaaactaataataaatgttgtgatttcgggtttgagtggattacgagatttgactccgaaccttcttgtatttaaaaagaacaaaaaacacgatcacatttaggcatttactggaccagttttgaatttagaaaatgtttggggtcatattatggatctcaaaagcttttttttctgggttgccaaagccctttgtttgattaaagcaatagcatgtttgatctgagtatctgaccaagattatgtcctcgcaaaatatgaacgatttaatacatcaaatctgttttacacatattattccgcatatatactatctactttaaaataaaatgattagccttagttcataatgattacgtaaaaaatggtattacattttggggtttggagaatgcacataaacgcaagtggtcggataaaccttttctggtacctttcagtcacactaatttggttttgaaagtgaaattccaattaagtggtatctctgaaacgaatgagtttatttatctaccatctacgtttcttaattcgttttacattaaatattatgatcccaagagatagc

SEQ ID NO: 30356 - DNA, 3482 bp, Arabidopsis thaliana landsberg
gctttgtgcaaggtagcaccaaggccctcattcatatccacattttcaggaactacgccgttttgatactcccagtcaaagccatagagaagagacgcaagaactagatgcattatcctaaacgcgagtggcattcctggacaaatccgtcgtccagctccgaacggaatcagctcaaaatcattacctttcacatctattcctcttcccaaaaacctctctggctcgaactgcgtcggattcttccacacattcggatctcgccctatcgcccacacgttcacaagaaccttatttcaaagcacaataggaaatcattagtaattacaaacacaacacaagaacccgccatattatttactattaagaagtagctatttaggtttacttaattaaccgtaccggtaccagaaccgatttagtttgaatgagtaaatacctgagtattcttaggaatgaggaactcgaaaatttggacatcatcagactctgattttcgagggacgaggaaaggagcaggcggatgcaaacgaagactctctttcacaactgcttgtaaataaggtagtttaacgatatcaagatcttgaacggtgccctttagccctatcacttgtcttatctcttcttgaactttcactatcatcttagggtttcgaagtaactccgccatagcccattccaccgcactcgaactcgtgtctactcctgccagaaacaagtcctaatacacaattacatggatttagctaagaacatgtatagaatccaatttgttttgtcttatttaagacttacgagaagcagatgtttgatattattgtcatcgagttctgactccttcttatgagcaatatccaaaagagaatctaacatatcgttgttatttctcgaagttgatgatctctttgtatcgatgaatccttgaaaaaccctaaacagtttgtgcatcaatagcctcgcttcttttctagctccttgcagatcaagaaacccaagaaaagggaagaaatcagcgaggttgggttttccggagatctccatcatccgaatcaccacgttttggaaatcgtgaaatgtctttgagtcatcaaagtttgcgaggtttgtggaaaacagagcgttcgagattatattgagtgatgtgatgaatgatgctcgagagatgttcacagcttctcgtctctcgcagcatttgttaacgaagttcatgagttcttgcaccttcctcgtccttatagcactggttgcttctagacgttgcgttgagaataattggttcctcgttatctttcgtagaaacctgataaagtgtacaaaaaatgtgaaacaatacggtttagggacgcatattatattgaaatcgagcgaaaccaatcattttgaaaaaactgattaatactaagtcagtaagtttgtaataactaccattgtatggaacaaaacaaaccaaaaccaaagtaatacaaaatttaacctaactgaataaagtaaactatacaataatcctttttaaagaaaataattcactagttttctaatactcatgaaattattcattcatttatactctatactcaaaactgaaccaaaaccgatttaaatctgaaccgcaccgacttgaatttatttacctccaacgagccaacggaggaatccagagcaaggaaagctcgtgatgaccagcggctcgaaccgggtcactggagactcgataagacaagacatgatcatgtgttttcagcacttcttttgctgtttccggtgaagatatgaccactgtggtcaaacagccaagcctaaaactcataacgcttccgtaaattcttgagagatcggcaagtgaacggtgaggtttttcaacagtttgaaggatgttacgaagcagagatagctttgaaggacccggtgggttcttggctccaccgggacatgatttcccgctggtgtagaaaaagaagaagagaaagaagataaagagcagagacaatactattgctacaatatccatctaatattatgcactcttcgtcaaaccagattataaattattggaagtgctttaggaaaatcttatatgatgcacattttaagtagtgacaatctttgtaagaaaatttgaggtttgtaattgtaagaaactgtgtcattatatcaggaagacacgttatttgtcccttcaccgattccattgtcttgatgttacatgtggaggtcgaccaaccaacaagtgattcttgcaaattttatcagataaaactgttgaaattatgctttttcatgaaattgattaaatcaactaaatttctatatataacttttgaaccgaatcacaaagctgaaatgacataacatattctgatttccactttccatttcttacgagtgataacaaattggggcatgctaaacgaaactagccatatttaaatgtgaaatataaatttggtaataagtgcaacgattatgtaaaacgtaaaatcattaattaacactgaattagagaattcaagttcaataaaactgaaacagcttatctttaaccacaaaagttgacgtatataaatttaaacgactaattgcctcctatagctagttcatcgatggtcaacggtcaacgtcgcccgtgtaggagatgtgattttgtggtaaagacgtctttaactctttaaagagatgcgttttttaccaagtcacgactcacgtggaacatcgaatcatcaaaacgttcgttgcctcgttaacgaaggcagaatctttaatttctcaaaatggcccatgtattattgctcacattccaattttgaccacatattcgtttattgtttcaatcgtaccaaattctcaattctattatctaagaagaatttttttaatagggattattgacaaaataaaagataaagctgattcttttcaaaaaaaaataaaaaaattattcaacaatatggcattccacttaactgaatcatgtatgatttgatgctaaagtagaatcagaaactgaagggcaaaatttgagaaaatataaaatatgagggatgaatagtgaaggaaaatgaattaaatacaatcgcgattcgaaaagaaccgtttctaatctgtcgcctggcgcatcctcttcccatttatctcactctctggcctaccaaaaatacttcaatgcgttcttaattttgttctgattctccccacttgaccaaccccgtgaggataaactgttgccgacgcttctcgccgataacaccggttttgttgtgacggaaaggtttgcattcgtggttcgatttctagggtttcttcaagttcctgatcgattgtttgagcttattcggtaatctttgtttcggttgcaggaaaaatgggtttgatttctgggattctgttcgggattatcttcggcgtagctctaatggctggctggagtcgtatgatgactcaccgatcgtccaagcgagtcgccaaggttcgattaaatcaat

SEQ ID NO: 30357 - DNA, 2449 bp, Arabidopsis thaliana landsberg
cattttttatatcttcactacttttacatctaattctagattggtactttttaatattcttgtcatttcgcatgcactagtgctaagttcacgggcgcaaccaccagaatttaccccgttttatcatgtcgacaatttagtgatgaccatatttgtgtgataaaaaagccaacttttcttctaattctttcatatgcttgttccttggcaatatttgaccgagtttttttatctctcccaaatccaaatatgaatccacaagaaaagtactaaaaatagcagataaattgtaacaaaaatgacccttttgaaaatagataaaaaaaaaaactttttttataatttcactggcaaagcgacgatttctactagtcgtggagtcacaaagcgacaatttctatgggccgatcgtaaaatctctatatttgtcgtcatgtccgtctacaacgcggctttttaaaggcccattaatctcaatttcaaaaattacgtaaaatcgtttccattatttctcacaatcatatcttctccgtcgccgccgcctcttttattcacaatgtcgtgcttcaaatccaaattcgccggtaaatcttacttccgccgtacttttcattcttcgatcatccagtttcatccacaattatcaattctaatttggcatcgtcgttattcaatcattagaacctgtaaggaattcaaaagtatcctctgattcgtttgctcgaatcgattttgttcaagtttcatcaatcgtggttctctgccaattccatctcttttgttacaaaattgcttcgatcatagctcgaagactgttcaattcctaaatcaaaattcacctgaatctcgtttttgtccgatcttcttcacagatgagctcatcgccaatgccgcttacataggaacaccagggaaaggtatccttgcggcagatgaatcaactggtactattgggaaacgtttcgctagcatcaacgttgagaacgttgaatccaacagacgtgctcttcgtgagcttctcttcactactcctggagctcttccttgcctcagtggtgttattctctttgaagaaactctttaccagaagagctctgatggtaattgacagtttaacatcgctatatgtctgaatctgtgtatcatcgttgactttgattggggttgattttggttgtgatgcaggtacgccttttgttgatatgttgaagagtgcaggagttttgcctggtattaaggttgataagggtaccgttgagcttgctggaaccaatggtgagactactactcaaggtcttgatggtcttggtgaccgttgcaagaaatactacgaggctggtgctcgtttcgccaagtggcgtgcggttcttaagattggtgttaatgagccatctcagttagctatccatgagaacgcttatggattggctaggtatgctgtcatttgtcaggagaacggtcttgtgccgattgtggagcctgagattcttgttgatggctctcatgacattcagaagtgtgccgcggtgacagagcgtgttcttgcagcttgctacaaggctctgagtgatcaccatgtcttgctagaaggaacactcttgaaacctaacatggttactccaggatcagagagtgcgaaggttgcaccagaggtgattgctgagcacactgtccgtgctcttcagaggacagttccagctgctgttccagccatagtgttcttgtctggtggacagagcgaggaagaggcgacaagaaaccttaacgcgatgaaccagttgaagacaaagaagccttggtcgttgtctttctcctttggaagggcgttgcagcagagcactttgaagacttggggaggaaaagaggagaatgtgaagaaggcccaagaagcgttcttggtcagatgcaaagctaactctgaagcaacacttggtgcttacaagggtgatgctaagctcggtgaaggtgcagctgagagccttcacgttaaggattacaagtactgaagaaagaggctgaggatcgtagtttttatatcatcgtttatgttcttgctttcactttctctgttttttgtttggtgttttgtttagaagagtggtggcaccaaagaaccccgtttatacttttttatgaggtctttgtgttcttatgaagcctttttaaaaatgaatattagcttgttgggttataatttaacattatcaatagtgacgacatttgggcggttgtatagttcataatgtctaccaaactcaagaaaatagaaaaggtcatcgaaatactttggactcccaactttgaaacccaaaggtaacatacaatctctaaaaggcctcctgtctattcgaaccatctcgccggctaagttttataccatgcttacactattaaacatgcatatgcaaaagcaagagaaaactctgttgtattgaatggagtatttatt

SEQ ID NO: 30358 - DNA, 2116 bp, Arabidopsis thaliana landsberg
ctatgaaatagggacacatttgtgtcagttaattttcttttttattttatgtatacttcttataaatatcttatgttcaatggttttgtgtcaagaaaaaaaaaaacagaaataaaaaaaaacatttggtcaatcatctttactcatttgggtgaacagaacaaaaaaaagaaaagaaatcagtgttttgacaattcttcttcataatggagatcttcgtttcagtgatcactgtcgtggttgtccatgtcatttcccacgttttccttccatttctcaaaagtttccctctgttttctcctgaagcagcttcccctccatggattccttttttaagtaatcaaattttaaaaagaaagtttcttcctttctcaaatcttcaagtatacccacgattcataataatattccatgtccttttattttcttttctcttgcttgttcctcatgccttctcattttagttattaatcttgcttttcctacttctttaatgatgatttggttttggggtttcgtataatctctgcctctaagtaatttcctgtgacactgaaagcaacttgctttgggttttaactcaaaggtctctttttgttgttcaatgttaagctcaatgaattgggttctattgagcttcatcattgttcttggtggtgggttgctactttcagagggagcttctagttctaggcctcctgttattaaagttggtgctatatttggtttaaacaccatgtacggtgaaactgcaaatatcgcctttaaagctgctgaggaagatgttaactctgatcctagcttccttggtggatcgaaattgcggattttgatgaatgatgctaaacgtagtggcttcctcagcatcatgggaggttgaggaagacttaaaaatcctatcttgttccattttcttgattgcttttttggatggatacttacttcacttttatcctttggtgatgcagcattgcaattcatggagactgatgtagtggctataatctggccacagacatcaataatggctcatgtgttgactcatcttgccaatgagcttactgttccgatgttgtcatttacagctgttgaccctaccctctctccactccaattcccattctttgtccaaacagcacctagtgatctgtttctgatgcgtgccattgcagagatgatcacttactatggctggtcagatgtggtggcattatataatgatgatgataatagtagaaatggcgttacagcgttaggcgatgagcttgaagagaggcgttgcaagatttcttacaaggcagtacttcctttggatgttgtgattactagtccagttgagattatagaggagttgattaagatacggggaatggagtctcgggtaatcgttgtgaacactttcccaaatacaggcaagatgatctttaaggaagcagagagattagggatgatggagaaaggttatgtttggatagctacaacttggttgtcttctgtgctagattcaaatttgcctttggataccaaattagtcaatggagttcttacactgcgtcttcacacgccagattctagaaagaagagggactttgcagcacggtggaagaacaagttgagtaataataagactattgggttaaatgtctatggtctgtatgcttatgatactgtctggatcattgctcgagccgttaagacacttttggaagctttttttaatctttctttctccaatgatgcaaagttaggcagcttgaaaggtgaggcgttgaatctaagtgcattaagcagatttgatcaaggatcacaacttcttgattatattgtgcatacaaagatgtctggtctaactggtccggttcaatttcatccagacagatcaatgctacagccttcatatgatattatcaacttggttgatgaccgggttcaccaaataggttactggtctaactattctggtctttctattgtaccgcctgaatcattttacagcatacctcctaaccgttctagctcaaaccaacatctgaactctgtaacttggcctggtggtacttcagttacgccttgtggatggatttttcgtaacaatggaaggcggctaagaattggt

SEQ ID NO: 30359 - DNA, 188 bp, Arabidopsis thaliana landsberg
aaacggtctgttattaatggaatgcctgtcggctcttgtaaaatactcgtttggacgattctcttttacacatcgaagctaaaccggtgctgacaataaccagcccgcaatgaatagggaaggttagtatgctatgaatgacccagtatcgaacactggtattacttcagcagggggcgttctcctgt

SEQ ID NO: 30360 - DNA, 1496 bp, Arabidopsis thaliana landsberg
ctaaacttttacttatcctttgtgttggttttatttcacagctttgcaattcatggagactgatgctgtggttatcattggtcctcagacatcaataatggctcatgtactgtctcatcttgcaaatgagcttagtgtgcctatgttgtcattcacagctttagaccctagtctctcggcgcttcagttcccgttctttgtccagacagcacctagtgatctctttctgatgcgtgccattgcggaaatgataagttactacggttggtcagaggtgattgcattgtataatgatgatgacaacagtagaaacggtataacagctttaggcgatgagctcgaaggaaggcgctgcaagatttcatacaaggctgtgcttcctttggatgtggtgattacgagtcctcgtgagattataaatgagttggttaagattcaagggatggaatctcgggtaatcattgtgaacactttccctaaaacaggtaagaaaatctttgaggaagcccagaagcttggcatgatggagaaaggctatgtttggatagctacaacttggttgacttctctgttagattctgttaacccgttacctgccaagactgctgaatctcttagaggcgtgcttactcttcgtattcacacgccaaattcaaaaaagaaaaaagatttcgtggtacggtggaacaagttgagtaacgggactgtcggtttaaacgtttatggtctctatgcttatgatactgtctggatcattgctcgagctgttaagagacttctagatagcagagctaacatttccttctctagtgacccaaagttaaccagcatgaaaggggaggagggtcactgaatctaggtgcattgagcatatttgaccaaggatcacaatttcttgattatattgtgaatacaaatatcactggtgttacaggtcaaatacagtttcttcctgacagatcaatgatactgccctcatatgacatcataaacgtggttgatgacgggtttaggcagatagggtattggtctaaccattccgggctctctattatacctccagagtcactatacaaaaagctttcaaatcgttcgagctcaaaccaacatctgaacaatgtgacttggcctggtgggacttctgagacaccacgtggttgggtttttcctaacaacgggagacgattgagaatcggtgtacccgatagagcaagttttaaggagtttgtgtcaaggttggatggaagcaacaaagtgcaagggtatgccattgatgtctttgaagctgcggtaaaactgatttcttatccggttcctcatgagttcgtcctatttggagacggtctcaagaacccaaacttcaatgaatttgtcaacaatgtcactattggggtgagcaaaagaatcaagaaaatatcatttctcttacaaagcattgtcgaaactgactgtaatagttgtgagttgttcatttctgcctttaggtatttgatgct

SEQ ID NO: 30361 - DNA, 1106 bp, Arabidopsis thaliana landsberg
ttcaaccaaacaaatcaatcgctataacattctgatcaaaagcctaattgtgaattaagaaaaaagaaagcttggattttaccatgtgttccaatcatgatcatttataatatagctgaatttattgagtcctaagaacatctccaatggggttctcaactagttatgtcttttgtgagtgtggtttatatagtttcaaagaagattaagaacacaaagataaaagaataactctcttttattagcttagaaaaatatctcaaaatctaaactctcttaatctctcaatacttataagttatgcaacacacttgcatcttcttatatataaaaagaattagacatacatataagttttcctaaaaagattaagaaaacatatatataaatatttagacaacttccttaatacaaagtctaattctaatcctattcctttttagcttatgattcaagcttccttcaaatttaagtcaacattcttctctttaagcttgaagtcacatttcaccacatcttgaactccaacaataattctcatctccttgaacttgatcctcccaagagcttttggtaaaatgtaggccttttgctcgtctccgggaacatgttctacttccacttgttcattctcaacacacacttgaatgaaatgatatctcttgtgaatatatttacttcatccacgaaatatcaggttctttgtgattgcaattgcggacttgttatcaatcaagattaacaccttcttgcatggttctccaataatttccccaagaagctcttgaagctataccgattgttttgatgcttctatggcagccatgagctcagcttcacaagatgtttagagtatcatcatttccactctcggaagcactctctttctttcatctgtacacagtactcaccaataaaatctcaccaaatgttaaagacgatattagaaaaaatgaaaattgtacattcaacaaatcctttcaatattaaaaattatagggatatggatcaaattgaaaaccaaaggccataatgatttcatgatgtggtctaaatttgatgttattccaatataagttttaaacattatattttatatatatgat

SEQ ID NO: 30362 - DNA, 1695 bp, Arabidopsis thaliana landsberg
ttaccaaatggaatagagcggattatgcggagagttacacaacaaaacagaacaagaagttgttccataaattttggttttcttaatttgttgtgatgtagatatgatctccatagatcctctaagatagtgtttgtaatctatttaaacgcttgtaatctcagttttgaatatgttggaaatacatttctcttccctttacgatctctgaatctatatagtatcagagcctgaaatttcaatctaaactctgtttttcttgttttcgacggcaaaccaacccaacccgacaacgataccagcaaccacggaggtccgacgaacgatttttccgtacgatttgactgctgccgacaacccaggagtcgtgatctcgcatcctctgctccagggaacgaactatgatgagtgggcatgcgaaatgaagacgtctctccttacacgaaagaagtttggattccttgacggatctatagctcgaccggctgaaggatcaccagaccttgaagactggtggacgattcaggcactcctcgtgtcatggatcaagatgtcgattgatttgaatctgaaatcgaacatctcccatcgagatgtagctaaggacttgtgggatcatctcaaaaagcgtttttctgtcatgaatgggccaaagatctagcaaatcaaggcagaattggcgtgttgcaagcagagaggacttgcaattgaagcgtacttcggaaagcttactcgcatttgggatagtatggcagcttatcgaccattgagagtatgcaagtgtggtaaatgtgaatgcaatcttggtgagttgcatgagaaagactgtgaagatgacaaagagcatcaattcctctttggacttgatgacaatgtttttcgaacagtgagggctaccttggtgtcatgagctccgattcaacccatggaggaggattataacattgtgagacaagaggagaatttattgaggtattgtacaaagggcgtcgacgaaagccaagacgtgaatgctttttgcggtccaaacaactcaacaatttcataaggaagacaaaccaacaatgttttgtaaacattgtaatcacgccagtcattcgagtgaaagcaactacggagtgatagggtaccttgagtggtgaggagacaggccaagatcttgcacatcatcgagtcacggacgttgccacggaggacataatagagcggctgggagaggtcgtaacaatgtctcatatgctaatgatgtccaagtgcatgagcctgtgagctacgagagctcaaactatgtggtaacggacagagacacagatggtgtgagcggattcagtgactcacaatggaaggtgataaagactcttctcaatgctggaaaggtcaacgaatctgaaaattgactggtacgtaaacctttggataatggatacaggtgcttcgcatcatttaacagatgttaaggatattcaaccagttagtgttctattagctgatggtaggcaaagattgtcagtaaaagaaggatgagtacggcttgggccaaatttgatacttcactcagttttttttattttttttatttttttattttcttttatcaaactaacttgctttcattaaagaacgagaacaagtacagaggaaagagttttagaaaacccagaacataattccatacaataaatgacggtccccaat

SEQ ID NO: 30363 - DNA, 2923 bp, Arabidopsis thaliana landsberg
agcctgcgagtcctttcctagggactcgtgtgcggagatccggatccgagacgcttcagttctggagatcagatggtcctggacggtctgcgaagcttcgaacggtggttaaatcgtcattttccgctgttccggagaagcctcttggtctttatgatccttcctatgataaagactcttgtggtgttggttttgtagcagagttgtccggcgagaccacccgcaaaacggtactgttttgaatcttctcatgtgatgtgatcattgacatatatgatttgattgatcgatgacatgttgttgctgattttaggtgactgattcgttggagatgttgatacggatgactcatagaggtgcttgtggttgtgagagcaacactggtgacggcgctgggattcttgttggtctgcctcatgatttctatgcagaggtttgttttgttctgttatctccagattaatttattgtccatgcaataagatttctgacaggatctgaacttatgtaatgttattttattgtttctggttctgttgttgttaattaagttttaaaactgttgatgtttttgtctattaggctgcgacagagcttggctttgtacttccttctgctggaaattatgctgttggtatgttcttcttgccaactgttgaaagcaggagagaagaaagcaagaatgttttcactaaggttgctgaatcacttggccactcggttcttggatggagattagtgcctaccgataattctggactgggaaactccgctttgcagactgaaccgattattgcgcaagttttccttactcctacaactaaatctaaagctgactttgagcaacaggtaattgttttgcattgaaaatttattcatgtatcattaacactgggagatgatgttaatgattacctttgtttttgatagatgtatatccttagaagggtttctatggttgctattcgagctgcgttgaaccttcaacatggtgcgatgaaggacttctacatctgttcgttgtcttctaggtatttagctatttcaattaagaatgacatgtttgtctcaagtactgaaaagttaacctaacgaattgtttttcgccatttaggcctatcgtctacaaaggacaattgaagcctgatcaactaaaggactattactttgcggatcttgggagtgaaaggtttacgagctacatggccctggtaaatattttttctattcactatctctttttttatgctgactccatgctccaccaacagcatgtgaaccaacggggtaaccgaggagatgcgaagttgaggaatgacttctgaggcctcttaagttcctccaaaaccttgataagtattttaatttggatgctggtgagttggtaacgtcaagtgagtccagaaactcgttgcccttgatatgtatgataagttatcttaggctaaatgatcacaatctggtgattaagactaaaattttgttggttaaggtagttagcaattctgcaacattagaacttgcccccaactatatgctgttgaagttgtgtctaagaccaagtggtaaagttttcagttgcatacatacacattttaatgtttgataactaatgattgactatactcggttacatgtttaatgattcaggttcattctcggttctctaccaatacatttcccagctgggatcgtgctcagccgatgcgtgttttgggccacaatggggagatcaatacactcaggggaaacgtgaactggtatgttgtcagagatagcttacattaaagctttcatgtaatttaagtaacctgtttggtgccttagcatttgtgtgataaaaatgccctttggtatgcaagtgcctaagaagtagagtctgcctcattttcattttaattactgcgttctctagtgaattttgttttgatatttcatcacaggatgagggcacgtgagggtctgctcaagtgcaatgaacttggattatcaaagaaagagttgaagaagcttctacctattgtggacgttagctcttctgactcaggtaactctcaatctcattatatgcccgtacaatgtgttgaagttgaactaactgtagatcacaactttgcctatgatattatggacctgtgacacgtttctatattgtgttgttaacatttttaggtgcttttgatggtgttcttgagcttcttgtccgagctggtagaagtcttcctgaagctgttatgatgatgatccctgaagcatggcaaaatgacaaaaacattgatccaagcaggaaagagttttatgaatacttatctgctctaatggagccatgggatggacctgccctcatatcatgtaaattatatcctgaagttaacacacaaccataactttatattttattttttagattgtaactcttttattgaatgtcttgcagtcactgatggtcgctacttgggtgccacattggaccgtaatggacttcgtcctggtaggttctacataacccacagtggaagggttatcatggctagtgaagttggggtagtggatgtaccacctgaagatgtgatgaggaaaggaagacttaacccgggtatgatgcttcttgtcgattttgagaagcatattgttgttgatgacgatgccttgaagcagcagtattcactggcaaggccttatggtgagtggcttaaaaggcaaaagattgaacttaaagacatcattgagtcagttccggaggctgaacggattgctccttcaatttctggggttgtaccggtaagctgtcgctaaagaattattgttcccctaattactcttcgttacctttattatggttagttaacctttttcttggaaactaaagcctctaatgatgatgactcaatggagagcatgggcattcatggtttattgtctc

SEQ ID NO: 30364 - DNA, 3292 bp, Arabidopsis thaliana landsberg
  unsure (1)..(3292): unsure at all n locations
aaggcacgcataaccaaataatctaaaaaatctagttgagactctgtttggttccattcgacgttgttgtttttcggttctttagtttttacccaggatggatccgtaattgggtacaataatttaatatatttacaaggatattgaagccatttaccacactaagcattccaagaatacataagcaaagagagtaaatatggtatcatccaaagaatgaccaaaaagaagactggaacaaccaaccaaaaatgcaagaactgtatgctaataacacacataaaacattgattttcaacaaaactaacattgtttcaatagtaaacgagcaaacaaacaataaatgacgaagaaaaaaacatacaaatgtccctgtcttttagaacataacctaagagactctttctatgatattactttacctattaacatacaaaaactggattttgtattattgtatataaatgtactagagtagagagagtcaagaagctccaaatctgacaagtatgatcgcaaactacagttcctagaatcgaaaaaatattgaaaatagagttttaaatatggtactaaaacagaaaacttggtaaggagatcaagaaagatccattgcatatcctagaatataacatactaatcatcaatgtatgatgcatgattcgagaatggcatttcacatgtttgaactcataaaccaaaggtttagagaatacgcgatacaaatactacctaatttacactattggagtctcttttacgtttaaaataactgtcgtttgggacaaaatcacattatattatgtgcttgagaggattacgggttttgacccaaaacgtaagtggtaaccttcaggattacggtttttgttaggtcttcgcagcgaacgcgttttgcttaacggttactaattactcgattgaccgttgatccatcagatacaccaaccggacggtcctgaatcgtccacgttttgcggttaatgttaggcctactagattaaagtgaggcccaatacggcccattaattcaaaattcaaattttaaaccccaactttctttctactacgctccgtcttctccatctctgcgaaattcttaccgttgtttctctccttcgtcaatggcgaattcaaacacatacctaaccacaccgactaaaaccccatcttcaaggagaaaccaacagagtcaatctaagatgcaatctcactccaaggatccgataaacgcagaatctaggtcacgnnnnnnnnnnnnnnnnnnnnntcaagcagcagccgtggctttcggagagaaacttccgataccggagattgtagccattggtggtcaatcagacggcaaaagctctcttctcgaagcacttttagggttccgattcaatgtccgtgaagttgtaatgggcactcgacgccctttgattctccagatggttcatgatttatcagcgttagaaccacggtgtcgattccaggtaaatcaaacctagacgattttgtaattcgttacttctgcttttgatttagatttctaggattttttttgttgaattggcgattttgattactgatttggtaagtttgattggtaggatgaagattctgaagaatatggaagtccaattgtttcggctacagcagtagcagatgtaattaggtctagaacagaggcacttttgaagaagacgaaaactgcagtctcgccaaagccgattgtgatgagagctgagtatgctcattgtccaaatctgactatcattgatactcctggttttgttctcaaggtagtagctttttctcgttttttgtcaatctgtgtcaaagtttgtcaattgcatagtttctaattcttgtgtgtgagcaggctaagaaaggagagcctgaaactacccctgatgaaattctgtcaatggttaagtcactggctagtcctccacatcgtattctcttgttccttcagcagagtagtgtggagtggtgctcatccttgtggttagatgctgttcgtgagattgattcaagctttcggaggactattgttgttgtgtccaagtttgataatcgccttaaggtacaaaaatctttaactacaatcaattagttttcatttagttcacatatactgcagtttgtcctctatccggggtactcttaaatgctgtgacaatcaagagtggagatgaactactttgtttggatttagtcttaatttgtttatccaacacttgcaggaatttagtgatcgcggtgaagttgatcgttatctgagtgctagcggataccttggggagaacactcgtccttatttcgtggcattaccaaaagacaggagcactatctcaaatgatgaatttcgccgacaaatatctcaggtggacactgaagttataaggcatttacgggagggagttaagggaggatttgatgaagaaaaattccggtcctgtattggttttgggtctttaagagatttcttagagtctgagctgcagaagagatacaaagaagctgcaccagcaacactagctttgcttgaagaacgctgctctgaggtaaccgatgatatgctgagaatggatatgaaaatccaagctacttctgatgttgctcatctcagaaaagcggcaatgctatacactgcttctattagcaatcatgtggtgagttgtttgtaacagacagttattgttgcaccatttttaagactaacaatgatacatactttgaaatgtttacattaacctgctgtatgttttgctcttgtttcaaaagggagctttgattgatggagctgcaaatccagcacctgaacaatgggggaaaacaactgaagaagaacgtggcgaaagtggcattggaagctggccaggtgtaagtgtggatatcaagccacccaatgccgttcttaaactctatggaggagctgcttttgaaagagtgattcatgaattccgttgtgcagcctactcaatcgagtgccctccagtgtcaagagagaaggtacacttcaccttttctcagtaaatagcattttctactttttcatagaaatgaaaaagctaaacaagtagcctgaattgagcaggtagcaaacattctgcttgctcatgctgggcgtggaggtggtagaggagtaacagaagcttcagcagaaattgctcgaaccgctgcacggtcatggcttgctcctcttcttgacacagcctgcgacagacttgcctttgtattaggaagtctctttgaaattgctctagaaagaaacctgaaccaaaactcagaatgtaaggac

SEQ ID NO: 30365 - DNA, 3570 bp, Arabidopsis thaliana landsberg
atccgatttagtattatataataatcgaaatccatccatataaacaacaagaaacgaaactttagggtcaagctaaattaggctttcacttccttaacttgctacccacggaatataaattgaaccatatcctttactagaactgtcactaaccctatcaaagatctctcttccaaatcatcaatggacgaattagggtttactgaatcatgctcatccagagaagaatttaaccccgtctcccacaagaatgcacccactgcaaattcttttttgcaggacaagttaccgatatctgtaggcagaccatagagtttgagaagtcgatcgagttcttcctccgacataatgtcgtactgttcctttgtgtaattcgggtactgaagaggcatttgaaacgaagacggtgacgaagaaccaaacaagctggcgaattggtcgctttcattgtccgatgatgaattagatgtttttttgccgacgacatctatattttcgacatagtcattgttgaagttttgtagttcgtcacggaagataatactgagttttgaaaccttttccattgtttcaatgaaattctaaaatttgaccttctactaagaagaaattacttaagctgatatatatgcagttaaaaataaatggaaattttactttttcgactaaatttaacaaaggaaattttcttatttttacataatgatacgaaaatgttataattacaattaaaagaatatacgtactaacatttgttaattagttatattcttcattaataaagattttattttgattgatatcttagaacgaaaaagtaaaagtcaaacaatatttttgtgaaacggggaatgttaaacaaacatcacaagataattttagacatcaatgaaaaaagtgttggaaaactcttacgtatcacacaaatccattttttaaaaagcatgccttatgtattaaagagaaattgaacaaattctcatctaatcatacagaaaccaaaccaacaaacaaactggtcgataaacaaaaatccataacaagaaagacgagaatgagaagagttttaaggtctcaacatcagacatttctttctaggttggtcttggagttgcccattcaaccctgaggatgaggttatcataaccataaccattcaatttgttgattgctctttgagcgtcttctctgctcacgaaattgacgaaaccaaatcctctgctcactccagttttctgatcaatggccacatagacacgtgtgacagctccaaacggatggaacagctccatcaagtcaggttcacgggtatcctcggacagattggttacacgcacagagttctcatcgttcctcctcctcatgtctgaacccacagcgcttctgtctgcacctgctctcatgctaggcgggacatacgcggccttgccagttccaggtgcagcggacatggtagatgattcccctgtgggtggcttgtcaatgaagacatcggttggtgcagctagatccttgtatggacattttgatgtccagtgatctcctttcttgtggcatatcctgcacaccatgagaactgcaccacctttacccagctgagacaagccatctcctgttgcctttgattcatccgctttggtacctgaagtatcacacaccgttaagatacacacaattacacaaagaatgaaagatagttgtgaaccaatggccaactcatagtcaactttaaaatgatacagtaatgcatagccacagaatcaaacatagcaacctatgtctgcactataagccactgattaacatcatctttgatggctatctatacaactagtcattcacctatcaatagattgatcacgaaagccctagtaacattatcaaggaacttaaactttgcccgtttacaaaccatttgacattggttcattgaaacacaagatcatggtgactcctacatcaatctaattttttcatcaaggtaataacacaaaaggagacaacatgtcacaggacaaaatttttaacaatcgaaactaaagcttccaaacatcaaatgggagacaacatgtcacaggagaaaagctttaacaatcgaaactaaagcttcctaacatcaagtaggagaccaatgaaaagctgcaacatctatgtgtacagttagcagccacaaaagtgagagcacatttcagctcgtactcaggaatggactacaaacaataaactgctatcggtgacatactgaccaatcacacaaacaagtagcctcacggctaacatgtgattcgctaattggtcaccttaacccaatagtattagactaaacaataaaactaatgaatcaaacaatgaattggacagcaatcccaagttagaacatatcacaaacaacatctttctaggtgagtctagaaacttattcacacaattagcacagccataagactgaacattttaccaactcaattagatcaaagtgcacaaatttataattttaactccaaattcaatacgaaccaataaccccacgaatctcaacaaacaaaaatcaccagaatcatcatcatcatcagagggagagaatttaccaggagctcggggtcgttcgagaaggatctcttcggtagaaaccatagtgagatggctaccagcttcctcattggctgcgtctccgaacttaggccagttcctcctctccatggctcgtttgttgagtcgagcagaagctagcttgcggacacgtgtcctagtcgttatcttaaccttatttccttcatcgttgaatttgtactcgatcgtcgtcttcaaaccattctcatctggaccaatcacctgcttgggagggagcaagaaatccagatcgtcgtcttcgtccatttccccccatctgaatttgctcgttttttgctgcgaatcgatcgtcatcgtcactcgtttgggattcagatgcgccgcttttgcttcgatcgtaacctaaaactgaagaagaagacgaagaagaagaagcacttttagggtttcctatcttatctgtgtgtgctccgtaaccggaacgcaccgttttgattccttcagaattttacttggtccagtagcaattttaatgtgaagaaattcaatttttaaaattctaatatctacaaaaagctgtgtccaggcccgctccactaagcctcttaccctcttctaggaattaatttagactctcttatgttttttgggcttttcgttataacacttatttacaggattgattcttcttttaaaagaactactgattccacaagcgaagcccacatgttttggcgttttgtctaccaaaattttaaaacacaattgataaagcactgtactgttctatctcaaatccaaaaactatacgtagaaaaagccaatgaaagattttgtaaaactgaatcacttacacactttatagactgaaagagtattcgaagtgctctaagaagacaacactatattctgccttgtagttctagtcaactaactagaacaaagagccgcatctgtaaccagaccagtggccttataatttactagcttactacggaa

SEQ ID NO: 30366 - DNA, 2930 bp, Arabidopsis thaliana landsberg
caaaaaatgactttatctgctgcaacaagccatagccaaaaacaatacaaaaccaatatacagtagttttttttttttttttgtcgtaaccaatatagttttattaaggaaaagaaaagtaatcatagccaaaaaaaggaattattacaaggtaacgacaaaaaacgtagttgaaaaaggaaaacaaaaaagcatataaaggcccaatctttgtaattgcattggaaaggcccaaacccaacaacatagaacactgtcttctctactaagtaacaaaaatcaacgaagcggtaattcttgaacagacaaagaaaaaaaaaaggtgaatacttgaaatatataaaagatacagaagacacgagaagggagaagagatcgatgattttgagaagcgaattagatgcatgaggttggttttccgttggatctctctgtcttcactcgccttatagcgactctatttttcctcgccgttggtgttttttactttctcaaaaacaccgccgctaagtacttcgacatcggagccgccgccgccggaggtttcgacagggacttcatggcggttgatgctgaggattgctctgtctgtgggaatttttccaccaagaaatgctcccgctgcaaatccgttcgatactggtatgccctcaaattcagtctctttgttgggatcatctcgagcttagcgtaattgaaagattgatttagtttgcttgctttgagcttgcgatgtgtaattcttttcaattttcaaagtcttgagcttttcaatagaagaatcatgggtttggaagttgttgcttagatacttttgtgaacttaatttgtatgagctcagatagtttggattatcttggtgtttcttcccgcggctttgctccgagttttcgctagtgttcaattgatgtttgagctgtgatgttgtttctttattttctgtagatttctttgttcagctacttgttttctttgtaacttctctcacaaattcgaaaatggtataaatttttcacattgttacccaaaaaaataaaattggttttagtgcatattttcgaaattgagtatctttgtctgaatggtctgtttgctatcagctcagcagagtgccaaaggtcagattggagttcgggtcatcaaagaaactgcagggattatgggattactacattaacaccatctgcaaagaatggcataaggttcagagcttctccattcggggatagttccgcgtctagtaatgcactcatttccgaacggggccaaaacaagagtagtctcaagccaagagaagtaatgtgtcttctttttcctcatgttgacactctcttgatagagtctttgtgttaacttgtacttttgttttgcatcttctgcaggttctttttccatatgaagaatttgttgaatattttaactgggacaatccagaattggctccctgtgggctcatgaattgtggaaataggtttgtgttcatctactttctagtatatcttaacagtatcagttgaaggaatggattttttttttctcccttgaatatgatcttctttactcctctttcagttgtttcgccaatgtgattctacaatgcctttcctggacacgtcctcttgttgcatatctgctggagaaaggccacaagagagaatgtaaaacttctttcttttcatttttgcactaatgcttcaaactctttcgtttgtggttttctgtattcgctttagctttgattctacgttttgtttgacaggtatgcgcaacgattggtgcttcctctgtgaatttcaaacccatgttgagagagcgagtcaaagtcggttccctttttcaccaatgaacattatttcacggttaactaatattggtggaactcttggatatggaagacaggaggatgctcatgagttcatgaggtcagtatctcttgctcatgaaaatagctaattcctagtggtgtttagtctgtgaatctcccaactgatggatttatacaactcacatactgcaggtatgcgattgatatgatgcagtctgtttgccttgatgaattcggtggagaaaaaatagtgcctcctcgttcacaagaaacaacacttattcagtatatatttggaggtctccttcaatcacaggtgatatttcctgatctaaatatcagatgtccatctattaaggcaagcgagcaatagatgaaattccactctctagaattattgggatcttacgaaattccatgttatacatatacatgttagaattcaacatgctacttattttgtctttagctggctgcctccattgagaatatatgtaacttgatttcagttgataaaaacgatcaagatccttcctgtgataaacttacattaacttctaatgttcctctgtgtgtggagctttttccctgatttgctgcattttcaaatttccaggttcaatgtactgtttgcaatcatgtttctgaccaatatgaaaatatgatggatctaatcgttgagatgcatggggatgcggggtctttggaggaatgtcttgatcaatttacagccgaagagtggcttcatggagataatatgtacaaatgtgataggtataaaagctatgtttcttaagcaatgtgttagttgattagttgacaaattgactaagtttcttaaacccgatactattctttctgtccaggtgtagtgactatgtaaaagcatgtaagcgtcttacgattcgacgcgctccaaatattcttactattgccttaaaaagatatcaggtatttgtggcattcccctaccttttgctagattcttcttggaagaagttgtctttaaaatacatctgtgaaattattatgcacaccgaggagatacggaaaattgaacaaaaaaataagttttcccgagacattggatcttaatccttacata

SEQ ID NO: 30367 - DNA, 3601 bp, Arabidopsis thaliana landsberg
cagataaattgccacctgcgcctaacagccgataaaagtctcatctacgatatatacatcatgagcttaatcatccagaatagtcagatgctctaagctaactgtatcttgttcttagtttcagggacaaagagtttttgttgtcagtaacttcaagctctaagctatggctgtcaccaagatttatattgtgtgagtctttaaagtttaaactaatcagtgccaagttaaacaactggcgatcaatttcccgatcaagagtaatctgcgattttatactactgactcacacaggacgagattgaatcctcgtaccagtttggttttgacgaaaaattgggttcttggacttttctgttaggtactattccttgcacggccacgtcgagacaatggcacgagaggtacttcggggagtaaactctgttccagacgtggaagcaacactttggcaagtgccagagacattaccggagaaaatattggagaaagtgaaggccgttccaagaccggacgatgtgccggatattcgaccagaacaactggcggaagccgacggattcatgtttggctttccttctaggtttggagtgatggcatcacaggtcatgactttctttgacaatacaaatgatctctggactacacaggctctcgctgggaaacctgcaggaatcttctggagtacagggtttccactggtggaggccaagaactaactgcgtaagaacatagtcctcctaacacataaatgttagaagaacacatgcaagtgattcatttgtaatctgcaggttgacggcagtgacaaaactggctcatcacgggatgatatttgtaccggtaggatacacattcggtaaaagtatgtacgagatgggagaggtgaaaggtggttcgccttatggctcagggacttatgcagctgatggatcacgcgagccaacagagctggagattcagcaggcaaattaccatggcaagtactttgcaggaatagccaagaaactcaagaaacggtctcctgtctaaattctaaaccatatcaactctgtgtttcctatactaaacaatctgtaaatgtaaaggtgaacactgaaaataagatcgacatatacagagcaaaacaccggtgtgtaagctaatggtcaataaatcacattttccattagattctagctacaacttagaaaccattcttcaatgtagagcattaccacttggatatcaatatgaacaatccctatttatcctctacatcattatggtatttacttacttgatctctcacttggaacttctacgatcttcgtgaccccacccggtattggcagctctctgttcatataaagaatcaatacaaaatcaataagaagagcatgttgattcaaatgttatatatatctgagaagaatgttctttcttacattttcatcgtgagaaaatttgcaagaatctccacgagtacactcctttctctgaaaagctctgcaaacaccacggagcttctctcttcttctgcttcgtctcttcatcttcctcttctctctttaagtatttaccacaatgctccacttttattatccttcccaacaccttagctccattgatattatctaacaattaagagaagaatcgaaaccaagagaagcaagaaccaatgtgtagtaatatccataaagcaaaaggattttatagactaaccaacagcaagattagtacttctctgatcttcataagcaacaaacgcaaatctttttgatctcccagttcctttatctcgaacaagattcacatcaacaacttcaccaatcttcaatcaaacaaatatttcagaattaagaatcatccactagctaggtataatatactaaattcaacaatgtgagaagaaacacgtactgtgagaaaacggcgaggaggtcaccctccgtgagatcgtaaggtaattctccgacgtaaacgtaggctgaatctttgtacttggcgtgccaagatgcttcgtcgtaaatccctagatctaattctttcgcgttaatgctctgcgtcttcttcaccttgtcaacggattcatcgctgactcaattttctctcggagtaaaaccctaactccgaacggcaagtatagtcagtcgccggagacgcgtaatagaattgtgcgggtcgggttatgttggctgaatcatgggtcggtttggttacgacagaattttgtgggccgggttacgttatattataccgaacaatgggtcggtttgcttttatttttgattttatacagtgaaccggatcaccaactttttcccccatttctttttgtttattgatcacctactttccaagtaaataaccaatcaccaatttgagtttccaagtaaataaccaatcactgtgagaaaaattgttagacaagttttttttttaagaaaagagttgaattttgcaagattttctgatatccaaatgagattatactgtaagtgaaacactcttcttgatgaggaggtttaagttcataaattgctaactatacatgagcttcttgaagctttacgagatagaaggaaaccaaagcaaaatgcagaaaaagcacgtagtaagtggaaccttcccaagataatggtgaagaaagtgactgattactactacttgtactaactctaatacatatacaaaacaagtcctccttttccccaagtatacagataaagatttaccagaaccggttttccgccttcatctcacatggaaatcgtaaggagaagacgcatacacttgatctggaaccactagtggtaacttctcaatgtacataaacaatcgtttctggttctctctagcgattgcagtgagattcactgtatcgttttggtccaaaaacatccagagatcacctgaatctactcttttaaggctgtctctgcagaacgggcatgactgtgatctccctcgcctaagaaaaaacataactcttattcagtaaacccgttacattcaacatgtttcaagcttttaagttaacttaccaatcgcggtaacacttgatgcataaagaatgagtacagtttggtagcaccaccttgctgttcatctccatacagattccacattcttcttccctctcgatctcaatctccgacatttcgctctcatccttctttctgtatcgcatcttgcatacctctttttgtttgctgtcatctatgtctgtaacacccctttgtagttgtgacaaagatggtaatatcacagctaaaacataacgaaaatattaaaaagctcataagaattaaacgatatcaatcttgtttaccagaaataatatcatcgccatatatataagcataccttggaactctctaatactggcttttctttcgtaaaccgacatggttgttttcccatctgcataagtctgaacccaaatataactcaacaggttaatcaaacaatcacaaagaagagtatgaagaaggatgtagtaagtaaaacaaagaggacagtaccatataaataagaactctgagtaaaccgaggaaaccagcaagcttacaatcaatccattgtacaagaaaaagaaaaaattgagcagtcgggctgt

SEQ ID NO: 30368 - DNA, 4683 bp, Arabidopsis thaliana landsberg
  unsure (1)..(4683): unsure at all n locations
attttaatgaaaaggcctaaactaaatttaggtttctaaggacatgaagttctcataatgatcagacactgtcacactaatcttttgggctcgcttaagcttgcaaacaggcagtccttcaattatgacatttctcatgctattcttctccaaattgtaatagaaaagagaaaaaggatcagtcaattctttcggaaccagacaaatctcgccggtataaaatgtatccatgatgttgaagtcaaggccatcagcagattggggcaaataaaaagtgttcatagaccattcctctttctcagcatcttccacaacccacattcgaaaactaccttgacgagcattctcaaccacaccgatttttcctttgtagttgatcagagttttatctgtaagattcctccacctctcagcaagccacatattttcataacccattggtagaactttgcttggtacattgatgattttgaacgtttcaagcctaacatcaaaactcacaattatagaattgttattccggggatcgatatccgtcctagacgccccgtagtacagggtaccgttcatatagagccccgaggtatgagaaacatgaggacatgcaacacatggagcctctctccaagcttcttctcttcccaataacagaatcttgtgctccattctcaaatgaaaacgatcaattgcgagcactttgtattgatcttcaatagaatcgtacccaacaaaataattggggcatgtaaaaagttttggatcttctttgtacttgagttggggaaaaaactgaagctgccttgtgctagggttacaaatccccatacttagtctacttatgcagatcaagccccgaaccgcattatacactagtttcccattaattttaaagacgttcagatctttataaggtacacaacatgaagaagaggaagaggaagaggaagatacgtatgggttaggcaacgagactaacataagctttttaccgtgaaagtcctgaaaagcaatgagaagacgtggaggagctgaggaagatgtaatgttcaagtgctgttttttgaaatattggctggtggtgatagaggaccaaagcttggagaacgcaccgtatctcaataaagacttcacaggcaatcttaaaagtgtactgatctgaagatcgagaggaatgtaaatcggtcccggatgtgcacagaggatcgagtttcttcgctttaacctttttcgcttccctttcttagccaaaaatttcttttggtggatgcgcaataaccgtaaacgcaacttcattgtcttcttcgggcgtttcgaacgctattctagggaaacctaacttaacctaattggagttttagaatttttctttatatatatcaaaattgaacatattcactaggcctgggcataatacccggaaccgaatacccgaactgaaaaacccgaaaaataaccaaaccgaacccgaacccgacttttagaattatccgaatgggttctccacttcactacccgaaaaaatccgaaccgaacccgaactgaatctaatatccgtgggtacccgaatacaaatgtaaagttaaaaatattagttatatatatatatatttgtaatacctcaaacacccaaaattaaaattataaatccgaatatactagattttttagtaattcatatgcatttggatatatttgggataaaaataaccaatgttatagttttttttaggtaatttaagtattttggttacatttggttatatttggataaaagtaaccaatatatttttggataatcgggtattttgggtagatttgggtatatataagtaaaatacccgaacccaaccagaacccgaaaatattttgggtagttttgattacttttgcatttttactaaaataatcgaaccgacccgaacccgaacttgaaccaaaccgaatttttagaataccctaatggttctcgactttctatccgaatagaccagatactcgaaaaaaagaaccgaacgggtacgggtacctgaatgtccaggcctaaattattattatgagacattggtcaaatttcccgtctttttcgcctctttaggtaacactcgagtaacattgtttgtatagtcagtaacatctcccaagcaaccgttctggacttaatactgcagggtcaagttgaatctgatggtggcaggcaattggatcttaacaattatatatttatggtataactctcgctttcgtatcaattctgatgatcctttactcttacatatcctatgattcactccggtttatttttgtggtggtgcaagagatggaaagagcaatactttgtaaatgttggcacagattgtggactaacaatagctagattttactacgtatgcttctcctgcagcgacggatccatcagcgcgcggtttctattatgatccaaacagcaggttagtccaagatcttcctcgtatctacaaactatataatctggggctgtttgagataaaaccctgatgatctgttgttccagaagctggagctgccatctgctaacgaaggcagatctgtctagagctctacttattacgagctgcaatgatgattgctaccaaaatcatcagacagcgccatatgatactctcgcctaaacatgcaatgcacgtgatccagtacattatgacgtcttaattattataaactcaatatagtaattattattatacaaatagttataataattattagaaggtgatgaaagtcttaagtgatctcttcagttcaacaagatatggaaatagttaaaatgtataatataattattagaatatacaaaataatagttttcaataaaataaaatttcaaaaaacaaaaaggcaaaaaatttattattagcattttatatgtaaattatattattatattaaacaacagaacataaaatttccaaaagtctgaaaaaataaaatttaaacaaataggaaaagattattaatggaaaatttctctcagctttttaaggtaactattataagattgttctctcaattttttaaatggttttcagacgcataaatttatcagatttttagagagtttttgataattgtatttgttaggacgcttttctttcgattgcatgtcggaagagattgggcagcagatggttcataccatggcggtgagacaagatgtttagaccatctccatcagtaaaaataaggaaagtttctaaaaaaaaaaaaaattaatattttaatcaaaacagatacattaattattatttaatagttgaactaatagtgtgattacacctgtccatattggatgagaatagtttctcaaagtttctcctccgagaaacttaactctccttctctcctactttttctcctttctctcatactttttttttttaattttttttcttgttgggtatctcattgagatacttccaatggagatgctcttatgattctctcattttctttggattctctcattttactcgaattcggagttgactaaagcaattacggcacatccttagaaattccccaaatcacaaaccttagatcctcaaaaccaatttttgatttcttctctctacttctacatattcactcctcttctttgaattatttcttcttcttcgaattcgaagtaatatctcgtctctacgtcgattgatggcaccgaaaaagaagaacttgtgcttcaattggcttagtcaaagagaatttataattaaattgaaaatttaacataaaattgaggatttaaatcaccagatctatagttcctgatttannnnnnnnnnnnnnnnnnnnnnnnnnnnnaaatgatatttttccccattttaacacctaagtagaacatttataaatattgaccagcctactaatctaagtccaggcccattagtattaggagatccgcgagacaaaaaagtagtaaataactagattccaaatttaccctccaaaccacaacgactctttcgagtttcgagctaaacactcctctctctctccgccacttcactatcacatcccacctaccaacaatgatacccgtaaccgccactcttatccgccaccgtctccggcacttacgccaccgcattcgattcaaatccacctctatttctcctttccatttaccactcaaccaccctacctacttaatttggtcagccaacacttctctcggcaaaaccctcgtctctacaggcatcgccgcctctttcctcctccagcaaccttcatcttccgccacaaaactcctctatttgaaacctattcagaccggcttcccttccgattccgattctcgtttcgtcttctccaagctcgattccctctccctccgtcgccaaatccctatttcaatctccaactctgtcctccattcttcactccccgccgcaaaatctctgggattgaatgttgaagtcagcgagagtgggatgtgctctttgaatttccgggatgagaaaaccgtcactggagcaccggaacttttatgcaagacgttgtatgcttgggaagcagctatatctccgcatttagctgcggagagagaaaacgcgacggtcgaggactccgtcgtgttacagatgattgaaaagtgtttgaaggaagagatggaatgtgggagttaaagccagaaatcggatttactat

SEQ ID NO: 30369 - DNA, 1939 bp, Arabidopsis thaliana landsberg
  unsure (1)..(1939): unsure at all n locations
atcaggcggcaacatattgattgatttcaaatttgaagcaaaggtacgatttatctttctttcttttttaagtttccattaagacattgtgattatatgtaacttggtacgattattttcgtcaggaaacctttgtgttttgtgtctttattctatcttttaggttgctgattttggtctcgccaagattgctttggatacaaacactcatgtatctacacgtgttatgggaacctttgggtaaagatcatcttgaatctactaaatatgtacatttatgctcattttgtacttatttttgtgatccttatatcatcgtagaaattactgaaacttatggttatgggattttaggtatttggctccggaatatgctgcaagtggaaagcttactgaaaagtctgatgtttactcattcggcgttgtacttttggagctaataacgngacgtcgccctgttgatgcaaacaatgtctatgcggatgacagcttggttgattgggtaataaatataactgcaaataatttagccttcacatgattttaccatttgactgttgaaaatgatgcaaatgctacgtgtgcatggaagtaggcacgaccattgcttgtacaagcacttgaagaaagtaactttgaaggtttggctgatataaagctgaataatgagtatgatagagaagagatggctcgcatggttgcttgtgctgcagcttgtgtccgctatacagctcgccgaagacctcgcatggaccaggtaacttaattagtctttaattttcttagcaaaaaaaaaaaaactgtctttgttttaggggttgacatttggtttttcagttttgaaatatgtaaacggtagaaccaaaatatgttcagtttttgttttggttggttatgaatacaaaaattaccaagacataaatcagattttagttttaaccaatatttatatatcttataataaaatatatttatagtatagagctagtgtataccaaaaatatgattttgattttggtcattttggttggttcggtgtttatgcctatatgtattttgttgtatacatagtataatatatttaaacaacattacttgaataaaactgacatgaccgaaaagtggggcacatgtcttcctagccggaatgttttgttcagtttgcaaaataggagtcaattaagatgttaataatgcgaacggctaattggtgtaaaaaaatgagcaggttgtgcgtgtgctataaggaaacatatcgccgtcagatctgaatcaagggataacacccggtcacagcaatgtatacagttcatagaggaagcacatattatgatacgagaacaatgtagacgtacacgaggaagtttcggataaaattggggcacggtgggcgagtacagtaatccaactagtgactatagactgtatccgtccggctggacgctcgagcagtgagggtcaagccacacggggaaatggattcgagatggggaagatttaaaagaactgctcaacgttatggtggagattctctttaaaaaaagagggaaaaagatgcatggcttttttgcattttgtaaaactgtaatgatttgatatttgagaaaatatattaagtctgatgtaattgaaccaacatctatatgttacattttttattttttttggtgtctttctctaggggttgtaatgtactcaagattgaggttggatattattctctcattcttttctattttctctgttatgggtttgatgctgaaatgttgaatatcagtattgggatttcttcttgattttgattgttcttgttggaacttttcctgcagcattgaagatacatatgtatcatagtaaaaaacaacacacaattgattttgtttattattcgttttgattatttggagcaattgataaacatgttttggatgtgatggtg

SEQ ID NO: 30370 - DNA, 1587 bp, Arabidopsis thaliana landsberg
  unsure (1)..(1587): unsure at all n locations
tcatcttctctttctccttcttctttcttccttcttccttcatcttcgcagcttctccttaatccaatgtttcttacaaaaaaaaaatctaatatcccaaaatttcttattatacaatcctccattgattcaagaatactaaaccctaagatgatactatataggcaacccaagcaaaaaaaataaacagttttttgagattttagatgtgtacatagtgaatcagcttctttcatcttcgattgcgtttacaaaaactaaaccctatgagaactagtacatagtgaacccaaggagaaaattaaaagaattgtgaagattcattttcttcctcctttatttccatcaaattctgaatctcgtgtcgttttcataaaacatttgagcactaacaaatccgaagcctacgggcctatgttgagcctaacatactttatgtacatgccgtagctggaaacatgcgccacctgatagtcgaggcttgtattgcaagaaacatactggatatgtcggcttattcgtggcctggctatgttaatggccgaatcaaccaaatacctcagagtctgccgaatgaagtaccctgctggtcatcatttgtgaaaggggctccactaaatgccgcaatggtgaatacattagtttcagttcctgcttcaaggtagaatgagttattatcttctttttgtttctttttgctctattagctccacactacttcatccacatagtcttccctccaaatcatacagtcagtggtaatttaaaattactatacaaaattaagctacggagtttcaaagtcgtaacctaaggaaaccattgccacaatgagaatagtggttgcattctagtttgacttaagttctgcttcttcttcagttattcctttttgtttcttagccaggtaatgctctttttttaatttaccgagagtaaagcaactgaaatacctcatggatttgatggaagcttagcagagctcgagaaactatttgaggttgcagtcaaaggatcggatgacgagaagatatctgctgctacagttctttgcggggcatctctcacacggggttggaacatacnnnnnnnnnnnnnnnnnnnnnnnnagaatctccaccagtgagaattttcggttgaacagacatgtttgatttatctatctttcttcgatgtacaggaacacactgttgaatatcttacaagattactatccccacccgttccagcagattattccagggctgaaaatcatttgattggttatgcctgcatgttgaatgttgttattgttgggataggatctgttgacagcattcaaattttctctttacatggcatggtatgtaaattgtacttccaagtttactagacttaatagtgaatttgctgaaagatgtaatgtacgattttgatggctactttttaggttccgcaacttgcttgctcactaatgccaatttgtgaagagtttggatcttacaccccgagtgtatcatggactcttccttctggagaagcaatatcagcatattctgttttctcaaatgcattcactcttcttttaaagctatggagattcatcat

SEQ ID NO: 30371 - DNA, 923 bp, Arabidopsis thaliana landsberg
  unsure (1)..(923): unsure at all n locations
tgatgctacctggtgaagagggcctataggataaactggaatttgtagctgttgctgcagacgagacatagattagctctctagacagctcgctgtgttgattatcaccgaggaagctgtccgtttgtcaactgtattcctatacagctccatcatgctttctaatgatgcccaatgtgaaaccggaaagtctttgcatctcaggggatgaaactctggtactagctcgttttgttgtcctttgggttctgcaaaaaggtcaagaaccatgctgttacagattatagaaaccagcaagaatagaagacagagaattcaagagtacctttcaagggagtcaggatactgtttgcataaagtttgtcgaatgcagagcggcaaacaaaagccgtggcacttgtggtgctgaaaatgacgtttggaagcttaaactctttggctgcagcttcagcaaagtacatgaactcgtcgtagatgacacatgcgatctcttcttccggtttaagtggtttttgcagcaacaagtgacctaaacactccttgaagctaaactcgcactctttattgagtttaagaagaaaccaaactggtcctagattcttaagatccgaggctggtaagctctctgggatggtgataaactgannnnnnnnnnnnnnnnnnnnnnnnnnnnnnnnnnngaacttggtttgagcaactgtaatggagaaaccctttaagtgaagggctcttgcaagttgcatcatcggagatatgtgtccttgtgctggagcgggaatcaacacgatccttctcctcctctcttgcttttcctccatttccaaattcctatttctctctctctaaatctctttatttttttttttttccggttgttttctttgcagctacaagaaaaggactccaataatccaatagtaata

SEQ ID NO: 30372 - DNA, 837 bp, Arabidopsis thaliana landsberg
aaccactgggcttttcataaacaagtttagtgagcttttcaatgaatatttaagggcttattgtaagtaaaaccctaatttgtatacactcttctacgctatcttccattcttcctccagctatcatatcaaaaacaatgagaaagaaaatgatgatttccgatcttccacacgatttggaatcggaaatactctctagggttccggcgaagtccctagcaaaatggaagactacttgcaaacgatggtaagctttattcagagatccgagattcgtcaagaagaactttgataaagcaggaggaagggaaatgatagtactgatgaattcgagggtttattcaaacagcttcaatctccaagggattaacaatagagttgatccaactatggaggttacaggtaaactcatcaagctaaatgattcaaaaggtgtcgatatttctgctatctttcactgcgacgggttgatattatgcactacgacggaaagcactggacttgtggtttggaacccgtgtaccggtgaaattagatgtatcaaacccagaatattttaccggtgtaatgataggtatgctcttggttacggaaacagcaaatcttcttgccatagctacaaaatcttgaggtcttgctgttattacgtcgaccagaacctcagcctcatggctgctgagtttgagatctatgactttagcactgattcttggagagatcttggtgacatcactcgtgacatgatcgtatattccagtggcgtgtctttgaaaggaaatacttactgggtttctggcatctaaagaaaaaggttttttcatgcaaaattaaaatttt

SEQ ID NO: 30373 - DNA, 3455 bp, Arabidopsis thaliana landsberg
tataaattcattttaaacgaatgccttttacaaaaggtagactaaaaaaggcttttcacggtttgtttctgtatggtggcattatgattcagatatgcaaatttctgttattattatcaatcttttaatttaaagtgcaatcttgggtgatggtattggtctagattttctatttttttttgtttactttgaaattagcatgccctcctttttcctctatatattgtccctctttagtaaaaaataacaataaaactgctacacgtaacttaattatttgcaattttgcatctttacctttacaaaatttattgatatcatcaaaaatcatatacattgagaaggttttaacacaaaattgttatatgtttattattaagtaagcttgcttccaacaattttatcaaaatgtttcaacaaattttacgtataagtttttttggtaggcacaaattttacgtataagttttatacaataaagaattaagaatggtcaacttttgtaattgaaatatataaattcataaggacaggtaaaattggaaagcgtttaacgttcgcttaacgtacaataatagaccgttgcagtctgcaattgaaagaatctaggacaaagaaataaaagagtcacagggtaataaactaaacgaacaaatactttagggagaaaaatgaaaccaattaaaagttttaagtactaacatcagaggtctaatcataaaattttaaagattattcgattaaaacgtaataaaacataaagatcagggacttccgacaaaaatctttcgatccacttacacttccacaacgtccgttcgaaaaatatgaccgttgaaagtaattaaattgttttaaaaacaaaaacaaaataactcctctcttcttcttcttcaatctctctgttcttcccaaaaataaaaactttcctcagtaaaaaaaaacaagagacagagagagagagagaaagatgggttgtgtttcttcgaaactaggcaagaagaaactcataagagagattagagtcaacaatggcggcgatcacattgtctctcttacttcaactacttatggtcatctcgatctcgatgaacgagcagagacctctcctaagtcactggaagttactaaaggcgaagtctttgaatctgaaatcataccgagaagatctattaagagagatgatccggagattatcaatacttgggagcttatggaagatcttgaagattcaatgcacgtttctaatccacagaagattagtcccaaatctcgtggtattttcggtaaatcatggaagactccggtgaaatcggttgttgaatctccgaagagaggaagtagtaagagatttggagggaaagagaataattcgagaggtgtgagtccgaatcagattctgaagccgaagaacattcttgaaacaccgaagagaggtgtaatgcgtttgagttttcctcttaaatctgaagaatcttcggtgacggttacgcagaggaggaagagttatagtccaatgtttgatccagatcttgtggcttcttacgaaagagagttgtctcaagagaaagaacagatcaagatggtgatttctccggtggtgcacgagagcagaaaaacagagaaaacagagagaattcttgagaagttcccagagaaatgtccaccgggaggagagcactctgtggtgatctacataacaactcttagagggataaggaagacgtttgaggattgtaatgtggtaagatcgatattagattcacacgaagttcgattctcagagcgagatgtgtcgatgcactcggtttttaaggaagagatcaggggcattatgggaacgaaacatgtgaagatacctgcggtattcgttaaagggaggatggtaggaagtgttgaggaagtgatgaagttagaagaggagggcaaattgggaattttacttgaaggtattccggcggcgaggcttggaggcagttgctgccgtggatgtggaggaatgagatttatgatgtgtgttgtttgcaatggaagctgcaaggttagggaggaagagaagaagagtatggttaagtgtttggagtgtaatgagaatggtttggttctatgtccaatttgttcttaaaaaaagagaatcagttttgccctaattttattggttaaattggggaaaattgacttaataattctggaggctgacttttgaagggttgattttggtttgtaatgatttggtgagagagagtttctaaagccgtgttcagtgctcttggtgtgtactactactagtttaatggaatttgtttctaatgtttgtaaacctttttcatttttaagattcaattcaattcaatgggtatcattcattaagaatttgtcaccagatttgtttaatttagattctcattaggtgtttagcttcttcactgaataattaagatagtatcaatgattttaaggactttgggctacgattattttgttagtgcacttgtctctcaagatatctaaaactgatggatgaaatagcttttgacttattaaaccggtatagtatataacttggcaaccttgttcagttgttcatgatagttttatacttttatatttagtcaaggaaggagaaatattaggagagtcatacttggtttctttatctttgtgaagtttagttttccccttaataggttaatatgatcgttatcatgcagtcaaaaaataagaattaagaataatgaccgttgtctttacaagaattaattttatctgaatcaatcagttattaattttcctagatttggtgaacaccagtacaccaccaacccagtagaactaatttataaatgggctaatataaagttatagaggatgggtaattccaaggcccaagcacacctacaagtccgattgattccagatcttacagcatgttgataaaaattaaacttctcccattcatgtatctcaatatctcatcttggaatattaagagtttaagaccaaatttcaaaacatttggattgaacccaaaacagtgcctagattttatctgaatcaatccgttacaaggatgttttggtctcatcatccaatagaagcaattagtgaactaatttgcatgacaactaaaattgttttttgttctatgcagagccacaggtatggggtggggtaaactatatcgtgacgaaccggatattattataaatagaaaatttgcgatcatcctatcctaaccagattaggcgacgctaaccatacagaacgttggaacaatctgccagcgaggcacacatggcaatgcgcttcacccattatacctatccatttccaccttgacaattcatatgacaccaccacatttatatatcactttatcacgttgcctattatagactacaatgttaatatccagctcgtgacctcataaaacacaccatacgaatgcgtttatg

SEQ ID NO: 30374 - DNA, 2305 bp, Arabidopsis thaliana landsberg
  unsure (1)..(2305): unsure at all n locations
ttttttcgggtggtaactttattattcacattctctcgtgattctcgtgcaggcaactagctttctacaccggtcctacatgtacgttttctttaccaactatacttattccaatctacaaacgttatttacttattttatcagtagaaactcatttattttttgtgtgttttttgaaccgcagtgggtggtctattgaacgcaacgtgtggaaacgcgactgaattgataatcgcgattcttgctttgaccaataacggagtcgcagtggtcaaatattcgctgctaggttcgattttgtcgaaccttttattggttctagggacttcactcttctgtggaggaatcgctaatatccgaagggaacagcggttcgaccgggtatgacttcccttttaacttcggttcaactttaatttcaaaaccaataatattttttttagttaagataattgaaccgggaatgaaataggttttgtacggctagtgttaaccaggattttgtttaaaagtttagcttgataaacaagcaagtggtatgtttgaaccaaattttaataacggatatgctaaacgaaatcaatttgtgtggtcattgttgcagaaacaagccgatgtgaacttcttcttacttctactgggtttcttgtgtcacttgctgccattgttggtgggatacttgaaaaacggagaggcttcggctgctgttttgtccgacatgcaactgagtatatcgcgaggcttcagtattgttatgttgatcagctacattgcatatcttgttttccaactgtggactcaccgccaattgttcgatgcacaagaacaggtaactgaaatatatacacacaagataacagaagaatgttatatagtagcgatatatattattgtattctaatggatctttgatacaaaatttggtacaggaagatgagtatgatgacgatgtggagcaagaaaccgcggtgattagtttttggagcggttttgcatggttggttgggatgacactcgttatcgcattgctatcggagtatgttgtagccacgattgaggtaactcttttgaattccacattgaaactgacatgatcaactaaaacattatagtaaatacacttatcgccaattggttttgagttggaaacatgctcgctaatataacgttaactttgtttaggaagcatcggataaatggaacttatcagtgagtttcataagcatcatattgcttcctattgttggaaatgcagctgaacatgctggagccgttatttttgcctttaagatctattttgtaagttcgattttattccttaaaattatgggcttttaatcgatcccgagatctattatataatgacacaatgcaagaacttatatcaatccaaataatttctaggacatatctttgggagttgcattaggctctgcgactcagattggcttattcgttgtccccttgaccatcatcgtggcgtggattttgggaattaatatggatctcaattttggtcccctcgaaactggctgtcttgctgtttccataatcatcacagccttcacattacaggttaagcatttttcgacacgttacaaaattattaatccactagacaaattaatggatgatccaagtattgagggttaaatatttttgttatgttttgtggttctttaggatgggagttctcactacatgaagggactagtcctcttgctttgctatttcattattgccatctgtttcttcgtcgacaaacttccccagagtgagttagttttcaaatgtatatgcatgctattattagggaaaacaataattgaggcatacaacacccatatatcaaatggaaatgcttcatcaaataaagttaaaacgggttaaataggttcccccaattatatttatttattaactaagttttaacataaataaatgcttttctttatgacgagtctctttactaatttttgagtaatattttaataactaaagtaaaatagtaataaaacttatattttatttttttaattcaaaaacaaacaaaaattataattttacagtcaaaaactgcataactgttgcttccgccaaaaccgaaaaataacattttccgtttaaactgcgaaattctgttttatgtgattgtaactnttattgaaaagtttgtgaaactacatangctagtgaaaaataaatatccctggaaactaagagaaaatgttgaaattctcgaaaaaataacaactctcactaaaaacatttggtcttcacgttcattgtttttcacaaaaaaaaa

SEQ ID NO: 30375 - DNA, 3545 bp, Arabidopsis thaliana landsberg
atcctgaccggcccaaatacaaacgataatgattaactagaaaggtcatccttatcaaacttgtgtttaaagcaaaacgttttacctgtaaagtgaaggctgtgatgataatggccaaagctagagagctagtttcaaggatgttaaagttgagatccatttttattcccaggatccacgcaacgataacactcaatgggacctgatgaaacacacacattaacattgccttagatttcttatattgcacgcaacatttgtcatctttcagatttcaacataatataaaaggcgaagaagaacttaccacgaacaaagaaatctgagttgcagagcccaacgcaacccctagagatatgtcctgtagttataattaaccattccacaaaaatagatttcaggcagtgttacatgttggagttttataagatatttttgcaacaattttttttttcaatgctaaatattgtgggttcatttggaagaaattcacactaaacataaaaccaaacacaaacaaagaatacttgtaaagcaagaaaaaagaaaactcacgagcttgttcttgagtgcgaaaatgatggctccagcatgctcagccgcattcccaacaatgggaagcaatatgatgcttatgaaactcactgatagtccccatgagtccgatgcatcctgaccaacatgaaacctccttattaatcttgtgagtttctttctttctttttcatgttgggattcaaacgtatatcgacataatcagtacctcgatcgtgtccacaacatactctgatagcaatgcgatgactattgtcatcccaacgagccaagcaaatccgctccagaatcctatcactggagtttcttcaacactaacctcatcatcatatgcatcatcatcatcctagataccaataaaattgattatagatacattttattcgcatgaaaacatgacgtaactcttaggtacctgttgtgcctcaaacaattgacggtgagtccagagctggaagatgagataagcaatgtaagcaataagcataactatgctgcttgtccgcgacagagtgagcgacattttgttaatcatagaggtcgatacttcgccggttgctgcatattttaacaataatggcagcaaatgacacaacaggcccataagcagcaagaagaagttcacatcggcttgtttctgtaacacaatcaagaagagaaacatcacataaccatctttgattaccggaatgattatttatatccggttcaagtcaacacgatttacttagggttacaaaccggtttggtttggttccaaatacaatttgtatccatgtttcccggttaggttatgttaagttaccatataaaataaaataaaaccggagggtgtatatgtatgtacccggtcgaaccgctgctcgcggcggatattggcgataccaccaaagaagagggaagtgccaagaaccaagagaaggtttgagagaattgaacccaatagagagtatttcaccactgccactttgttattggccaacgctagtatcgcgattatcagctctgtcgcgtttccacaagtcgcgttcaacaaaccgcccactgccaaagtaaacattaattaggagatgtatgttatttgattcggagatcatattatatgataaaataatgtgtttcgtatgaaaaggttacctgttcgaccagtgtagaaagctagttgcctgcaagaataaaaaagacgatcatgttctattttcttaacaagggagtataaaattcgtttctaatacaataacgcttttatcaaattattttgtagaaaagtctaagtgtgtaactcttttttctgttaaagaaacaaaagatttagctatttaacatcgtttcgaaatttcaaaagaatcttaaaagtgatgatcattcagtcaacacttggaaatgtcaattacttttttctagccacgcctctaaaacaaacttgaggcaacacatgtgtgggggccagaataaaatggtaatactatgaaatatctcgtagttatcctatagaaaatttgtgggacgataataacttactctgtcaaaaagctaactcgctcagctagaggtgtcagccctatcaagctcagtccaaatatcaacggctgtcacatattttcacaaaaataaaaatattttagagcagtctttctttacctttctcgacgaatatttggtaacggataactacgtgtcagaaatgcaccggactccgaaaaacacaaatcattaattttgtactgacaaaaaatagttatcaaacacgggatttatgcttgtagagatatgatgatcaagtgaatatatgtatctaggaagtttgttttagcgtaagaagaacaagtgattttgtacttagctactgtttcagtatagtgcaattaactaaaatctaaacactccaacaaagttgtcttcattatttttttaaatccataaaattggttgggaaattcgtatccccttcaactaaaatcctaaaaggaagtcataaggacactgaacaagaattgcctaatttcactaccaaacctcaccaacacaaacaaaattagagaaagagagaaggaattgagaagataacttacacgaccgtagttgtaagaattggcaagaatggcgagagggatggcgagaaataagagagtaagcttagtaccaagaatgacttcttgaagattagagagaatgttcttgagagttttgcatggaactttctgaaccaatctcaggtctgatttcttccttagcgacgatgaagacatgttgtgtgctgttctcccatgtcgcagctccctgctcgagcctttcgcggtcacgtttgcgtttccgttctcggcgattgctgcccatggctccacgatacttcccatgttttaagacgttttgattctactacatctgtttgtgttgcgtcaggttttttatatataggtggcgactacgtgttattgttttggtttatgttgggtccatctatgtatgcagcttcccggaagtttcctttttgtttttttctgtatttaagaaataatttcttttggtaggtttttgctttggtttgacgaaaatcatattttggtaggtttgtttaaatacgcaactctcatatcctctctatttagggaaatttgtattgagtaatcaactagtaatagataactaataagtgagacgacacaaaatttgagggtacctagataaatgggcgttcgtacgactattgtattgaggaaggtactagactactagttagttgattctctagaaagggtaacttgattctatagattgacgagtaagaaaaaaagttacagttagataattgtattcaattcaaaatgaagataaataaagtttttcaagagtcagaattgaacacttttgattggtatccgactatccgtttgtgatcttagttgatttcgtactctagctagtacataacataataaatataatatatcattttgagcgacattttttggttttattagaaaagttgt

SEQ ID NO: 30376 - DNA, 2421 bp, Arabidopsis thaliana landsberg
  unsure (1)..(2421): unsure at all n locations
tatgcgtcgaaatgaaatggagcatcgggaaagtgacgtttgttgggttcgagaacgtggagatcgtgataacgtacgaggttaggacaagtgagagattgaggagtcctagaatctctcttataaagacggtttcggacaatgatgatccgaggtttctaagtgtggaggtttctaaactgtcgttacttgttgggaagaagttcgaaatgagactgagattgacttgaagaagtatataaagtataaaacaatattgatgggaaattgtggatgcttaatgaataaggagtgaagaagaacatttagtaaagaaaagatttcatgatttttataaactccaaatcacatagatttgatttttttttttctatttttgagaaacaaatgtgacacaattaatactagtggattaaatttcnnnnnnnnnnnnnnnnnnnnnnnnnnnntaataaaactttaaaggaaaccaaatcagaaagaaaaaaatgaacgtcagatatgattccgatataacccaaaaagtctacgctacaacagagcagcggtctagtctaacgcaaaatccgtttcgtcgtcttcctcgcttttcctttcaatctcctccttctccattaatcatctctttctctctctcacggattcgtaagttaatctcagtgcttctccgtcatcttcgcattattggttcttcctttttccctgtaagctcgacacgtggattattcctctgctttttttgttttcccttttcgtgaagattcgtttcctgtatctccgtgaagacttgatggagttagtttcttaaagtagctccttcttagatccgagtttcgatttgcttcactggtgaagaattagtgattgattcaactagatactatcgatttcgttggatttgtactgaaaacttggctgattttgttgattctgtcttgctggtgaagtctcaagctacttcgtgattagaggaggagatctggatttctagttttagcaattcatttgacttccgagttttccagaatcattgaagtgttaggcttacttgattcagattcagaacatagctttagataacgttagaagcagaatcagaatctgcaaatcggctctttagattgctgctactagaaatttgaaattagcttttggtagtgttaaggatgcagaataggattgtacagttggaagaaggaaaagaaaatggaatcacagttcgatcagggcattataaaggatttccatcgaaactgctacttctgctagggttgtttcttacattttctgttactgtcttcatcattagtgtatctactatcaagtatactggaatacaaagtgtagtaaccacagtcacttcaagctttgtgccatgccgtgagggggaaccgaatagtttgagtaaatggatacaacctcctgcggttttgatgcataacnnnnnnnnnnnnnnnnnnctttggcgtgcttctttttggcctcgtagaaaagaatatccgtttaaacgggttccaaaggttgcgtttatgttcttgactaaaggccccttaccgcttgcttcgctttgggagaggttcttgaagggtcacaaagggctttactcggtttaccttcatccacacccttcttttacagccaagtttccagctagctctgttttccaccggaggcaaattccaagccaggtctgcttctgcttcttctaatcatctttctgtttcattgacaccaattacatatagtatgagaaaatgaatctcttggatcaaatttggtttctttagaagcctttttggcatattgccttgacagccttgtcagatgtgatgtagtcattcctattgaaatatagaactcttcattgagtgattcgttgggattaccagttgcaataagtatcagaaaatgtagctcttgaatcaaacttggtttcttaagtagtcttttgttcaagcagtttttctgatcacttctaagctagttggtaatgtaacttgatttgattgtaatttggatcatctgcattattgcgcaggttgcagaatgggggagaatgtccatgtgcgatgcagagaagcggcttcttgccaacgccctgcttgatgtgtccaacgaatggtttgttctcgtctcagagtcatgcattccactctacaacttcacaaccatttacagctacttaagccgatcaaaacacagcttcatgggtgcttttgatgaccctggaccgtttgggcgtggccgctacaacgggaacatggaacctgaagttccccttaccaaatggcgaaaagggtctcaatggtttgaggttaaccgggacctggcagctaccattgtcaaagacacattgtattacccgaaattcaaagagttctgcaggcctgcttgctatgtggacgagcagggatcctctag

SEQ ID NO: 30377 - DNA, 2621 bp, Arabidopsis thaliana landsberg
gactttcaacagatcacatacatcatttgaacattgttgattcacctaaaatgtttcttccacaacatcagaatcacaaacaatccaccataaactcaactgataggtctcagtaacagcttcaagataaagaaataaaacagactgaatttaaaccaactataagtttccagattccttcaagcacgagacccttcaataggacaagccttgggtgtaaatttacagtaaaaagctcattcctttttcaaaaaagcattttaaacaccaaaacagaatgcttgaacccaattacatcagcaacagagcatttaggacaagccatgaatataattcttcttttggcagcgagaggtcctaggttctattcaaagaatgcccttcacttagttttaaggataagacctaattaccagctcaaaagtcaaaattatagaatacagagacatttccgtattagattttaacctagggaagctaagagagacgaaaactaagcaacacacacttccatagcagtaaagagcgaatacgtacccaaaagagtagaagaaaacgcatcacgcgccagtgcgccactgattctctaaactccgcgaaacctcacgcaaaatacgaaatttatcccacatttcaggtagactcaatctaaatctctgtgggcgaaattttttggtttaggaatttcgtcgaacaactggtgggcgagtgcctcatgagtcagcaaataaaccggacaacgaataatccaatggatacgctcacatctgttggaaacttcgacaagccacgaccgtgaatctctatatatatagtttactaaaccgaaactgcatcaaaataaattaattcaatctggtttaactaaaccgaaactgcgtcaaaacaacggaaccaattaaattctgcgtcaaaacaacggcaccaattaagaattctcgcgtcaaatttcttctatatattaaaattaaaccctaaaaggtcgcttatcattgctccgtctttgcttcgcggtggtggcaatgactacttcttcttcttttcttcgtcttcctcatcgaatctggtttctccttcctcttattgtctttctcttgttatcctacgcggcggcgctcaaaagtgttggtcccggcgagccagctctgaatattagccttaggtcgtgcgagcgaatccaagtttcaggctattcgagaaccaaattagggaaattcgctaactctctcagagtaaacttagtaccaatcccagaaaagctacacctcaaaatccaagtttgtgttcaccgaaatgctacacttggaatgtgccactgtgagaaatctaattggaaaaatctccagagcagctctgttatatcaccatatgataaacaatacattgatgtgagattcactggtagtgaatatcagtcgtctcgttcaatgattacggtcaatgttacagaagagtttcatcaatggcggattttttgtcttgtagcgggattgattgtgattttgttagcacctgttgttagcagttggctaccgttttactatacgagttctatggcggttggtgtttttctcgttgttttgattattatcttccaggttatgaggttattacctactgggaggaagaatgttatgtatcttgcgttttatggatctgttgttggtgctggatctttcattctacatcaattctcaatgatggtgaatatgattcttgttaattttgggttgagtgaggatatgtataatccggtagcgatacttatgcttgttggggtggttattactggagctgcttttggattttggactgtgaggaagtttgttgtttcgaaagatggaggaggtgtggatgctagtgttgcacagtttgtgaaatgggctatgcgttctgttgctgctacgtttattttgcagagtagtcttgatactcctatggccatgggagcttttgttttagctagcttgtttggttttcttgttagtaaaacgaaaagctttgtagggaaaagtcattggttggtttctgctggtgagagacgtccgatattgcatggacgagctgagttccttagtcgccctggaggtggtggactgtggaagagtgctaagagtgtaccttcgtattccggctctccttcttatgatgtgattgtgagctcaccgtcttcagttaaccggaggataccgatcggaaatcaggattactattctacattccatacgacgccaaaccggaagaggatgtcgaagagagagtatgacgagttgacacaagaaacgacacgagaagcaatggcaggacttgcagcttctccaggatttagtgattggttagttgagcatgctgacagaatcaagttgcttcccactgatagtagctatgatgacgaattgggtagtgaatcagattcaaccggtgaacaatcttggacacgtttcttctggtagagcatagacaccttcgaggcaactcttaattacttgcacgacgcatacggcttatcattcattaacttggcattaatcagaagatgtaatgtttttatagctttcagagtgtttaggagatagatagagttatgtttaggggttagaatcaatctttgtataatcaca

SEQ ID NO: 30378 - DNA, 1175 bp, Arabidopsis thaliana landsberg
gcactttctatgaacacaagttttccgcgcattaatcttcacgtcttgcataaacctacgccaatcttctagagcctcttttaacatactaagcccaacaacaaagaccaaaggagcaatcatgctccacttgttgaatggtgatagaggaaacaccgagagaatcgcagctaccaagaagtagagattcgcagcacggtggaactgctcgtacaacgacttaggaaagaaagtgatcaaattgtacctcgtcgtagagacataattagaacgatatctcaaaggtttcttcttgtgcatatgaggctgattacagaacacagtccggctgaaacccggaccttggattggttgagaatcttgaccttcaagcgtagctggcctaagacatccaaatgtataaagaaggcttagtcgcagcttcgatcttattctacctcgagccattccacaagaacttctctatgatcttttaacaaaatccagcactttatttcctcaagaatcagattagtgcttcatatctcatagtcctgtagaaaaatgaaccaaacccatgtagtaaaatttcgaaagcttgatctttcagaaacataataaaatggcagagaagactgaaacaaagaagcataaatttcggaagctcgtcacataattttaaacacaaaaattattaaacacaaaacatactcaaaattggtcaacagactcgaatctgaatgatatcaaatcaataaaattttaaaattgcaaatctatcaaagatgttgactttacgaaacccagagaggaaaatgaatttaccaaacaccaattatttcaaacacatttgccttcttatgactatttgaaatcatgaattgattcttaaattaagatagataaggattaagcaggaggtgatgaagaacacgcaaacgcaatttgacagctgtaaaaaaacaaaagctgagacaagatcccagaacccaacaacaagtcaagcacaatggaaaaccccaaaacgaagagaaaatttcagacaggtttagtggagatttgtcggagaagtagagaatcaggagacaaaccaggaatcaaaccagagattctgtggataacatgacaaactaacataaacccatttgagtgaagaaactgattgattcgcctagaatttgtcggcaaggtagcta

SEQ ID NO: 30379 - DNA, 1209 bp, Arabidopsis thaliana landsberg
ctggttacaagtcaaagttccagttttatcggaaaggattgtgtcaacttgtcccagctcttcatttaaattcgatgtacgtgcttgagctggagtcccactctcgctgtcatacatctgcaagtcttggtttatgaaagttgcctgcaaaacttttacgagctcgatggaaacatacaatgagatgggaatcaagtacccataaagcaagacagcagtgatcagatggacgacccaagcgtgaaaaggatttcttggatttgttaaccgctcaggcttatccggtcgtaagtaccaccaatctcccatatgcatttttgtcatcactgcaaaacccaatgagctgatgaaggagacaagcacaaggagggcaaagagagtatatataatgtagtccattctcttctcgattctgcttctctttgaaggggattttgttgaattctgcatgactttggtgtcatggccagtaaaaaccaccaccccatagacataagacgtgttcctgagctttgagtctctcaagagaatctggctaggatcaagcggataaacctgaccgtcatattcaagatttccaacaaaggtatagaggttaggattgggatcttcacatttgatagttccggagaaactctggaaagtatcatcccgttccaaaggcaaagtaacatccaaacatcttttcactttcaagttggtttcaccatctaagttcatcgtctccacataacagatcccatcctcataactagatgacaataagagcaaatcagcagggaaaaattgatccttttccacctttacaacatcccctacacgtaacttcttccacttcctacgaccaaaatcaccatcccctctgtgaacagtagctttcctcgaattcaccttcacatcctgcataaacctccgccaatcctccaacgcctctttacccatactaagcccaaccacaaaaatcaaaggagcgatcatactccatttgttgaatggggagagaggaaagacagagagaatagcagcaacgaggaagtagaaattggcaacacggtggaactgctcatacaagcatttgggcaagaaagtaatgagattatacctagtggtggacacataatttgaagtgtacctaaggactttagccaaatgcaaatgaggttggttacaatgaacaattctcgtgtatccaggtccattaatgatatg

SEQ ID NO: 30380 - DNA, 863 bp, Arabidopsis thaliana landsberg
atatgcatttcgtgaatctgctgactagatgatcaaaattatacatgttttttttacattgaactcctttataacacagaaccatttgatttacttttttaggtgtatggtttctatgacgaatgccagaggaagtatggtaacgctaatgcgtggcgatattgcacagatgtttttgactatattaccctgtcagatattatagatggcacagtcagtgatttcttatcaactcggcattgttgatgagaacacatatagctgtttgttatactaaaatagtttgctttgtctaggctctatgtgttcacggtggcctttccccggatgtccggacaattgatcaggttaaactctgcttttattgcttgtggctctcacccgtcaattatgctactagcttggcatgtattaacgtcctccactcacatagatttgctgtgggctctagataagactgatcgagcgaaattgcgaaattcctcatgaagggcccttttgcgatcttatgtggagtgatcctgaagatattgaaacatgggcggttagtccacgtggagctggttggcttttcggatccagggttaccactgaggtatgtttactttctcaaaagcttgaattgatactgtaactaagaaattaatttcacatctctgatctttggttctggcttcttgtgcagtttaaccatatcaacaagctggatgtagtatgccgcgcgcaccaacttgtacaagaaggtcttaagtacatgttccaagataaagcccttgtaactgtgagtgtcctgcttctaatgaataaatatttattattagtgggcgttttgaaactctgcttagtgattggtaattttcgtt

SEQ ID NO: 30381 - DNA, 4750 bp, Arabidopsis thaliana landsberg
  unsure (1)..(4750): unsure at all n locations
cccgatcttccattcctgagcagattgagagataatatgttcacatgactcagggtccatccaaatcaaacaaagagcttatcctaaattgaaggtaaacctctatttggtgagtttccaaaatgagcaaacctctcgtggtaagtctctcagacaagagaaaatcgaaatcaagaacctttagacgtacttgtccctgaagaaattgggttatttggttatgaaagaaattggttctgatttaaaccggaaaaagaaatttggttcggtttggtttagagagagaagaaataaactaaaatatttcccgtgaatatgagcgagcaatcaatgagaacagcttttcactcaaaagcacactcccccatcaaagtttcttgcttttcgtctctttccactgttttagattttcatttcaatcatcttttgtttctttatcagcttttatatatgcttcttcttacagatctctcagactctctcttcttcttcttcaaactataatggcgtcttctaagcataataaactctgttctttcttttatctttgcctcttcttgactttagttgcagctgctgagcctcaaacagaatctcttctcactttaaaatctcaactcaccgacaatttcaacagcttaaaagactggttcatcaacactcctgaagtttccgacaatcttgtcgcttgttgttcttggtctggtgtccgatgtaaccaaaactcaacttctgttgtctccgtcgatctctcttccaagaatctcgctgggagtttatcaggcaaggagttcctcgtcttcaccgaactccttgaactcaacatcagtgacaactcgttttccggcgagtttcctgctgagatcttcttcaacatgaccaatctcagaagccttgacattagcagaaacaacttctccggacgtttccctgacggtggtgactcaagtctcaagaatctgatctttctcgacgccttgagcaatagcttctccggtccattaccgatccatctctctcagttagagaatctcaaggtactgaatctcgctgggagttacttcactggctcgattccgagtcagtacggatctttcaagaatcttgagtttcttcatcttggtgggaatttactaagtggtcacatacctcaagagcttgggaatctcacaactttgactcacatggagattggatataactcatatgaaggagtaatcccttgggaaataggttacatgagtgagctcaagtacctcgacattgctggagctaatctctctggcttcttaccaaagcatttcagcaatctcacaaagcttgaatctttgtttctctttaggaaccatctttctagagaaatcccatgggagcttggagaaattacttctcttgttaacttagacctctcagacaaccatatctctggaaccataccagagagtttttcaggtttgaagaatctcaggcttttgaatcttatgttcaatgaaatgagtgggactctccctgaagtaattgctcagctaccttctttggatactctcttcatatggaacaattacttctctgggtcacttcccaaaagcttggggatgaattcaaagcttagatgggtggacgtttccaccaacagtttccaaggtgaaatcccacaaggtatttgctcaagaggtgttcttttcaagctcattcttttctccaataacttcactggaactctgtctccatctctctcaaattgttcaacgcttgttcgtatccggcttgaagataattcattctcaggtgtgatcccttttagctttagcgagattcctgatatctcatacatagacctctctagaagcaaactcacaggaggtattcctttagatatatccaaagctacaaaacttgactacttcaatatctccaataaccctgagctaggaggcaaacttccaccgcatatttggtctgcgcctagtcttcagaacttnnnnnnnnnnnnnnnnnnnnnnnnnnnnngtctccctgtgtttgaatcctgcaaatctatcactgttattgaattgagcaataacaatatatcagggatgttaacaccaactgtttccacttgtggctctcttaagaagatggatttgtcacacaataacttgagaggtgccataccatctgacaaagtgtttcaatcaatggggaaacatgcgtacgagagtaatgcaaacctatgtgggcttcctctgaagtcatgttcagcttacagctcaaggaagcttgtgtctgttctggtagcttgtctagtctctattctgctaatggtagttgcagctttggcattgtactatattcgtcaaagaagtcaaggacaatggaagatggtgtctttcgcgggactccctcatttcacagcagatgatgttttgaggagctttggttcacccgaacctagtgaagcagttccagcttcagtgagcaaagcagttctgccaacaggaataacagtcatagtgagaaaaattgagttgcatgacaagaagaagagtgttgtcctgaacgttttaacgcagatggggaatgcaagacatgtaaatctggtcagattgctcgggttttgttacaacaatcatcttgtgtatgtgttgtatgataataacctgcataccgggacgactctagctgagaaaatgaagacaaagaagaaagattggcaaactaagaagaggatcatcactggtgttgctaagggactttgctttcttcaccatgaatgtttgcctgcaattcctcatggagatgtgaagtcgtctaatatattattcgatgacgataagatagagccctgcttgggtgaatttgggttcaaatacatgctacatttgaacacaggtacttaccatgaaacacaaaatctcttagtacatcatcctttgtttttcctaacattagactctctaaagcagatcagatgaacgatgttataagagtggagaagcaaaaggacgtctacaactttggacaacttattttggaaatcttaacaaatggtaagctgatgaatgccggtggattgatgatacagaacaagccaaaggatggtcttctaagagaagtatacacagaaaacgaagtgagttcaagtgattttaaacaaggagaagttaaaagagttgttgaggtcgcacttctctgcataagaagtgaccagtctgaccgtccttgcatggaagatgcactcaggtaattgtctgaagcagagaataggttcaaataggtaataaggctaaatttctgaatgcacatagtgtctcttcccctatagatatagtaacagggaatccttatatagtattgtattgtaccaaaacgttctctttatttctttaaacgacaggtgtgacttgttagttattttccggatcattgtgttataatgttgttcttgtattactatacattcaacaaaggtatggtctctctgcagttttgatatatatgtataagtttgtcatctaaatgaaatgaagattccaaattcttagatttatatactgacttaccttgtttattatgcgtacgaggacaatgcaaacctctgtgggcttcctctgaaatcatgttcagcttacagctcaagaagcttgtgtctgttctagtagcttgtcttgtctctattctgctaatggtagttgcagctttggccctgtactatatccgttggctaagtcacacttgtagaccacaccagagtgagaaagctagtaaagacaaagaaaacggtgttgtccttgcgctaaataaaaagcatttagctgcggcgtagtaatgttccatatatattatacaatttaaccactgactaacttagaaggtcctacaactacaacagttacattttaatcatcacatctacacaactcacacctaatacaaaaatcgtaggtactctctgtctttaaaagttacatccttcgttttccccatctttttccggtgtctaaaccaacgagccttgaagatgatggagcaggtgatggaccttctataccaacagactctggaatatccagattcccttgcattgattgcgcagatgctactagtgactgttcttgtggattgttgtcgatctgatacaattctatcctagctttcgcaacctgcaagcagtaacaagtagagtgtgttatataaattcttgcttaagatcttacttattgcaataacacacagaagagggatcattgggtcttcaccagttcaatgtgatgaattgatcctcgcgcttcagcaagtctactctgcaactcatcccatttcttcttccggaattcttcgttctccatctcgttgcctttctcacccaactgctgatacagagctgtattcaccaaacaaatcaaattttgtgctcagagctttggacatacttttaactcaattctattttgacaaaactctaatagtaacctgtgaagatggatagaacccatagctgagttgggatatcataaagtttctttgcaagtgtaagagaggaacgcaggatctccctggcttgtacggtgtcgtgcaaggaaagagctaaatttcccaggagtgtcaaatactgtgcaactagctgcaggttacccatatgattatgagcgatctgcaaacccttggcaagacggtttctgcatttatatcatacataacattgggagcataaataatattttcacatactatgaatttagtgaatattcttgaaatagttttttct

SEQ ID NO: 30382 - DNA, 3387 bp, Arabidopsis thaliana landsberg
  unsure (1)..(3387): unsure at all n locations
tatcctcatatcacctacctccggttatctctcgccagatacatctccttggttttgaaaatgcctgttagaatcttctcttcgttagcagctccatagtatatcatcaacgaggtcagtttctcaccatacatgtctctatgggctttcgctgactctataaagctctcaaagccagcttcttcaagtgtcacatcataagctaccgtgtcctcgctctcagcttctggctttctctgtgctagagagctcttcacagcacggtatagtttcccaaacacagactcagagatgtatgttggtttctcaaaccgttccagaaaatcagggaactctctgggctttaaggcataaggcatctcagctggagctccagtttttgcaaaatcaacagccctagagtgaagatttgctaactctagacacttctggctccgggctttttcagggtcacggtctgcgtgaaccaaatgtgcagttgagatcaccccaagcgtgtcgcttatcatataatccacaaaaaatttgtggatttcctacaaagcagagtgaaagaaagagaatcagcttagctccaaagattaggaaactttcacatcatgaaagccttttcaagaaacaaacctctaacgtgacgtcatgatccattagacgaggcctgcttccagcatagtccattggagggtccatttcgctaggtataatcttctcatcccagctaacaaaaaactggtctccgtcgagatcgccaccagaacattcattttggatgtggtctgtggagtcaacaaaaaccaaggagaaacaaaccatcaactaagttgggactaagaatcagaagcatatggtttatcttatggtgcataactctaaaggattgatttattgtaccgttctcccttctgaggaaagatgatgcagtcgagatatcccttttcttcgaaatggacctcatatatagcatcaagaactctaatatctccagggtgaagacatgggtttttcgtcacgaccactttcccaataaccacagatgtttcctcatcaatcttgcgaaagtagctctgatcgcgagatttcagttccgctttagtcagggttacacgaacatacacttggccatactccaggatacccatttcatccatgcaaccgatcaagatccgtcctttcggtacaagtatcctgcatctgnnnnnnnnnnnnnnnnnnnnnnnntcgtggtgcacacgaagcatcattgagaggtaaggttctgaactcggtgcatatccttgaagcagcatcttaactagcaaattcttggaattttctccgctcaatttctgcagaacattaagtgctgcatcgcggtcttcaagcatattcccaagcatagataaatgcaccgcttgcatcgcctcaaacattgcatcttctattccaagggtcgacaaaaggcaaatgatctcccggtttaagaagcaaggcatcgactctgtccacctggtaacgttcagcatcctgttgttcgagtcaaatttaagcatactatcacgcagagacaactttcggaaggaactgcggtcaacagcaatcacacctttgtagccaccgtatcgaatttgaaaggcagaagggacatgactcaatccacacttctgtgcaacttgcttggcaaatgcaagtgaaattttcccaatgccatccgagaagcagtaatcagcaccatcagttgtcacttcgatgtcgggaatctgctccacatcttgtgcacggacaataagtgtctgccgcgaagcactgaacaactgacccatcctagcagcacatttggaaatgcttcggattttacggaaacaacccatccattctcttatatcttccgcttttactttctcgttagaagcaaacatccagaccgaatttcctcgcagttggctcgctgaaaaagccaagaactcaaacctcttaggcccaacggtaatcccttctccaaggattgacaacaccctgttataaatgttggttctagagggcttcacaaaatagccttccttggagttcacagagagagcatttgcgggaagcttgctccaatcttcttccacaaaagtaactctcatgaaatccgagacatgctctgcaaagttcttcacaacataatttgcagtctcaagctctggacccaacagatagatctttgagggtgtaacgtatgctctctgacaactcatgatgttctgctcggtcaatcttttataagctgatgcaggggaatgcttcatcttcttaaccacagattgcatctgagtcttgacaaagaagacaggatcataacatatagaactttgctggtgaagtttcttgaggatcaccaatgcggtttccaaactcataccacgaaggattttgatcagttccatatctgacgcagcaaaaagactgattttctgcgcatgaacaagcgcattgagttggaaaaggatctcatatggaaactctaaccccaaaatggcggcattcaagaggggaacaatttgagctgcagaagcaaaggtcttcccatccacataagttagactcaaagtgtcttctcggtagtaaggtaagcccgagaaaatgtctaacatcgttgagccattgtggacttccaaacaaaagcaagttgatgtaccaattgatttcgaaccagagaaatcagttgtccgaatccatatgaaatcaaaatcctccttgcagaatctgtaccgatcagacttaaactttgtggctatgtgaggtcctgttactcttttaaataccttcggtccatatttcagctgcaacataaaacaacatgtaagctaaaagaaatcagaagagaccaagataaaacacaagcatacaaatcaatccaatctcaatctcatgcacgttcatcaaaccataaagctgtcacagaggattcaaagaaccaatacatgcataaacatatgactaaccaaaaaactcaatcttgaatcattttcacagaacctgaactcctaaataaactcaacacagactcacattgtcgcaaaacacattaggactaacaaatttaccttgagaagaaatgcatcaatctcagaagcgtcaccattaacacaacaactaagagtttcaataatatcctcaaacctaacttcaatcttataacaatcaccactttcccaaacccaaaactcaactcttctcttctcagtcaaaatccaacacctcacaccatcccatttttctagggcacaaaaccttttttcatcagactcagaaacccaacagtcaaaacgatgtcgtatagccttttccttgccatgcccggagagggatgatatcatcataagcaacagaaagtcttaggttatgggttttaaaaggagctgcttt

SEQ ID NO: 30383 - DNA, 1312 bp, Arabidopsis thaliana landsberg
tgcagacagcaacatgcttagagaatctccttctagctcttcaagatctgcaaagaaatcatctggttggtgctgatgatcatgaagctccggtctgtatggagcaatctggttatcatcatcatcatctacgttttccaactccatatcgtcccctcgttcatctttgatggcggaggatgagagggtaggaggaggagtggtggaggaaggcaagtagatggtgttttgggagccaatggatgaggagtttacgtttgcggttgagggtttggaaggattagggttagatgaggaggaggtggaggagcgtgtggagccggcgagagcgttgcgttggatgggccaaggatggttatgttcggaggtatatgtaatcaccaacatgtttggatcggttcggcttctttcgacttgctttcttgctgaacaaccttttgagctgctgcatctataataacccctgaaagcaacaatcataagtaaccatagagattagccaaatatataataaaaaaccattatgaatcactaatattcatcaagattatcatcaaaatatgagaaaatgaaggataaaactacaaaatgaagttaattaaaacggcatcattgcaaattttttctttccttttgtcattcattactttagagttaacgtaatgactgaactgtcatagtaacttatcataattagtatatgtaaacaaatgttattttcatgggtgagtatattgtatagaccaacaaaatatcacaatttgagaggagagttgtaacaacatacgaatataaaaacttgagccatgaaaaatgtggtggtgaaagaaagtttagtttcgaatcatgtgagtattatggtatgatgagttaatgtaataccttggaaaaggagagcctttgataggtttttgaccgtatttacgccaagcccatagatccgatggaaccacttctccgcttgatcggctgttcattgcagccggggccggaatacacaccaccttctttgcctgactcttcctgcatccaagtacatacatacttacaaacgtgtggtttttgatctatatacaagacacgtgtgtacattaagttatgaaagctaagtttggtagtggactagtgggacattattatcagttgggtttaagatatgatgtaacgcagttatatgttcttttaattgtgacagttcatagattctcctgcatgtgtcttcaacctcaaccctccttcttcttatgaatctaaataattatatatatagtgtctatatacacacaaattcatgattatgatattgatcctg

SEQ ID NO: 30384 - DNA, 3922 bp, Arabidopsis thaliana landsberg
aaccaaaatcaacacatcatctggttagacttcaaatatagcagcttcaatcacaacgtaaatagtaaaaaacatgatgcagttaatatggacttctcagtcactagatcaacagaaaaggtttcataatcacaaccattccattcttctagtgttaatttgatggacctcttgatttgttcctagaggcgttactgaaaggtatcataatcatcagcagatgtttcttttccagtaatttaagtgattaacagattccatagtttccaccaaaacttccagtgaaacacttgctaactagtgaagctattctaagaacataaataatgtcaaaattgggccactaatgttgtgagctcaataacttgcttttagtacactgtatcgagcttagttttcaagccccatctagtgttattttggttttgtctttataaaaagcttctaatatacactaccgacaaaatcaagtgattggatttatcattatcacccatcaaagcttcgaccgacagtctttaatggaaaacgataattccatggaagatatttatgtgatatttcgtatgaatcataatgaccacgtaagaaaatttgtgatcgagaagagaacaccacattggtcacactgtataacaataactgatcactaataaatgtctttttcggcaacgacagaatgatatcaactttagttagcctatcatcaacgtccaaatataaacttttctaacatagagcaacattattaagacaaataatatgagtattaaactccataaactaaagtggtgctgtcaaaaaaaagaaaaacttaaaagtgattagagttttatttatttattaatattcatagtgataaagagatttttatctctttcaatttatgaaatgttttcataatattttgttgtcaaatatggagtattattttattttcaataactaaaaattataatttaatgagtcgttttcacatttacgtctacaatcacaatgtatgttatttagaacattaattatagtggcttaaaaatcattaatgaaagtagataatagtatactttttctttttctttgtgtggccaacatatccattttctagtctatatatacacatatccatctcttaactcttccatccaaaaaaacaaaacaaaaaattatattcaagagaaaaaggaaaaaatgaatttcatctccgatcaggtaaagaaactctcaagctcaacaccagaggagccagaccacaacaagccagtcgaaggaaccgaaacagctacaagaccagctaccaacgccgagctcatggcaagtgccaaggttgtagctgaagctgctcaagccgcagctcgtaacgaatcagacaaactcgacaagggtaaagtcgccggagcctctgctgatatcttagacgctgccgagaaatacggtaagttcgatgaaaagagtagcactggtcagtacctcgacaaggctgaaaagtatctcaacgactacgagtcgtcacactccaccggtgctggtggtcctcctcctccgacgagtcaggctgagccagcaagtcagcctgagccggcggctaagaaagacgatgaagagtctggtggtgggcttggaggttatgccaagatggctcaaggtttcttgaagtgatttgatctttaattgttgttcatcattttcgtaataataaattaaataactagtatcgtttgtgactagtttatgttgcttcgtttatgtttatggggagtgacgagtgagtgtaataacttctggtgatcatgaatctaatccatctttgttgtgattatgcttaacttattggtgtttacaaaaccaaatcaaaaaatgatcatcctttggattcgaactcgttagattctatatcattaggtttctatgtaaaactagtgtttcatttcttaattcactcatttaatagtgaggtttctggtattgcaagtatgcaactacactactttaaaaatgtgtcaaaatacttaatcatacaacaacaagaaatggacttacagaaacagagagaatacatatatagaaattagttgcaattacaggacattggtgtatactaatcaagaatctgtcataaaacaaacgcttagagttatgaacaatcctctcagtcccacacaaaatctgattacaccgttcatgtctatattcaggcacaaaaccactcagttccacaagtgtcactcttatatctccccaaaacacagaatgacagaatctctttcaaccctaaacactgagcttgtggaacataatatcagggaatcttcttccatagataagcctgtctttaaggaccattcacttcaggcacaccacttgaacacaacctatctttaaccacatgaatgtctccatctggtgaacctcctaaccaatcctcttcttcttactagtgagtgcttcaaactctttgatattgttccctcatgtagctgcattgcctgaaaatggctctgttgctccaattttcccttaccaaacatcaccaaagtttcaaagatgatgacgtgtcgtgacatgagatgattttaagtgttttaggcaaaaataaatataaaaagaggtcaaagggaataaaatatctttcttcatgtattcaccaagctaaaaaaaataaaattagtcgatgaaaaatctctatcacaaacggttctcttatattatatctctctctatacgaaaaagttttgaaaagaatcgtactagtacagtaatcatctcatggtcacaacaaacattcccaaagttcaatatcattgtcacgtgaaaggcgcgtgtgatgatgaacgttggttacttgtagttgcagttgtagttgaagctgaaggacatcgttgtcttctaggccttcttgtcatcttaccccaacctgcaaagcttctatcttctaaacacatttcagtttcaccattgttgctttgattgctcacatgttgttgaactgagggaggaggaggagctggagctggaaccgggcaatagaccggttcagcagggattgttatggctcgtcgtggtcttcctcttgaaccggttttcttccttgttaaaccggttggagtccaagatcttcctgttgctctcatgaacccatcaaacatttgaatgtcttctgttacttcgtgtttcgaaagagacagaagtccagggagaatgtctctttggaagtctcgtctctgtttcccttttctcgcgtttcctcttctcggtctttggcttgtgaccagagcggttcctgtagtttcctccaatttgaggttttcaggaaccaatggcttaggcatatactcttgttctgagatatcaggtagttgcagggtcattgactcaaagtaatcaatatcttcgatagaacgcgattgattccttgaaaaagtatcgagctttttgtccagattctctttgtgagtatttactgtttctgcaaaccagtgaaggatgatggtttcagaaacttctgacgaagcaacaacttcaacctctctatctaggcaagctgaatagatggcaactattgtttctgctgctaatttttcaaactcaggcggtttctctagagttttttcctcaattgattttacttctgatcgcttttctccagagatattaccatcttcttcttcatcatcagactcaggaacagtttccaaatctatcataggagcctttgaattcagtcttgaactggcaggaacagagcaattttcgccttcatcatcactgcccaaaatgttcaaatcaatctgacacctattactagctgaaacccttgtctcagtctgttcctctgtttgctgatcttgatcccagagaggatcacaccgtgcgttcatgtctagcagccctaacgagaaggacctttaccttttctctaccattg

SEQ ID NO: 30385 - DNA, 1840 bp, Arabidopsis thaliana landsberg
atatacctctgccgcatcatccgtctggcgaggaggaagaggtctcgagtatccagatccgatcgaaggagacggttgcggaggaggacggcgctgagagtaaagcggcggatcacgagagaaggcggcgctgagatgagaggcgagatctacgagattggagctagggtaaatccaattttggaggtaaggaagagagacgagtccagaaggagagacattagagtgaggtcgtttgatgatcatgtcgcgtgtaggattcacgtaaacgcaaggaggatactgagggtaagattcgaggagccagatcacgacggggatgttgtagctgacgccttggaaaggcatcgggattgtaccgtcggcttggaggagaatcacggatcggccatcgttgtgtgtaaacgttgccgttttggggtcgagggaagtgtaggaagagattaggttgaggaggtgttgacggattagcgacttggtgttctcggcgtatggaagagcggaagggccacgctgggtgagtgcggaggagaggaattggtggatctcttgcatcttcgccggaggaggagccattagcaagtcaaactccgattacttgaagacgacgacagatgacgaataacgaattcttcttaattatgaataggcgaatttggttttataccggatcgaatagtttgggagaaattaatccaatttagtctaaagttttgaaaaaataatgtaaatttcttcaaagtaataaaaaaagtctgaacttcaaattccaatattctgcacctaaaccaaaactttgaccccaaagataaaagtcttaatagttgaaacttcaaaatcattctgcaaaaagaatcctaaaatcaaaaaagtaatctagttttcattcattcattctattattagctaaagaacaatctgaaaccaattctgactttgttgtatcacttttatgtttcaagatgcattgttcaaactctctatgtaaaacattttgattagttataatgcaatgcagatgttaaaaaaagaagttagattcatgttttagtattttcacacttttgtcttaactattccttaaaacgtatctataatgaattgatttaattaatagttttagtgtatatgatcttgatcatgctaaattgacaatggaggttggaagttggaaccagtcagggaaacttatgaattcatattctcggtttcactttaagttacttttagtttgtaaacaatccaaacttttctagattaaattgtaataagaagaataaacattacaaaagtaggaaatattgtcatacagtgggaaaacaatctagataaaatctgaaaaatcactatatgtcgcggtctctgcggcactctggaggaggtacgggaaatcggacgcggtcagtgcaatagttgtagatggtgtatctcttacgaacccatttgagacgcttgtactggttagcgtccaagtcctggaactctttctgatcccaccaacgttttccctgcgtctcgcagaacttagcatttactgaagcttcacatccatcgacgtggaagcctctgtaggacgcgacaaaaggagctttttcccagttggtcttctccaaccctccccttgtggcccagtcgtctgcattccacagactcgaatatatcttcattggttggttgaatggaaacttcaccccaacgtctttgctattcttgaacactcgtatcggcacatcatccacaaagaacctgtatttgtggttcttacacactgacacacttagttgtgaagctggttttctattataactaatacgactatgtttcttgtttttctatcaca

SEQ ID NO: 30386 - DNA, 2178 bp, Arabidopsis thaliana landsberg
  unsure (1)..(2178): unsure at all n locations
cgtgacgtggcgtggttcgctaatgtgcgtcacacggagcttacggttgagaaaaagaatcagaattgggtccggtacgagaatgatcggttttggttccctggtggaggtacgatgtttccacgtggcgctgatgcttacattgatgatatcggacggttgattgatctcagcgacggctctatccgtacagccatcgataccggttgcggggtacgttcaaaattctcttcactctaattaaaccgaaccacccggttcgattttattatgcatattcgtaatctttattttattatatttcaaatttaaataaagaaaaaaatagaagattttccgtcatcgatttgttcaatcgaataatctgttgggacgtcaaatattaactaaaaagatatattcatgcatatccatatctaatctaaattccatttgattagtttactctcatataagtgaacaataattaaaatttggaattagtgcatcacaattttgtagattcaatgttaaaaatgaaagcatattgtttcaacatttttggtttctgagtgtgacccactaaagtcacctaatcgtctaatgtcactgttgacctactcatactctaccgttaaacctgtaaagttgaaaaaataaactagtagttgagtcaaaatgaagaatatattttcttgtctcttagtttgacttcatttgtcaaaacaagaaaaccatatgtctttttgagttttattggtgtgatcaatcaaatgtgtctttggtttttcaggtggctagcttcggtgcatatcttttatcaagaaacattacaacgatgtcatttgcaccaagagacacacacgaagctcaagtccagttcgcactcgagcgtggtgtgccggcgatgatcggaatcatggctacaatccgcctaccgtacccttctagagcctttgatttagcacattgctctcgttgccttattccgtggggccaaaacggttcgactctaaaccctaaataagtaggagattactcccttttgagttttgagttctaacactttgtgttgtgttgcagatggggcttacttgatggaggtggatagggttttaagaccaggagggtactggatactttctggaccgccgattaattggcagaaacggtggaaagggtgggaacggaccatggatgatttgaatgcagagcagactcagatcgagcaggtcgcgagaagcttgtgttggaagaaagttgttcaaagagatgatcttgctatttggcaaaaaccctttaaccacattgactgtaagaaaaccagagaggttttgaaaaatccggagttttgtcgtcatgatcaagatcccgacatggcctggtaatcaatcagtttctatatctaagatttagaaatgttagaatttggctataaattttggaatgattcaggtatacgaagatggattcttgtttgacaccattacctgaagttgatgacgctgaggatctaaagacggtggccggagggaaggtagaaaagtggccggctagattaaacgcgattcctccgagagtaaacaaaggcgctctcgaggaaatcacnnnnnnnnnnnnnnnnnnnnnnnnnnaactgtggaaacagagagtttcttattacaagaagttagattaccagttgggtgaaaccgggagatacagaaacttagtcgacatgaacgcttacctcggtggattcgcggcggctctagcggatgatccggtctgggtcatgaacgttgtcccggtcgaggctaagctcaatacgctcggtgtcatctacgagcgtggtctaatcggaacgtatcaaaactggtaagtttaaaccaaacttaaactaaaccggaatttttcttgtgaaaggatatgatttactcggttttccttcttttttgttaggtgtgaagccatgtcgacgtatccaagaacgtatgattttatccatgctgactcggttttcacattgtaccaaggtcaatgtgaaccggaggagatattgttggagatggaccgaattcttagaccgggtggtggtgtgattataagagatgacgtggacgttttgatcaaggttaaggaattaaccaaaggattagaatgggaaggtagaattgctgaccacgagaagggtcctcatgaaagagagaagatttacta

SEQ ID NO: 30387 - DNA, 1228 bp, Arabidopsis thaliana landsberg
  unsure (1)..(1228): unsure at all n locations
tgttgctttgtttctctgtactattcatgtgatgtctggttttttttggctctcttgttaatgttaccatgcttgtgtgatgtcatacattttattttttttctctgattctctgacatttacgcctcatatttatttttgcaagtatgtgattatttgttttgggttatggagtgtgtttagtggaactagttgtatacattttgatgattgtgcaattacattgaaatcatctattgatgtttcctttgttcatagatttatgcaaatatgtataaactattctatttatcaattgatttaggtcaaagcagagaaatttatttccaatttcgcctgtgataccctattaattagatgtatactatttaatttttgtaaggatgagaattttggtcagttgtgtaatttatgactagaagaatattctgacacagcagagtgagagtgatagataggattgtcttgatacgaaatttatagaatggaaagtcacaagtagataaaaatcaataggatcaaaactagaaacgttttcctaattttctgtttctcttattggcaacgaataacaaattttgattttctatttctattgtataatcaggctgtaatgttttttatcagtaccttttaatcccaacaagtaattaaattgcattacagctaagtaaatgctggtttagactttagagtcatcagatagaaaatgtggatttcttnnnnnnnnnnnnnnnnnnnnnnnnatggaagtaaagtggtcaaaagacttttaaactgtttttttttgtcttattgatgtaaatgggtaaatttaattctagcgtttacgatcataggttatgtaaatttatcgactgtctctaaagtctaaactaatgatgctaataggtagcgagctttggggcgtatctaatgtcgaggaacatagtaacgatgtcgtttgcaccaagagacacacacgaagctcaggttcagttcgcacttgagagaggagtccctgccatcataggagtgttagcctctattaggctcccatttccggccagagccttcgacattgctcattgctctcgatgtctcattccttggggccaatacagtaagttcacactcaccctctagtcacactctctttttttgcagctgttttgttatgtatgtgtgttttgactactgtttggtgtgagcagacgggacgtatctgatagaagtggatagggtactg

SEQ ID NO: 30388 - DNA, 1890 bp, Arabidopsis thaliana landsberg
acttatacttatagttattgtatagaaataaaatgatgagtatatataatgagtagagaaactattaaatcagtatagacccctcacctacgctttactctttcactcctctctctcctgctttgctccgccgtgagaggagaaacaaatggggaattgtcaagcggcggaggcggcaacgacggtgatacaacaaccagacggtaaatcggttagattttactgtacagtaaacgcgagcgaagtgattaagtcccatcccggtcaccacgtggctctcctcctctcttccgccgtacctcacggtggctctctccgcgtcactcgtataaagcttcttcgtccttctgataacctcttgctcggtcatgtttatagactcatctcctccgaaggtatataatatattaatcacaattcacacagaacatgtttcagttttaaattcaggaaagaacagaaccctaacttatagggttttcttcaatttgtttcttctgcttcacgtttgattacaatcatcatatacgaagtgtataaaatttacaaatcagaactaaaagctttaattttcaggattcttatcaatttatttgttctgcttcactttttgatgttaagtcagtctttcttttttgtgttctattaatagaggtgatgaaaggaataagagccaagaaatctggaaagatgaagaagattcatggagagttttctgttgcagaagaagagattaacccactaaccctaagatctgaatctgcttctgacaaagacactcaggtattattatcacatactacaattgctctgtatcagatgtttcagttttagttctctgattgaaacgatagagtgttacaaaagaataatagagttggttttgatttacagagaaggacatatgaaaagcagagaggaatgatgaacacaggaggagctaccaataaagttagagcttggcagccttctcttcaaagcatctcagaatctacaagctaaaacacttcaatccatatttttctatctttttttcttacttttgactcttttttttgatcatttcatttctctttgtattgatgtttttcccaatcaaatttgtaaaggaagaagacccatttgattgtggttgaagaagaagaaacttttgtcattttttaactttaataataataactgaagaaagaaagatccaaaggattattttcattttctagatttctagattttcttttacgttttcaataaatagttatgtcatagatcaagttttacaactttttttacgtacttaaaagattgataaaattgtacttgttgttgttgaccattgaaacatttcccttttttcactaaaactagcttttgcaacctttttattcaactgcattggtttgttgtatgtagacaccattcaactctattataaggattcatgtagcttaacatatcagtgaataactagacatgccatagattccgaaggaagaaaaattgttataaaagaactatatgcacctaacaaaaaaccaacaaaaccatagtattttctttttggggtacataaaaatatctttgtatgaagaagaagaaagaatcattacacagctttcactcacaagattacaagtttgcaaattgcatataaggaaactcccaaaaaatatcatcaaagatcttttcagaacacaaaaaaaaaaaggtaaaagtatatctcttttgccatagttagactcaaaaatacgacatcgtttacctcacacgtgcacactcaccgacttacagaagaacccacacgtacgttgagggtactttagtcattttagcattgaacgaaattgtctgagcggaaaagaggagttttccgttatccctttaaatatttat

SEQ ID NO: 30389 - DNA, 1019 bp, Arabidopsis thaliana landsberg
ctaatcgacgaatcacacacattagaagctgattgtccaacactcacttgctgtttcacagactcttgaggacgactctttttctcaatctcttcctcagccgctaacgcatcagcaacagcttcccaatcatccacacacccatcatcatcatcgtctacattttcctcttctgttatattaccagagcaaaagccactgctgctactactactcctgctacttctcccactgaagttagtgctcgaatatgtaccaccaacagagctatttgaaggtgactccataaaactctcatgatgaagaagattattcccaccattgttatcctcttctctacgcaccttatctgaactctcatgatgaggcttttgactacgattaacactcctctcctctttaacttccttattgctcaccgcaactaatatcaaaatcaaaaacccaaaatcaatacatagacaaccaaatctaaccaaacgaatcaggcagaattgaaacattaaaggagagaaagatgaagttttaaccttgagaaagccattgctcacgacggagaccaagcttgttctgcttcatcttagccgacttattgttctgcaaaacgtaatgcaataacaaaaccattaaaaatcaaaactttgaatcaatttcagagaaaggaatgagatttatcaaagaggattacgttaccctcttcttctttccggaatctctcggagctgaagtagcagaagcgttggtgatcgaatctgtaatcatgattccgcagatgaatcctgacgagtgaaattacacagtgggtgaagaatttgaaatcaaaagatgaatattctcaaaaaccctaattcagatttggtggctcgagagagagagagagagaagaaacgtgaagattttttatttttatttttatgtttttttttctatttttgttgatttaataaaaatcaaagaaaaagagaagaaaggtgagagagataatatataaagggataacggaaactcctcttctccgc

SEQ ID NO: 30390 - DNA, 3056 bp, Arabidopsis thaliana landsberg
aaggcaaagaaaaacattatattttcctgttggcgaaatttttaaagttagttgatatatcaatataatcaagggcagatggcagagcaaatgaagcaagcaggttaacaacattgatccaacaaatcaattcctgccgagaggaagtgacctgcaagagtaagtctccctgaaatcagacttcttcttagaggaagtaaagagagaagcatagactttcttagtagcattaaccggcactttatccgccgccttgaatttcttcacagttataccattgccattgacattcccatcctctatctgtctctttgcgaccttcgcacctgtatcagccaccacagcagcaccgttcttactcttctttgagacacctttcttctctctcagcttagctttctcctcctccatcttctccctcaacaaatctacttcctcctcagtaccattgatcacaatcttatcagaatctttgacatccgcatgacacaccaaacaagaagaagacttcacttccttcaacgcctttgcgctcatcacatgtccacatcccctcaaagcgaaaaacttgtactttccattgaattcaagccctgagaccggacactgaaactgtgcactagtcgtatctggcgatgaaccatcagaaccagcaacaggcgtaagcttaatattcaccatatctttcaaacccttaatgtacgagaattgtttaggcaacctcttagacaacaaagcgtgcaccaaaacttctttattgaacaaattcccaaggagatcaatcacgcacggctcagccaaaggctcgttagacaaagcacaattcaaccatttggagagcctctgctcattaggatcaaccttgtcaggtttcttctccgcgtacatattgagatagcaatcgcgagactcggctcccgttgccccaccatctcctccacctccacggaggcgagggaaaagagtgagcatggatacagaaggaagcttcgatacttggatccgtgtagagccattcaaaagcttcccatctagagtaatcgagcaagccgataacgatatacgctgcgacgattcgagtaaggaagtgatacccgaaagagttaatagagattgcgcaggatccaattgcagagcgacgactttttgacagtcaggagatttaacgaagatctggcgccggatatgcatggtggcggagcaatacgaagagctctaggtttccgatcaattttggtcggtgattagaaattaaagggtcgaggagagaggtttgaaaaaaaaggtaaccaaagtaaagtttgtgtgttatatattagctggaccgacttataaatcaagtggaccactttaaatttggggctttgagctttataatttctctgtgggtttgggcctttcatttactttgggctgttttctctcaaatacaatgtagtggaataattgagctataattatttttttaatgtttttgtttttccattcccataaaacaatttgtaaaatatgattaaattcaaattggaaacattttaatcattcgaaaggacaaaatgttttataaaatatgaaaattaaaaaattcagtaaataaattaaagaaaaatgtaaaaatggattgtatttgattaattagagaattagattttaggataattttaagaacaaaaacaattatacaaagaggccggcgacgtacgacttttgtgagataatatgtgaaagattcgagatacttaatattctaaaatatttatgggagtaatgaaagaacaaatgaaacggccagtaaattaaaaaaatagaaatcaaatttttttgaaaagaataaaaacaggggagggaacagaggaagaaaccccaagaagagaagaagagatggaaaatggaaatggagaaggaaaaggagaattcataaaccaaaacaatgacttcttccttgattccatgtcaatgctctcctctctccctccttgttgggatccatctcttcctcctcctcctcctccgccacaatctcttttccacgctctagccgtcgacgcccccttccccgaccagttccatcatcctcaggtaccaaaactattatcttacatcataactcaccaaaactaagaatgtttctgatccttttctgtgttgttgttgttgtttgtcaatgcaggagtcaggaggtccaacaatgggtagccaagaagggttacagccacaaggtacagtgtcgaccacgagcgcacctgtggttcgtcaaaagccaagagttcgagccaggagaggccaagccaccgatcctcacagtatcgctgagagggtatctcattgttcacttcctccatatccttcttctcttatcttgtgtttctgattgtatggttttgtacagcttagaagggaacgcatcgcagagcgtatgaagtctctccaagaactggttcccaacaccaacaaggtattcactactttcctaatttatgaatcttgtttggatttgcataataaccgaattggttgatggtgagatgcagacggataaggcatcaatgttggacgagatcatcgagtatgttaggttccttcagcttcaagtcaaagtactaagcatgagcagattgggaggtgcaggatcagttggtccacgcctcaatggtctctccgcagaggtcagtttcttagtcccttatggctttcaacatatgtatagtggcatcaccaatcatcatcaatcgtcatggtttttggtaatgtaggcaggaggacggctcaatgccctcactgcaccgtgcaatggcttaaatgggaatggaaacgctacaggatcgtccaatgagagcctaaggtcaacagaacaaagagtggcgaaactgatggaggaagacatgggatcagcaatgcaataccttcaagggaaggggctttgcttaatgccaatatctctcgcaaccgcgatatcatcatcaactactcactctcgtggatccctctttaaccccatatccagtgctgtagcagaagaggattcaaatgtaacagcaactgcagttgctgcacct

SEQ ID NO: 30391 - DNA, 2277 bp, Arabidopsis thaliana landsberg
  unsure (1)..(2277): unsure at all n locations
actcgatcttcaactattgccaagaaaagataaaacctaatctagtcagtctctcaacataaatacaacccaatagccaaactgtgtccaattcggagagaaactaaactaaaacaaaacacaaaagcccaacataagcccaataaaacccattttataaacagaacattactaacactcatttttagggtttattcttcattgcttgagcttccttctcttcttcttcttcaagccgcggctaaagatccctacttctctcgacacttatagagtttcaggtccattctctgattcctgttttttcattttctaatttcctatttacgggtttttactaatcttctattgatcctccagtcatggccgcctccgcagaaatcgacgctgagattcaacagcagcttaccaatgaggttaagctcttcaaccgttggagctttgatgacgtttcggtatattcctcaccaatcccttctcttagaatatctctttagacacttgagaattgtctaggatctaattcttatttagctgtatgatagacattgaaatgattggtttatattgatatgagtagttacattagctttattgtgtgaattatatcaaattatagtcctcacttagtcacttactagatcttagctattataatctttgtcngtcttcactgaaacccatgttgtgtttgttttgattataacactaatttgacactaaaggtcatgtattttttgtgttttatatgattggtgtgctaatatttgtttttgatctgcatattggtgttatgtaggttacggatattagtcttgtggactacattggtgttcagccatcgaagcacgcaacttttgttccccatactgctggacgatactctgtgaagaggttcagaaaggcgcagtgcccaattgttgagaggctcactaactctctcatgatgcacggaagaaacaatggtaagaagttgatggctgtcaggatcgtcaagcatgccatggagattatccacctcttgtctgacttgaacccgattcaagttatcattgatgccattgttaacaggtatattaagattgctatactgaaacctgtaaaattcttgcgtgcttgttactatgaactgaatctaattaagaaggtttgttctttatgtgaattagtggtccacgtgaagatgctaccaggattggatctgctggtgtggttaggaggcaggctgttgatatctctcctctaagacgtgtgaaccaagcgatcttcttgcttacaactggtgcacgtgaagctgcctttagaaacatcaagacaatcgctgagtgccttgctgatgaactcatcaatgctgggagggatcttccaacaggtaagaacactctatctacatagtctgtctcttgatggcttcactttattgttagttagctaagctaataataacatcttctcttgtcttgcagctatgccatcaagaagaaagatgagattgagagagttgctaaggccaatcgttaagggatctccctttcctctaagtttgcattatatcaaagagtttttgtgttgtttccattagctttggatatgtttcagatgatctctctatctttaatgaaattttgacgcttataatcgacttgggatcttgatcatcaaacggtttcatatttaaaattatttcatctatatatttttcagtttaaagtgctataaatcatggtagttatatggtttccaatttgctgctactccaagataaaaggtgtaaatggagccattaaaaatttcagataactcaaacaatctattttgagtctctaaggacacaaccaatgcctctaatttccctgtcagtcttccaagcaccatgtacaatgcatttaaaaggcatttgggctcaatggtgtccatactgtaagtagcatttctggatggcaaatcatgtgtatatgcccacatggctcaagtcgggtggttaagggcttctcaattccgagacatgacgcgcctttcaatcctacggacaagatatacaaggcgtgatcttgacatgtgattctttctcccttcgactcacgccgcgaaaatgtaaacaagtatcggatagataactcattaagcttatgagtttatcttatgttccttggaaaggtagtacaataccaatgtggttactgagatctagaggatttcgacccaccccccctgtaattgagttacaccgatggaaaatgcatagtgtttagcaacgtgacagaaaagaaatgtccc

SEQ ID NO: 30392 - DNA, 2958 bp, Arabidopsis thaliana landsberg
aagctttcactctaataattttggtctcgctttgatcctcctacttatgtttcatctgtgagaatcattttccatcttagattagtgtagaagatttggtagctttctctttagatgtattgttttactttagcgtttgtcattgggatacatatcttacattgcttggcataaccttatacgcttgttttggtggtagttagatttatttgttatagttctacagcttaatttatggaacatttagcttctgctaaatttcactggtttgcgattttgtttttcattttgctccctgaatgattggatctccgttttggcgttagtatgtcagattcttagtgttgttagtgacaattgttttttttcatcttgtaggtcacagacatcagtcttgttgactacattggagttcaggcagctaaacatgctacctttgttccccacaccgctggaagatactctgtgaagagattcaggaaggctcagtgccccattgttgagaggctcaccaactctctcatgatgcacgggaggaacaacggtaagaaattgatggctgtcaggatcgtcaagcacgccatggagattatccacctcttgtctgacttgaacccaattcaggtcatcattgacgccattgtcaacaggtactaaccttgtgaagtatgctgaaatagtatcattggaacaaggaacattttattcttattaatgttttgtttgttgcttgagccagtggtccacgtgaagatgctaccagaattggatctgctggtgttgttaggagacaagctgttgatatctctcctctaagacgtgttaaccaggctatcttcttgattaccactggtgctcgtgaagctgctttcagaaacatcaagactatagctgagtgccttgctgatgaattgatcaacgcagccaagggctcttccaacaggtaaatacacttccaaatgacttcactattgttcatataacttaaagtgaagctaatgattgaactgttatgtcttgcagctatgccatcaagaagaaggatgagattgaaagagttgccaaggctaatcgttaaggattttccctttgccctgtgcgttacaatctcgtatcaatgagtttaatgttttatcttcatttagattgaaatatgtatctcagatgtttgctcttttgttttatgaagtttatttcgtctgaactactttgaatagataaatttttgatgctttaagctgtttcgcatcagtttattgtcaatttttgaacttatctaggccacctgaagctagaaatttaaagagttcgctattagttctaagtttctattatctggtaatcaagctcgttttctgaaattgtcttagaccatttgcattgttctcaatatggtaaatgattgacgaagcttttatttctgatgtcatatacagtatgtctttcttatctcttgtttatagtttaagacacgacttctttatgtgttccatgttatcaatcgcaattaatcagttcctttattcgttcgaaagttgggattcgattaacaaagattcaaaattaggaagacaatttgcttttaataaattataaacatacaacaatatgatcgggaatacaacaacagatgcagagaagcaacagtctacagatcttcgcttctttattcgacccatattcatatttcattgacatcacttttccaaatacacatttgcttaaaatgtcactaattatccaagtcaaacacacgtacatacaacactctttttttcttttttttcttttttaggtaaattatggcacactcattataaaattcgtactaataacccaaacatgtaaacagctccatattacttagtcatctccttaggtggcttgacaataaggatggggcagttggcgtgatgagcgcagtaatcgctaacgctcccaagaaacgctcttccgaaacgcacaaagcaaacaaaataataagcgctcaaatttatatataagaagaagtgtatcactgagacaatacctttcgatctttccattggtcttattactgtctaggagaagatcaacgtgctttttctccaccgcctcacaaatcatctccttcgcctcgccttctagcactttagttttagtacgtatctgcacatccatcacacaatatgttttaatcgcgtttcatgtccaataattagtgtaatgtctttaggacatgtgttatagaatcggacctgcttggctcggcacatttggagagcgcgagagagaagggcagcagaggtctcttgttgtgcctttttcactgactctatcattgatgaagatgcgtacactgctgctacaaccgttcacaaaaccaagttatacacaataacatttctatacctataaagtaaacaaaactttttttattctttaaatctacttattctttccgactaatactataaattagatataaaagatgctactagggagtagggtgtatgaaggaagaaaatatctactatgattatattaagatgttatttcaattaaaattcgatacttaaaaaagaaaagaaaaaagagaggttaatggacgagacctgtggcgccgcccggtccagccggaaaggcagcaaagtgattgaaaggggactgcacatgaatcaccgtgagcattccactttccgcctcagctgccgctgtggtcaataaaagattagagaaatggtcaatgacccattggagagcgtagaagctcgagtcgctctcatcaatcgcaaccaccatcctcttcgtcgtcaaacttggtgcttcagcctctgtcgtcgtctctggctgcttctccaccgccgatgtttccattgccgtcgctgcttgctcttccgccattttatcttgatttgtgtttttaattataagtgatggatgtgatcaaactttggttcatttgcaatgctttttata

SEQ ID NO: 30393 - DNA, 844 bp, Arabidopsis thaliana landsberg
agaatcctatggcttaatatattagtcagaatcggaacctgaagacagaatttggacagcatctttaggttcgttatcagtgatcgaagcaggaacctcttcttcctttgcattcctccttcgttgttctctctttctctctttcttcttcttctcctccacctgtcaaacaatcatcaatctttcttaattcgggcttatgtcaaaaattaatatttttatatgaatcatttcattgttacgttatcggctggttgatttggtgatggctgatttgtctgagcaggttgttgtttcgaaaaacggctaatcatccaccaaacattgcctgcgggaatcaactcttctagaagcatggtaggctcccatcttggatcagctaggtagtctttgattctgttccataagctcaacaatttctgagttgcttttacggtctttgggactcctgatctcatcggttcagcgctttctggaacaagttctggagttttagctctctgcaagttaaagtgaaagatcaaatgagatatctgataaaaggaacatgtaaatactgaattaaaacggaagttgcttacatagaaaggtaggtttctgttgtcaccatcatcaaccattttcgatagccacttaatgatctacaaaacagtaaacaagcaatgtaacaaagttaataccagaaaataaatgcagattcgttaaaaaaaggtgttaatactgtacctggggaatttcagctgttccgtcataactaacaacaacctgtgcagcaggatcaacatcgtcagctatatatttgccatacagtaatgggccattacaatgatttttgctctgcatt

SEQ ID NO: 30394 - DNA, 3549 bp, Arabidopsis thaliana landsberg
  unsure (1)..(3549): unsure at all n locations
tactgttggcatcaagtgccatagtggacataggaggagatctaaatggatcaaagctgtgacaaatgatttggggcaattcgtcatcgatcttccttctcacctccacgcgattcctgacttagacaaggcttgtatcattaaaacactctctgtccctaaaccgtatcgatgctcttccaagattcacagaggtattcaactcctctcctcttccaacggctctcgtgtctatacagctggaaacatcaccttacaagagagcaccatgtaaaagagactgtaaattaatcttgctaggaaagatcagtcctgactttatttctatatggttccttcttacttcttgtgagaaagagagatagtctttgtaaatcttgttcttcatgctcttcttgtacataataaaatttatgttttcttcaagcttggatcttcttgctactacagagatcatacgatcctgtaactgattatgatatatatattagatgcaaagcttgttatgttagcctaacaaccaaggcaagaccaaaaaatctgagagaagacatatatggttatgtatgactttgagagaatatgcatgtttttgtgtttagctgattctgatttacttataggtttccaagataattgctaacattcaactaattggtaggagaagagagaggagttttgtgtcatcatctggaaacatggttttgcaatccgatatacataacacacatacacatctcttgatctttagttttcactttcttataatccatcatccaatactcaatatgtacagtacaacctaacattagaccatattctttagtattcaatcccataagcttcttcttnctctacttgcaacgtggattgggtatgcggctgcacaacatagcataaacatataaatatcaactgtcttgatgtttgactatgtatacttttctcaaaagacaaagacaaacaacaaaggatgtgatgaccaaaccttctcggtagttttgcctttctacattgttttgactcttcattcaacattgccaatgcgttttccttttctctcgctgcggcttccctctttgccttctttgtctcaacttcaatggctttcgttagagcatccaccttcttcaacaacatctaaaaacagaggtatcttaagaggtttcatatagttgaggatcttaaacaaccacaagaagatgatgaagttaccttgatttcttcatttttggcatttatagtaccctctttactctcacatagcttccttaaagcaatcacttccttctgaagcctgtcatataaaaaccctgaaaccatatcttcagaataaacatttccatcttcctctgctttcctttcgccatcttcttcatgttgatcagttaatccgtttgcagtaatctttgaattctccttttcatcattttccctaacactgttaattggctgattcatagcatggattctgcctgtaactgagcctcttagctgagaactagaccttttctttgagccaccaccactggtcaagaatcctaaaatcttgccagatttttcagtctttgtagttggagagacgaaaaacgtgtttgggcccttcaagccatcttctatggttttcagcctaagctttaacctctcctataatgtttacttgcattagaaactacactttttaccaacagaatattaacaatataagcaatcacctttagctgggactcagccttagcggttctctcggaaacagcgagtttatctttcaatttctgcatttctccctgcacacagacacaaagttcaacactaatgtttcccatataagctagtcagtgtgtattaactggatgtgtaagtgaaaagcagtgagtacatggagaatccttctctcttcaagccattgctttacaggcatgactctatcgttctcatctttccactcgttagcaactgcaagtgccactctacttgctgacactttgactctggctagctctctctctaaggttctcttctcatcctggtaacgatgaaaaaatcatgtgattttcctttaaaacaaatgtgagaatgaagtacaagaaactaaacagaacacttgcattgagctgggagatttggcggcgatagtctcgaactgcattggcggctgttcctcctgccaagatcgcttcctccagttctacaatgctttgggagagcttctcaatctccaacactttctggcggttaattttctcaagaaacttgttctcatcctggcatatctcaatctgtcgtcgaagttcaaagttatggttctggacctcttcaacaatcaaagcacgttcaagggcacttctcaagattctctctgcttcaagaagcgccgattcttttgattttgttagacgttccaacgctttcttgtcctcttgaagtgcagaaatctgtcaaacagtagcatgtcaagaaaatctggcacttcacactgatacaagaaagaaatttgaaatacatatagtcttaagaacctcatgcttgtgaatcttgatctgagattcaagaggagctatgatggattctaggggtagagagtcatcgtcctgttggtgagtgtaaaccctccttagtgcttcttctgcagcgtcctgtgccgccaatgcatcttccttctcttcttctagcttcttcctctccaactcctacaatcatgtcacaagcttaacttattctagtcatttctaatgttttgacatgagtccttcacaaagatggtctatagtatttgagcaaaacctcaccttttggtcaacttgattctcggtggctccaagtttctcctccaacttcctcacgttttctctaagctgaaacaacaccaagtagcatcaatagagctcaagaagctcaaaaaggacagtttgaatatggaaaacattgattaaaaaaaacttataggtaagattgacttaaagtttttgtagaacaatcacaaacagagttgatgatcatcatgcatgttacctccttaaagactctgtctttgagcacttcatttgttctcaaagcctcaacttcagctttagcagccaaaagctctttctctttttctgcagagtggaattaaaagaaagcagaacaacctcaacatcaagcaaattactcataagggttgatgaacaataaacagaaagaaaaataagaacctttaagctggctttgcagagaagaggtgtcagatacaaaagggttttctgctgcagtcattttgtagtctcaacggctcctccttctttgttgcagtatagaagatgagttttggtctaagcagaggagaaatggagtcgtttaatatatacacacacactttcagagagagagagaggccattccttaaaggaattgacgttgaaaaagagagagggagagagaaagagagagttaaacactcactaactctttttcctcattctcaagcagccgttactttacatacccttgagtcagtaaccaacccttccctcttcttctttcacttgcattacccatttcctaaattca

SEQ ID NO: 30395 - DNA, 1946 bp, Arabidopsis thaliana landsberg
tgcacagatccaacctctggttatgactttagaaggggaagcacttgacgcattcaatgaatcttacgaggaactgatggatattaacgactattcagaagaagacgatttacaatgtgtgatgcaggagaatgagcggcaagaagaattgtctttgacgagcaaaagctcaccttggagccataaagattacataaaggattcttcaagaacttcagaggatgtgaatttgtccatgctgcaagatctacttggtctgagcgacgaagaagaagaagaagacgagatggagaagcatctgataaagcagattgttgagaaaacaaagcaagggtcttctgctgtgttaaatgcccagaagatgctattcctcatggaagaaatacaaccaaatatataaaaagcatttactcaaattctcatcattttttgatgaaagtattacacgtctctagttagtgtgtgtgtagatatgcaaagattggtgtaacttatcttgtcatatgcaaacaaactgaagagagaagaagatgtgttgtcaaattcaatgtatatatcttaagaccagtgtcaaagcttaagatgtgataaggtttaagaccatctctgaaactccgatggagatgctctaagtttttctggcagaaagaagagtcttttgaaacctgctggttgggtcagagggtttgagagaaggcgccaaataaaccaaaagctagacaagaagaagcggtgaagttttgaaaacgagaataaaattcggcgggaataattaacgaaaaatctaatagctcccgcgcaaatctttcttttacaaaacaaaaccattttgcttcccatttcctgtgaattctaaagagaaagaagagatagagctagagattaagagagagatggagaactcagtgacccaagatggtatcgcgacagtattagccaatcaatcccttgattcctcctctgttagacccgaaattgttgttcaagtcgtggatcttaagcctgctggaaatcgatatacgtaagtttcgatcttgattttgtgtgcatcgatctgggttcttctgatatgtttagaaccaaacttgttatagaatagggtttgagatctgggtattgttagaattttgccatgtctcagtttttttttttttttttttttttctgggatctagtttcaggtctgtgttagctttaatcaaattcaatattaactggtcgatgaagtatcttgacatgtgatttgggttctcaggtttagtgccaatgatggaaagatgaagattaaagcaatgttaccagcgactttgacttatgatatcatctctggaaagattcagaatctgggtcttatttgtctccttgagtatgccgtcaatgatattccaggcaaatcagaagaaaagtaataataataacaatctcttatgcatctttcatgattaatgattttcaagcaaacagaaactaacctttgttttctttatttgccacttcagatatatgcttataacaaaatgtgaggctgttgcttctgcacttgactcagagattaaggcggagattaaagcttccacaggcataatgttgaaacccaagcatgagtttgttgccaaatcagcttcacagattatcaatgagcaaaggggaaagtaagtatatctttttttaacttctgtttgtttcatagtctctgtcgaagttgttgtaaatgttgcttaaacaagtctctgtggtttttgtagtgctgcacctgctgcaagaatggctatgaccagaagggttcatcctcttgtgtccttgaacccttatcaaggaagttggactattaaagttcgtgtcactaacaaaggagtcatgagaacttacaaaaatgccagaggagaaggatgtgtgtttaatgtggaactaactgatgaggaagtaagactatctgatgatttttc

SEQ ID NO: 30396 - DNA, 2306 bp, Arabidopsis thaliana landsberg
  unsure (1)..(2306): unsure at all n locations
cactcaataccgaatccaatctcccgtaatctccctcctccatggccatcttcgcatcttcaagacctgagatcaacgaatcgtaattctcgacgcaaacactcatcgcctctttcaccggcatcggcgttttgctatcttccaccacacgtttcgcgtaatccaaagtcgcgttcgctttttttaacagagattcagcttccattcgcatcacatccttaggagcaattcctccgtctcctccttctccttctgcttgtttctgtagatccgggagaatcgcggcgatgcattcgttgttgtagtctgtgtttttgcagagatctttcgccgtcgtgtcgattttcattgacgagaaatcgaatttgtttatatgttcaaatttaggagctagatcagctatgtttgtgacagagtcgaagttgatgtctatgtcttcttgggatggtccgggtgcgtagactgccgccgtgggagctaaattagatccggtgttaatgtcttcagaggtgggggatggtgcggaggctgggacgaccgagattgatgatacgggtggttcgatgagcgaagggtcaggtgaggaagcagggacttgggatgtctcttctactgaacggccggtggcgtggacgttggatacgccggagaatgtataacaacaaacagtaactccgatgaggataattgctttgtatggctccattttcttaacaaaagtttttttaattaactggtgatgattaagaatttaaaaggtacacaacacaattattaactatatatattgactggttttaaatgtgtcaaaattttggaaaagctaaattacatgagaggttttaaaaaggtgcgctcatttttgctcaaaacccaaaattaaaccctataattattcttactagtaaaaccattaataatgcataaaaattatcttatctgatctaattattacatgttataatccataaatgttacaaagaaaaaacactaatccactaattgggtggttttacaaaaattgacccttagaaaaaaaaaaaaaaatgctaaacaaaggcccactagaggcccaaatgtatagacgatgacaagtcggtgaaccgggaaaataattttacttgagattgtttccttcctctccgattttacataccaccgggaaaaaacacgaagccctaaatttcgtcgtaattggcaacagttaagctctttgctaaaagctctagctgagaagcgaaattcgaagtgaagaatgtctaatcgcaaattcggaatggaaggattcggcattaatcggcaaactagctacagtttcgagcgatctcaagcaccgcaacgtctctacgtccctccctcgtctcgcggcggagacaactccgaagatgccgatcttgataacattgattacatggaaaacgaagaagctgaggaagatattgaggaaggcggttctgctgcggctagcggtggcgaggttgatgagatcgatccattagatgcttttatggagggaattcaccaggagatgaaatctgctccacctcctaagccaaaggagaaactagagaggtacaaggacgacgatgacgatcctgttgagagttacctcaaggccaagaaggatttgggcctgacactagccgccgatgcacttaacgccggttataactccgacgaggaggtgtatgctgcagctaaggcggtcgatgcagggatgctagattatgattccgatgataatccgattgttgtggataaaaggaagattgagcctattacagctctggatcatagctccatcgattatgaacctattaataaggacttttacgaggagctagaatcaatatcaggcaagtttctctattcgttaaattaacttgctttaatatatagttgttaggtgttgcatctaaagtgtttaaatttcttaatccaggaatgactgagcaagaaaccacggattaccgtcagagattagggattcgggtctcgggttttgatgttcataggccagttaagacctttgaggattgtggattttcctcacagattatgagtgctatcaaagagcaagcttatgaagaacgtacagcaatccaatgtcaggctttacctattgtgttgtctggtcgagatgttattnnnnnnnnnnnnnnnnnnncaggtaagactgcagcgtttgttcttccaatgattgttcatattatggatcagcctgaatttcagaaacacgaacgtccaattggtgtcatatgtgctccaaaaagaaaattggctcatcaaatcttcttggaagccaa

SEQ ID NO: 30397 - DNA, 1789 bp, Arabidopsis thaliana landsberg
cgatagaccatgatcgtcctctaagtaaaaccggagaagcagatgctgccaaagtagctcaaatcctctcctcactcggttggcttccccaacttattctctcaaggtaagttccttcttcaaattatcagttttgtttttcatttcgtgattgagaattgttgaaatcattcacttcacagcgacgccactcggactagagagacactgaagtcgatgcaggctcaagtagatgggtttatggaggcaaatgtacatttcattcctagcttttactccattgctgctatggatggccaaacagccgagcatcttcaaaacattatctccaaatattcaacccctgatatctccactatcatgttagtttctcatcaatcttttttgcttcatcttacttgtgctgtgttatcatttcttatttgattgatacatataggtgtatggggcataataagggttgggaagaagcagcttccatgctctctggagcttctattaagttgaaaacatgcaatgctgctttgcttcaggcttttggcaactcctgggaagaagtttgttgattcaatccttttttcagatatgcatgagctcgctttttctttgatttggagctaattctttcttttggccatcacaggcttttgcgctgtccgggcctggtggatggaaacttgagggtctagtggctccagatagtagcatctttgtgtaagagaatggaacattacaaagcttcaatttttagctttttccatggttgcaacttttgctcctacagtatgtcattcttcaacttcatgtctgttgcataatatatataaaaaggttgcaacgtctcatccttatgtgcataattaagctcagtttttagctactgaaacagatgagtaaatcaagagtagattgcgtctctttattgtttgtttaccttattaatgtaagatcctagcatcagggatatgttcaaatgcaatcacactatttgaataaattgtggattttgcattggtgggttattttattcatgttatcatacaattgttaactttgatgaatcctcagagattccatgggttgttatgtcttggagggtcaatgttttttagggctttccatacaacactattgcatttaaaccctgacccgaaaccgatttgccaaaccctatctcctcttttcatcttcgcctgtgtttctaggtaagccagctcgtaccatatactgctgcttgatgtgttcccgaaacgctccaatgtccgtcttgatgcctccatattctcttctgtcaacttgagatccttatgaatgtcatcaagtactttcttactcgatgctaatacgcatatatgttcaaaggaaggctcaagacgaccaagcgttgcaatgtttgctttcagtgcatggcgcccaacttccattacatctctagatacatatagtccttgtttcccatctctgtcttctcttaactctatgctcttgtaacttgtgtcttccatgcctttatgggttcttactagctgttttattcaccagttacaatgtcatcagtcaaaacaaagaacagagcaagagtaaatcagagtgtttctttgttcttctcacctgcataagttggtatttggctcgccatctgtcgatacgccgactagatagcataactgcagctgctcccattcgaaagaagcaatttggtggaagcaacgcgacgtcattacctgagtaccaagtgaagcttactatctcagtgctcaccaccaaagcgtaagagccttgatgagcg

SEQ ID NO: 30398 - DNA, 777 bp, Arabidopsis thaliana landsberg
gatgaaacaggtgaaaactatacccatattgagtgatattcctcggcctcctcctttttctcctccaaagcctttggtgaaaccatcagcatcaaaagggtaagttaatttatttagaatcactacagattatataagagtaatatattcatgttacaattttgtaaattttcttcatatttttacagctcgaagcgaacacagtcgcgattgagtttcaggttgtttggtgcttaagctctcttctgaacaagtgagctaatatcaggaaaatctgaaacatgttgatgcttcagttatatttatacgcattgtagtttcatgtgtaagatactcaagttgtgtgattgcaagtataataaagggaaaaagaaacacaatgtatttgatttttaccattgattcttagtaggttttgtatgatattactgatgttaacatgttgaagttgaaggatttgttatcttgaagctcaagaaatctgggattcaagtattatggaaccaaacacgaggattaaccgagacgagatttaacatttagctgttgcaatacctcttataaagcacttccgattaacataaaatgtcagagaagaagcaccataccagaattagttagaacaagcaaaaccgtgatttgaagattttggtcaaaattgaatccaaaaggataatcaataaaacttagatggcggcttggctatctgggacaacatttatcccaaggctctcatcatcgaatgcaaccgattgtgattgagaagctgtcagtttc

SEQ ID NO: 30399 - DNA, 2148 bp, Arabidopsis thaliana landsberg
  unsure (1)..(2148): unsure at all n locations
tagtcacaatttgcgactagagtgtgacactaatatatagagtatattggcgactacttggagacacaaaaatcatgagcgattgtttgatatatttcacatgcatagacggttgtcgaagagagttatcattagcaagtgaatccttaacacaatgagcgattgtttgacctaaaaattgatcatcaaggagttgagtgataataagtcgcgtgagacgaggaggattcaagaggatatgagcatttgtttcaagaggagaactgtaccatcctaaatttgctacaattccactttcgcattcaatcaaaacgagaaagttttgggcttaaatagggttttgctgaaaagtttttgggcttatatagggctggaccattaaacagaaaagttttatccttttttctttctcccaaacgctctcttcttcttctttttcttcttcttcttcgctcgtctccttccaattccagtctcgtttcgaaataatggctaatcgcgaaacaaattcctcaccggagattcgatgcgtctttgtagaaaccaacctcnacactcgtctcattgtacatgtgcataaagatgaaatcatctccgatttcaaaggtctctcttctcaaatttatcactgaatcggcttactaaatctcttcatactccactgaaatctactacttaaacttattattactgagtttctctgaccattgtgttttttttcttggtttggtttatagacagattactcaaggagcataaacaagttttcccagaaattggagaaattcaaatctctgccttgaaggtaattggattttgctgctttgttcatacatttttgttgttaggaacaagtataattgatgattggtttaattttgtttcaaggttaaaagacgaagaaagtttatcatttctcagattctttgcagcaaaggaacgaagctgaggagaatatggagaaaagtgggaagaaatcaagcaagagatcgaagaagaaagactctttgaacattgtggaggaggcccaagtagtagattctttgcagcaaaagaaagaagctgaggaaaatctggaaaaaagtgggaagaagtcaagcaagaaaacaaagaagaaagactctttgaacattgtggaggaaagttttgtcagttgaggtaaacaatgttgctcaggaggaggcttctcccatcaacaacccaaaagacacagatgcatcattcacgccagctaagaaaactactgagagcaatgcttcgcctttgaaaaagattagtgaggtcaccgataatactgaggatcttaaccgttccatgcaagtactgaaagagaacgctgatatgggagacaattttggttctagccaaaaggacgatattgttggtggtactatcaaggaagaccaagtgactggtggagctaaatctaaaaaggagaagaaaagccttgatttgcatcctggtggttccattgatggctcaatgaaagtgaaagagacaaaaggtagagttcaaccatctagttcaggtactagtcaattgcagtcaagggctaagaatgatcgcaatggatcaaaggttgatctttctgatgcatccatgaaaggcacagtaaacaacaagaaggaagccgtgaagaaaagctctaattcggttacagtgaacaatagtaaggtgaatgtcaacaacaagaaggaagctgtgaagaaaatctctaaatcagtcacggcgaacaagatcacaacgaatttcttcaaggatgctgaggaggatgaatctaagacgacttcgagtgactcctctaatgcaccatcagatagttcatcagacaatgatagtgatgtgacttcttctatgtatatgaagcaaggtattttatcgatctgagtataactttgatcacacgttctctcaaccagatatgctaatttcgattcttggtttcaacaggaaataaactcgttggaggaacaaataggtaagtaaccggttcagggtataattattttcaatattagctgcccaatctactgtcatgaactcttttactagtcttgtggacaggttatcagagagcatgcaagatatcctaagaagctcaaaaagttacaaggcggcgaaactgacagcttatcaatcacggtcggt

SEQ ID NO: 30400 - DNA, 2259 bp, Arabidopsis thaliana landsberg
ctgttgcaatttaaacgatccacgtacttcaaatgttgggtaaggcgattataagacttacgtcacgatagaacaagtcttcagcttcaagcatgtgtataatatgacccattttaggtctcttattcgcgtccggatccacacaacgcagcgcgacgagcaacacgcgtttaagagcttttgaagtgggcggttcgggtatttttggatcgactacttcctcagaccttcggtttccaaccattgttttcagccactcaaccaaattcacctaacaaaacgagacaatcaagaacacggttttgtgaaaccttgaagcgatagatataaaacaaattacctctccttgaggtcgactataatcgacaggatttcttccggtgattatctccatgattaatatcccaaaactatagatatcactcttttctgtcaacattccggtgcaagcatactcaggcgcaacatatctacataacaaaccaatcaagacaaaatgtttttcaagaatttgaaatccttaatactatccaacaatcatatttatatatgccaactaaaaacaacttacccaaaagttcccattactcgggttgtcacgtagctgctctcggagaacaagagcttagcaagtccaaaatctgataccttagcattccattgacgatcaagcaaaatattactagattttatgtcccgatgaacgactttcggttcaagaccctcatgcagatacgccaatctgcgggaatatcaacaaacaaatcacatatagaaaaagatgaattcacaaatgaaagttatcaaaggcgtctctcggaagtgtaccctttcgccatgcaaagtattatgttcatacgaatatcccaagtcaacggacttttatcaccaacatccccatgaatccattgctccaagttgccattatcgacgtagtcatacacgagcatcctagaggaattccaaaaacgttaagacttatcaaagttcaaaacaagtaccgagcaaagtccgtatcaagcatgcgggtttctttttcttacctgtatgctccttcgacgcagtatcctaatagcctaacgagattcttatgccttacacgcccgatagcttccacttccactctaaactccttctcagcttgaccccttccaacataattaaagactaatgatcatcagcaaagaagttgtccctaatccactaaatcacaagggaccatataatgacacaacaaacaccaccttcccaggaccacattcaagtacaaagaacactaaaatcattcctttcttatctttaccagatagcaaaacaaaagctataatcttctaaattcgaaagaatcaattttgagaattggaaaaatcaagaattgaaaattaaaaatcaaaactttatcaagtacctgttgttaagcagattcttgacagcgactttagttccatcagttaaaatcccactataaacaatcccataacctccttctccgatcacattctcttcacacaatccattagtagctgcttcaagctctctaagagtataccatcttccccaaccaagatgcgaaacctcaggtccaacacaaccactccctgaatacgacgccgtttcactaaccgttcctctgctttcaccactcgagactcgatccgagaacacaacacggtgctcggtcttccctatatccacttgaatctccgccgcaacgggctgcgtcggatggcaatggtcttgcgcaggaggtctaacgatctcctgaatctcctttgaaatcggcggcgttgctacggctgcggatgcgaaatcggcgtgacgtggcttacggtttctccggcgagaggttaaacagagggagagaaagaagagagcgatgactataagagatcctagtaaaattccgatgacgacccaaagctttagaccaaagatcgatgttggtttcgatagctcgttgttgattgaatcaggattgaatatagacatcgtcatagaattgatttggttaaaatgggttttcgaatctttcgcatttgtcgccggaaaagaataaactttccggcgaatcaaaatggatatggataataaaaattcagttaatcactgttgcatgtggctttaggcaaaatgacgaaaaacaaaacagagacagagaagaatcgaacagaaccggaaacaggggattgagtaaaacaaagacacgaataaacaaattcaatcgaataaattattattctttacaacaacaaaaaaaat

SEQ ID NO: 30401 - DNA, 680 bp, Arabidopsis thaliana landsberg
ggattcgcaaaactctgttcaattcagcacaaccaaaaaaaccacagagttggtaccgttgaataaaaacgaaaaagaactggatcttaaatattctgaaatctccaatatagcaaacaagcacccaaatggcaacgacacaaaattgataataggtttttaagatcaattaatccttaaacactatcgtgtcgttgttttattttaggtgtaaatccactttaggtgtgatgcaaacagatgagatgtgatcggaagccactaagtcaagtcaagcaatagcaggttttggagtttttagcagtcctaagtgaacatgcagaaaatagaaattcaaacagaattacacaaaacactcggccacaactggttgaagccagtagcagggactggtccagtaactggtcgagtaacagacagtaattataacaactataatcgaccgcacaatctactgccacacattgggtgtggtcgagtaagttggtgataataggtagaaaatgtgaaaactaagcaacacaaaaaaaaatggttaaacaatagcaatgaaatagagaaatcaaatggacgagaaattcttaaggatgaggtaatcaaatggagtggtctccttagcctgctcagatggttaacaaagcgcaatcaagctatccctacacaacaagttcaacaacata

SEQ ID NO: 30402 - DNA, 1600 bp, Arabidopsis thaliana landsberg
tgttgggttcactcgttaaactcttgttacaattgtattgaattagagccgttcattatgacacgtagattcggatctgatttcctttttgtaccgaaattagatcaattgggactagatccatcaaaaacccggtttaggattggtttactcaactgaattttccttttaggttaaaatagtaatttcatccattatgaaaaaaggcaagaattataccgactctcacaattaggtctctctataaatacacaccttttgatatctctccatcatcgaaaaccttgtaaacaaaaatcgccaccacaaaaagaaaaaagaaggaaacgatgtcgaagatggttatgttgctgagctccgatggtgaatctttccaggtcgaagaagcagtcgcggtccagtcacagacgatagcacatatgattgaagacgattgcgtcgccaatggagtccctatcgcaaacgttacaggagtcatcctctcgaaggtgatcgagtattgcaagaaacacgtacttgatgatgttgatagtgatgattctactgaagcaacaagcgaaaatgtaaacgaggaacccaagaacgagctcaggacttgggacgcagagttcatgaaaaaatttgatatggaaacagtcatgaaactcattctcgctgctaactatctcaacgtccaagatcttcttggtctcacttgccagaccgttgcagatcacatgaaagatatgtcgccagaggaagttcgagaactctttaacattgagaatgattacacacctgaagaagaagacgcgattcgtaaggaaaacgcttgggcttttgaggatctaaagtaaaaccataaagttccgttttctaagtgttgatctcgatgttctttaatctttgttgattgcattcgtctctttgaattcatggtttgtggtttcattttgtatttcatcatgttataatgtttaataatatttacttggatttattatatataagccaatgttttatgttaatttcttcctaaccaaaaagcctctgcgattctgaattatttcgccggtagaacagtatacaatacaacgtacgtcgccaccgtttgatgaagatttgggcactgaaactttatcaaaatacatgtgccctagggcttctctctgttacaaaattaaacatttacgatttcttttagccacgtaatgaaaattcataatgaaatgataattcaatgcatacctacacatatcgcatatgtattattttacattaaatgtaataaattaaatcatttcatattttctaaataatgtaatggtatttttctatcatagaaagttatttgtgaaaagtatgaaagcatttaattacatttaatgtaaattaatacatatgggatttgcacccaaaattaaaataaaataaaataataataatccatatgggatatgtggctatgtatgcatgcattgaactataattttcattatctacatttataaattaggtttaagagaggcttcacaatgggtcgatttagcaagaatatataaattattacgggccctttaaagcccataatatactaaacatcccgtgagtgtcaattgtc

SEQ ID NO: 30403 - DNA, 2851 bp, Arabidopsis thaliana landsberg
acagtgttgttgatgctgcatctgcttcggtttttgaaagaagtgctgatgcagctaaagctggttctagtgataaaacagctgcaagaatagctatgcatatggctggagatagaacacctgttaattctaaaatggttagcttcttcttcgtaataaactcggttaaaaggtttgtgtattgttgttaaagcgtttggtgttttgttgcaggtgaagagccgttattcgtcgggtgctgcttctcgttctttcacttcctctgcctttactcctgtaaccaaaaacgattttgaactaattaaagtcgagaaaaccccgaaaaagaaagggtatgttcagtttcagacaacacatggcgatttgaacattgagctccattgcgatatagctcctagagcatgtgagaatttcatcactctctgtgaacgtggttactacaatggagtggcctttcacagaagtatcaggtatgcatacatatatgccttggaaatctgttttgttttaagagtttttatggggcaattaaacatgatcttttgacctttcttctacaaaggaacttcatgattcaagggggcgatccaactggcacaggaaaaggaggtgaatccatttgggggaagccattcaaagacgagccaaactcgaagctgcttcactcaggaagaggcgtagttagtatggctaatagtggacctcacacaaatggttctcagtttttcgtcttatacaaatcagcgacccatttaaactacaagcacacagtgtttggtggagttgttggtggtttggcaacactagcagcaatggagaatgtacctgtagatgaaagcgaccgtcctcttgtaagttccaaaaactcaactcactgtgttctttagtagtttctgtctcctgagagtattttgtaatttctgcaggaagagattaagataatcgaggcaagtgtgtttgtgaatccatacacggagcttgatgaagaggaagagaaagagaaagctgagaaagagaagaatgaagacaaagacattgttagtatcatcccttccaccaaatatgatctctctttgctctcttactttggattggtctgataagattatatatgaactatgtaatgtatcaggagaagatcgggtcgtggtacagcaacccgggatcaggaacaacagaagctggagcgggtggcggtggtgtcggaaaatacttgaaagctatgagtagtacagccactaaagacactaaaggttccctagactcagatatttcaaccattggagtgtctaagaaaagaaaaactactgcgtcagcctccacagggtttaaagatttctctagctggtaattgaaaacattctctacctactttgtaaaaccgttgactagttttgatagagaccaagtcacaaaagcatttgtatgacaacactgagcctttgatgtccaaaatctggagctgtgtaataaagttgactagttttgatggagcccaaaagtcacaaaagcatttgtataacagcccaagtcacaaacgcatttgtataacattgaacctttgatgtccaagagctgaggctgtatcttcagtaaaaagatttattaagtataatccttacaatggtgtgtatgaatgccaaatctacaaaacaaatcaacaagacaacaacaatgatcagcactgacggatcagtaagaacatatttggttatttgtatgtctttaaggcagccgccatttactgtgccagtagatggacactctggaccacgatgggaacccgaagttgaactccaaaggctggtcagcaggtccacctataactaacggtaaccacacgtatctggaatcccgcaaatcagccgggttccacctatctgccatgaatataaacgcaccgggaacaccaggtaaaggaatcacataagtgctctgcgcaaagaatgttgttaaccggaaaactttgttaccaccgatacacgggttccccaatttctcccatggacccattatagattcagccgcatgagccaaggcttcatttggtgcccaaccagtgcaccaggaagtgaccatgtaataaatattctgatgcttgaagatagctggagcttccctgtgttgtcccaccattactctcttcataaccggtgtcacatcgaggtaatcttccgtcaagggtccaatatgaagcacactattgacttcagacgaatatatcaggtaagcaacaccatcgtcgtctttgaagacagtcatgtcccgactatcgaacccgtgtggacgtttactgtatagatactcgaaaggacctgtcgggctattgctaatggccacaccaactgaagctttagtgtagtttgcatcgtcgatatgcatccacatcacatacttttctgtcttttcattgtagatcactttgggtcgttcaagaacattggatttatgcaaatcatgggtcttgtttgtttcctcagctccgagtacaatgccttcatttttccatgtccataagtcctttgaagagtaacaaccaacaccaataatatcaacctgaagacaagacaagatcggaaattaaaacccaaaatacagacaaaggaccatacatctgaggacaaaggaaacaaagtggaacttactctagctggtcctttcttgtgagcatggtaagttggtccatctttatactctccataccaatagtaagtgttagatttcacgtcaagcagaatccctccgccatgtgcttgaattggattcccttgtgtgtccatccaaattttcccggggaagtaatacgatgtctcgtttcccatatccttggtgggaccaaaagcggcggttt

SEQ ID NO: 30404 - DNA, 2936 bp, Arabidopsis thaliana landsberg
ataaaatatataggaaaggtattaaattgggttgacttttcattttaatcacaaacttttattaatcaacccgatttagactcgtcataaaatattttgatgaaacgcattaacgaggttaactatgtgttacttattatcagttatctccataatcaatctgctgataaatcaacacaatttattttaaaatttttagtcaacaaaaatactgatttaaagtatctaaaggaaaagttaatgtcttttcaaccaaattatttgttaaaaaaaacatattttctaaaataatatgttttgctaataaataaaaagcaatttaaaccgaccgaatgatatttacttttgtactaatttggtttctattttcatcataaaccaaattataataaaaaaaaaatttaaaaaaaacctatgaaacaataacgccggattggaaatagttttttttttttgggatttttttaaattaacaatttgctctaatttctttatttaaaaaacgcagaaaaaaataataagataaaaagaaaagtgagcacgtagttgtcatttgcagatattatcatttgccaattttcttgtaaattcacctctttccttcgtctatctatcctcccttccgcaacattgtaagaacaccaaatctccctctcatttccaattttttgtatatcttcttgtttcatatttagatcatccaatctctaagaatgttaagggtcaaatttttaaatttttttgtcggtttttttttcctctccggtgtcggaatccgacaacgtaaggatgattcacataggtttttaatttttgatatgaaaagagattcttctcgtgattggcccatttgttttgttttgaaattcacaacaatgttcacgttttgatcgcaaatttaatttgatttccatgataaaaattggaactttcttatgttgtgatcatttacaacaatttgtgcgtgatgggttgttctcaatgtaggattttgtttgatgatcgttgggttttgaaagaagagcaatgagttattctggagccggactcggaaagcctggctcaggtaaaccatttatcttagcaaagattagtctttgtatgagagatatataggctgtgactgatttatccaccttgttggttcacaggtaaaaggagaataagggatcttttaactcaatctgataaccgagtctgcgctgattgtggcgctccagatcctaagtgggcgtaagttttgccatttttatgttttgttccagtaagcattttatgcttctctaagcagtttgattgaatgttatgatcttgtttccctacttgtgcattttttggtttgtttcgtttttcgtaaacccataaaactcttggttgcttattacaggtcagctaatattggagtgtttatatgcttaaaatgttgtggtgtccacagaagccttggcagtcatatctcaaaggttgtgactctttgcttctctttctagttttggtttatctttggtgaaaatttgccattggattccattaagatggcttacaaataatattgtggatttgttttctcgctccacttcttcttacagaatctttttgcagtgtatttatagttttcaacttttcaggttttgtctgtgacactagatgaatggtcagatgaggaagtcgattccatgattgaaactggaggaaatgcgtctgctaattcaatttatgaagcttttgtacctgacacatgctctaagcctggacctgatgttaatcatgaccagcgtatgagattcattaggtcagattctaaaacaaaatactctgtgacaggacaaatctattgctgttgtttgtatagtgacttactcaaaatctttatttagggcaaaatatgaactgcaagagtttctgaaaccaagcttgcggattacatccgggaaaggctcaacaaagagttcagcttttcttacatcaagtctttctagaaagatcatggatagttttcgcacaaattcatcatcgcagacgatggtaaagcttcaaacttgcataagttaacgttttctttcttataccttcttcttgcatgtttttaaatcggtaaatttgacagtttcaggaaggaatggtagagtttattggattgttgaaggtgactattaagaagggaactaacttagcaatcagagacatgatgtcaagtgatccatatgttgtcttgaatctagggaagcaagtaagtgatttgctttgcatctttttattagctttacttcttgttgatgctgtgaatcttgagtaaaattgtcttgtttattcagaaacttcagacaactgttatgaatagtaatttgaacccggtatggaatcaagaactcatgctgtctgttcctgagagctatggccctgtgaaattggtaagagcaaattcattttctattgacgatttcagtcattgccaaagcttatatatatatcttacggtttcttatgtttttgcagcaagtgtatgattatgatacattttctgctgatgacataatgggagaagcagatattgatatccagcctctgattacatctgcaatggcttttggagaccctgaaatgtttggagatatgcagattggaaaatggctgaaatcgcacgacaatgctcttatagaagatagcatcatcaacattgcagatggtaaagtgaagcaagaggttcaaatcaagcttcagaatgttgaatctggtgaactagaactagaaatggagtggctacctcttgagcaataaataatcaactatataatagggtcattatatataccaaacaaattttattactgtattcatttattttaacattcccccttggttcttgtttgacaaatttttgaaactttgatctcattgaaaactttctttcgtactttgttgatgtaatgttcttg

SEQ ID NO: 30405 - DNA, 3454 bp, Arabidopsis thaliana landsberg
  unsure (1)..(3454): unsure at all n locations
aaacatccacgctgcaccagccaactcattctcccaaatctcttaatacaaagaacaaaaattggcccgttgcctcacagatgaaacaaattgaaatcaccctggtcagctcagaagagttacaaagcaagaccatttacagatacagcgaatttaggaggtacattctggttgctagagccctgccaggtcaagcaagagaaaaggttaagaaaaaccagtatcatctccaatgcagcatctacaccgaaaagtttcaaatgaattgaggaaccttatttgctgggtcaatattttcggtatcaactctaatacagatgaaagctctaaaattaaaaatctagcaaactggactttgcgactcactcctttcctctgatgagcaaacaaaaagttgcaagtaattttttttaactaatttaacttctactacatccannnnnnnnnnnnnnnnnncccaagttatagttacacagactctctacacactcttgccatatggaagactaggttagtcagttaggttcattaaaaacaatccatatgaaaaggtgatcttgggacaaacagttaaaccgaggggaaatagatgcaggtttacctgcgtgttagagtgatacattctctatccaggaccccaacagggtgtattctgggagcatcaatgctgcctgaaacgactgcaacatgagaaagttcatgcttgttcatgattgtttgggcagcgagaagatccatatcaggtgtaacagtccatggcactttacattttcctccactcctcgaacagatgtcattaacaaaaatatcctaagccaaagaaatgcttcaattaatgatcaaagaaatagttatttcagactattcaatttcgtaccttgggtctattatttccttcttttcttgctttgctgaattcctgaatgtctgaaagtgtaagtataccgagaaagatattgtcaggatcaacaatcaaggcgcaggattgtttctctatcagcatacgagttaatgcctcttccaaagaagtgctcatcataactgtcgcaaatcttgttcgcatggcttctgaaacaaaaatactcttcggcagctcctcagattggttgagagaatcatcaaggcaaagagaactttcaacttcacaaaggttattcgttgatgattcatcatcagatgacgtcagagactgtacagcttcttggctctttcttttcctagtttcttttgtttctctagtttcttgtctctttgattgtccagatgtaatccatgaagacatgcctacagctcccagtagaggtaacactatacgataatcctgtgtaagttcaaatagcagtagtactgctgtaagaggaacttgacaaacccccgcaagtgtagcagccattccaacctgttaaacaatgagacaaacaggatcattggcaatgaagctacaaaaaactagcatccattctcagttaacccgaaaaaatattctgttcaaagtattgataggtaaccaatcaagaaagtctgaaattaagacaattttgaaacattgaccacataagaacagtaccagaccataagcttgtggagatgccacttccaagatagagagattgaaatcagggttctgagccaaagcaagtccaataaactttccataggccattcctgctgccccgccaataaagagagaaggagcatagtatccaccgacaagtccagaagcccgacaccatgcggttgcagctatcttgaccgctaccagctgaagcaaaagatcagctgaaagacccttcacaaatggacgtttctccaacaaaatatccacattctgaaaaccccagtataatacttcagggtataccaaagctatgataccaacacttaatccacccattacaggaaatacagcctttggtatcccagcatccttgttaagactgtcaacagcagatgtcatggatgatgtacatcgagataatgccaacgagaccaagccacacagagcgcccaataaaagatagagtggaagttctgaaaatcagtgaccagctctcataagtttggtttctggttcccttgcgtaaaaagcataagaatggcaatgcatattacctccaggagagcggaagtcatagtcaggaaccttaaacgcaggttcagagccgagaccgatttcggaaaccacagaagcagtaacagcactaagaataaccatagaagttgtgtttggaagtgaagttgatgaatcagttgatgaagaaggccacaaaacggattcaactgcaaagaagcatccagccacagctgcattgaaccctgtaacaacatataacaaagtcctcttaacgaatcaatcaagagttccatacgcaagagagaacaacattagcaaatatcagatgaacaaaccagaggaaatgccagcagctgagccagcggcaagaagtgagaagccagtctgaggacttttattgaacagagaattcacacctttagcgattgacgctccaatttcaacacttggaccttccggccccagcgaatttccagtcccaagcgtcacacatgcggcaacagtcttaaggaaaggacgcaacactgcctttacgcgatcgagactagaatcagaatctccagtagattttccagcagattctcgaagctgattgaggatgctcaccaccaaaccgccgatagtcggaacaaggataacacgcaaccaattggaaccgatcggtgcctctctaagccacgaagctccacgatcaggaatcccatcccaggaaaagtctcgaagcaagtgaacacagttgttgaatagaaccacactaactccagtgagaacaccaaccaaacaagccgacgctatcgcaagctcctgagacggctgctgatcaaatccaacctcatcctgatcagtctcctgcttcgccgccggtaaacgcgggaaaattctaccgccaatagcgacggaaccgaaaaacggtgaaaggacgacattgaactgaaaaggaacgtcggttttgtgaattggagcgaatctccgggaagagacgggagatcggagggcagcacagagtggaagcgtggctgccatgaacggctgcttccgtgaagtgacgcgtgtttatccattaacggataattgatcttaaatcacaaatcttacgtggctgatattattattcaaacgcatgggcttgggccttgaggtaaacaggtttatatgggccaataacaataaatttgattaaaaataaaaggcctcttagctttaggttcaaacttcaatggagaagcagtggctgttgtccctcgcagttgatcttcttctcaatccaaaatccagctgataaataaatcatttttctcttgtcgtcatactaaaaaaaaaaaagattatctgtatttcaagtttcatgagcgtttgccaccacaacattgtctgtcgggt

SEQ ID NO: 30406 - DNA, 2800 bp, Arabidopsis thaliana landsberg
agactcattcggcacactatttctctcccgcggccatcattaagtatggacacagatcaagctgaatcgcgttttcctcatcttgtgatacgaccaccgacagaaagagaacagcctcagaagaaacttgttataaaacgttcgaaagagatgaatgatcatgacatgagtagtcttgaagagagtccacggtttgagtcccggaaaacaaaaagaatggcagaactggcgggttttcagaggcagcagagctttagattgtcagagaattctctggagcggagaccgaaagaggatagagtatggtgggaagaagaggagataagtacgggaagacatagggaagtaagggcgagaagagattatgatgatatgagtgtatcagaagaacccaatgagatagctgagatcagaagatacgaagaggtaatacggagtgagagggaggaagaggaacgacaaaaagccaagaagaaaaagaagaaaaagaaactgcaacccgaaattgtagaagggtatctagaagactatcctcctcgaaaaaacgatagaagattgtcagaaagaggtcgaaacgtcagaagccgctatgtgtccgactttgaaagagatggtgcagaatatgcgcctcaaccaaaacgacgcaaaaaaggagaggtaaaattctctttgcttccatatttcactttgttcagttgaagtaaatgctctatagccacgtagcatgctttcatatgtctacataacctcaacctttgtttgttttctctcctcaattcaattaccaacaggttggcctagcaaacatcttggaacgcatagtggacacactaagactaaaagaagaagtgtcacgtctcttcttgaaaccggtatccaagaaggaagctccagattatcttgatatcgtggaaaacccgatggatctctcgacaatccgagataaggtacggaagatagagtacagaaaccgagaacagtttagacacgatgtctggcagataaagtacaatgctcatctttacaacgatgggcgtaacccaggaataccacctttggcagatcagttactggagatttgtgattacttgttggacgattatgaagatcagttaaaagaagcagagaaaggtatagatcccaatgactgagaaatttgtaagatagaaatctgtaaccctttctttaggccccccaaaaatgggtttcttagcttagttaactgttttgtacgaatagcaacatttccatatcccatatctgtgtaaagaatcccaagtaatgaaaagtaaaaaaaaaaaaaaaaatcttcttttgttgtaaaatttagagggcttccttaatagctagtggattcgatatacggtatatcatataccaatgaaatttatatttgtgttacctactaagttctatttacgataacaacctaatgggcttgaattaggcccatttagcaaaaggtagcttcaacacttgaattccgcaacgtgagacacaacgggcaagctaaagctgtccggtcacatcccgggcagatgctcagatgccgacacggcaacacaaccaccgttgcctctctttcccggcaagctttgcaattcggccgctttactctctccggatccacgtacaccgactcggcgtcatccactccgctgattgtggtgcataatagcccttcctccgccgctctactatcctgcgccgatacacatccaccggcgcattggttaacggcttgctggagctgagaaagcagcgacgcggcggcgtcttcgtgcgctttagctctctcttgccatacttgcacctccgctctcagctgcgagtcacgtgccaccagctcattgtgacggcgcgtggctctctctatctctacctctttctccctcagcttacgaaccaacgactcttccacggcaccaagaagcgctttatagtgcatcttcctcttctccgctaatgtacgccgtagctcctccgcctatacaaaagaaaaaaagttttacactttttccgatgagaacaaaatcaaaacttttgcgtaacccaaatcgtctcgtacgaaatcaaaacctgggcatgaagaaactcatcaagttcttcgctttgcctattgatatgtgcagcaaaaacatcttcagacaggtgactaatcttttgtgcctgatcttcgccggaaaataatcggagtcctgtatgaaccatattcgacggtggatgattgtagttgtgtaatagagataagtctataacttgaggaaactgatgagactgcataggtaataagtgatgattgttcgtttctcttcttctttttctctgattagaacctataataagagacatacacacacattctcattttgtctcctaattttggtaaattttaatggaaaaaacaagagaacttttacgaacttccattgttgaataacatattggtttgatcaagaaaatctccagctgcttgtgattgtaatgtaaaattactatgttctttctctttcccgtttctgttcacacaaagaaacataaaaccgtaatcaataagcaaaactaaaagcaaataatgaatttacagagagaaaatgaaccttttattgaggaagaggagattggaggaatggtgttgagcttgaactgccattttaatgatacaaaaggtatatgatgatgtgatcttaaggtatttgaactctgtctctgtttttttctgcacctttcactctctctttaaatgtctataaatataggtttaataatagtgtttctttagggttgggtttgttcgttt

SEQ ID NO: 30407 - DNA, 1170 bp, Arabidopsis thaliana landsberg
caaatgagattcatcggcttgttgaaaactctggaaagcatgacagctataagggtagcattcttttaagatctgaagatgtcgtagatacctcagcgaactggagagagtgttctgttaagactctttttcaatcttcgagaggggatgcgtcaaacagttacaatctggttagcagctcggacaagagagagggaaagaagaaggcagacattagtgatgtgagggtggcaatcaaggagcaggagagtgaggtggcaagagctttattctttggtaaatctcaatccacttttgatgacaaaaatatcagtagcttaggttttccacttgtatatgatacccgcaaggaagagtttcctaggcttcctcctgttaagctcaagtctgaagacaatcctctgagtcttcactgtgaagaaaaatttgaacgtgatggttcaggtccaaggctaatcaatgatgaggacgcccttctcataggctcataccttgatgttcccattggacaagaaattagctcatcaggttagattgcatgacaatgtagccgtacaactgcaaagtttccattgtgactgctgaatgacagtgcatgcatttttctcatacccttcattcctataggaactactgtggttatcatatttctactctgcgaatctgctgaagtaacatgtttgaattttgatgaactcatgaattagaacaatgcattggcaaattaccagcatcagttccaaagaaagcaagtaattgtttagctttttgcatgtatctgcaaatgtttgctctcattgtcttcctttcccactctgtttttttttttgatttctataaggaccatgtcgcttcactttctactttttttttagttcaacttgaaccttaccagttttacttcaggtgtgaaagtaagttttaatcttctaattatttcatataggtgggaaaaaatctactgggggaaactggctttcagtaagtcagggaatagcagaggacgcatctgatcttgtttcgggttttgctactattggtgatggtttaagtgaatctgttgactatcgtaatgaatactgggactctgccgagcccgaggatgatgacgacattggttataacagacaacctattgaagatgaaccatggtttcttgcccatggaatt

SEQ ID NO: 30408 - DNA, 2550 bp, Arabidopsis thaliana landsberg
gacgtagtgttttttgactttgcattaacaattccattgcttggtctccataatccaataattctctcttcacttccaataatattgatgacgtcaaacactgatgattctagctgcccgttaatgagctcaaactctccggctaaaccattgaatcttacattcgaaagagccttaagaagacttggaccgtagcgagagacccctaatgtccccaaatttgtcttattatttcctgaagcgatcggatgatcataccgcaagctctttatattggttttctccacggccattgccaaggcagtgatcgaatcatatgcccttaacgcaaaaatgttcatctcttcatcattccccttcttaggaaacattttttcccatctcaatctgaaatttttgagcttcttcgatttggggatatggctccttacacccaaaaccccttgcatattctccaagctgctaccgcgttcattagatttcaacaaattcatcactccatctgtcaataaccatacatatccttcctccatcataccaatctctctagctttctgaaaaaaccgaaaaccgagagttggtggcatgtggacaacgaataccctcgtctgcatcgtcattagcttataaagctccttgagaatttgatcatcagtagcctcctgagggatccaacatctattgtctacaaaagcttgcacgtcttgtagagcgtcagtctataatggcaatattccttctccgagtgcgtggtccgcataaatggcaactacgtttctccacccgaaggatttgacaatggccgcaatggctttgacctgggatgagtcatcgagagtggctcggacaaagtaagggctgttgatggatgtcagaagagggcatgttgcagagaatgtgatggtcggtacttgtgatttatcggcgagtcttatcatgaactcagcttgcatagaggttcttggcccgatgatggcgctcacttgctcgttcttgattaggtccaaggctgcttgcaccacaagcaaacaaatagaataagaaaattatagaggttaaatttatcactaaatagtaaattaaaatttatcagatttttgggaactaatgagtgaattaaaattatcagacaaataatgtttacgcatgagttaaaatgaaaatatcaaatgtgtcttactctatatttagcactttattatggtttattatttcataaacaaattgcaaaatgtaatttgaaaagatgctactttgtaacctattttccgtccaaaatcattatcacacttatcacagtaatgataaaagttaattgtattttactaccacatccatatgttacggaaattcatatcttatatatatatatatatatatatatatatatatatatcaaatcgataattgataatccgtttagtgtgagaccctcatttcaccacccactgttagagtccgttcgccacttgacatataacccagtagcaccaaaatccttatccgtcatacataaatgtcaaacaaccaaacaaaaaaagtgacaagaattgcttcaaattaatagaaaacaaatttctaccaaaccatagatttgtagcaaatttggggaaaaaaataactaccatgattcatcattaattgtttaatttgtttaaaaataaatagttaggaattgattaccggcataagttcataggtactgaaacgttttattttgttaaaaattagatattgtagttgcttgtctgaagccaataaggttgataatagctatgcatatgtatatggctattatatatggaaatagcctaaattttgaagccatgtaaaagattggtcagactaaaagaaaatagtagcccttagatattaaatcatgtctggccaaacgcttaattatattcctaattaagtagagcgtacatgtttcatccaacaatcaacataaactgataataaatcccaataaagatgcaagagagagaagaaacgaacctgcagatgaggcctggacaacatcttccatggaatctctaatgtgaatcgcaagtctcgtggtgtaatcagaatgatatttgtagaaatcggacaacgatatgttaatggaagtgaggcagagcttggaaaatgaagtgtggagatcaagcactactcctactttgatttcagttgtttggttttgtcctaaaccaacctccatcaacacaaaaccacaaacgaacaggacaaagtaatacataaaggtattattagtttttctagggttcatcactttcatccagattgaggaactttatgtcattctttaacttcctcttcttttttattgttctattgcatatatacacacacacacatacatatatatatatatatacatatatagagataaaataaaatatgaaaacaagaatgtaaaagaaaacaaacgaagttaaggtttgaaagtgacagaaaaaaattgtatggacgataatatgagctcgctttttgtcattattctctaccattgtcactccttttttttaggctaatatacgtttactt

SEQ ID NO: 30409 - DNA, 2191 bp, Arabidopsis thaliana landsberg
aacacgacacgttcatttgactgagctacaaaaccctgccaaacaggctcagtccgcatcgaattgagcaagtcctcatccattaattgcccatcatattgggctaataaatcgtttttcttacaagctggataaatttctgagactgtaagtcttcggtcattttctgaagaaataggttcagcatcttttgattggagataccgttcaccggataaataagactcatcctctgcataagactgatcatcctcgtctttgtttgcatctctatcatggtgatcaggacttccacgggtcgtacctttctcatgatcacttggataatcaatttcgtgggcaagaaaccatgtttcatcttcaataggttgcctgacatacccaatgtcgtcatcatcctcatactcgtcagaatcccagtattcattacggtagtcaacagattcacttaaaccatcaccaatagtagcaaaaccagaaacaagatctgctattccctgacttactgaaagccagtttcccccaccagatttttttccacctatatgagatcattaggagattataacttacattcacacctgaagtaaaattgataagattaaggttaaactaaaaaggtacaaagcgaagcgacattgtccttgtagaaagcagagtggggaaggaagaaaatgagagaaaacacttgcagatactataacatgaaaaaaagctaaggtatgaagacttagcagttgtgcggctgcattgtcaagcaatctaacctgatgagctaatttcttgtccaatgggaacatcaaggtatgagcctatgagaagggcctcatcatcattgattagccttggacctgaaccatcacgttcaaatttttcttcacagtgaagactcagaggattgtcttcagacttgagcttaacaggaggaagcctaggaaactcttccttgcgggtatcaaatacaagtggaaaacctaagctgctgatgtttttgtcatcaaaagtggattgagatttaccaaagaataaagctcttgccacctcgctctcctgctccttgattgccaccctcacatcactaatctctgcctttttctttccctctcttttgtccgagctgctaaccagattgtaactgtttgacgcatcccctctcgaagattgaaaaagagtcttaacagaacgctctttccagttctctgaggtatctatgacatcttcagttcttaaaagaacgctacccttatagctgtcatgctttccaaaaatttcacctagctgatcaatctcatttggtttctttattttcgacccggagttccctttactagaatttccagacaataaagtactcttattgccaaagaaaacgatatcttcaccagtttccactatcttcttatcgatgtcagccaactgttcgattgcatatgaatcaaccaaactactactactattatcatcaatgtttccataaggctccaaagtaccattgccggaagtaaattcataggaatgagcatcaggaggagcagcagcatcacctgaattcttggagaatgtaaagctcatctcacttggtacaaacgtttccttcttgctcgggttctcagcagccgcaccattttcccacttgataacagacccagttgtgctagtcccacaatctacttctttcacaaccagctccttggagacttcactatctcgagaacctgacctccgaagttctttaccattagctctttcatttgaatctttgcttgaatctttttcctccagcataagtttctgaagaaagccattaatgtcagaccggttactaagctcattacgcaaagcttcctcagcgttagagaaacgattattcctaagaaactctaaaatcccatcaacagagctttggtctgccatttattgaccttttgcaataaaatcccaccaattctgtagtaaccaacagaaaagataaatacttttctctgttcagatgttgtctgatacacgaaaccctcttaacgaaaaaaaattgaagaatcaaaatctgcctaaaaccaatactttcagtcacatttcagaaccaagccaagacaagctttttcaggcagacaagactcacgtttgaacataagaactccaataagcgcttaaaagctttaaaaatcctcagagctgaaggtccggagaaaga

SEQ ID NO: 30410 - DNA, 3903 bp, Arabidopsis thaliana landsberg
tccaagcacccgattcaccggaaagccagagagtttccaagcaacgtaagtcaaaacatcaacgggattagaaacaatgatcaatatagaatcaggagaagctttagcgagtggaggaatgatatgacggaagagagcgacgttcctctgaagcaaattgagtctagactcgcctggattctgtctagcaccagcagtgacgatacaaagatcagatccagcggtgacttcgtaatcaacagaagcggtgatcttagttcgagggaggaaagcagcggcgtgttggagatcaagcatttcgccacgaagcttatcgggtttggcgtcaacgagagcgatctcgtctgcgagatcttgagtgaggatggtttgagctatggccattccgacgtttccgactccgacgacggagactttggtacgtcggtttgaagggagagaaggatcggagttgtggatcggtttgaaaaaggcgctggttagatctagaccactcggacccaagtccttcaacgacgaagtcgatgcgttcttctccatttcaaaaatcaatttttagggatttgatttgatgattctctgtttcttcttcgaatttggtttctgtgaccgtgtgagtgggaagtgtacattttataggcagaaatgacaaatatcagtgcttcacttttttggtttttacatgtttgtccttttatttcgaaattttaaaatgtaatgattatttattgacatttgaacctttgatttgtactaaaaattgacaacttgtttggtccgaatctaattttaaacatgttttggtcggagacaggaagcagcacacagttttatcaaattgttcccctcaagatggttttaccatttagcaataataagaaatcttcaaacttcaataatggttaaaaaataatactctagaaatcagagaagcagcttttgttgataacatggcatggttaaattattacttgcattggtcttgagacgttattgcaaatttccagaagaatggatcaatgttttggaagagtagctttgccttgtcaacaaagcaaacttgacgactttgatagtttgactagtgcatcaaccgacaaaggaaacttattattggtaaactgggttttaaaaactaataaactctttagacttggcatcaagtgttaatagttagatcaaccgacaaagaaaggattttatttgctaattaggttttatcatgtacaaaacgtaattaattctttaaatgtgacaagaaaatgtgttattctaggttgataatgagttcacgggtcgtacactgggacgaaggatgagtgaaagtgatggatttattggtcctataaaactctctccattcatcaatctttgccactttgtgatgagacaaagcaggcatgcatctcctgtctacgatctcaagtatcttctctgttctccccaaatgcattgccgcttctctcaccgacgcttccctcacttccactgctgtaaccaaacacttcattccaataacttgtgccgtgttgcaaaagcatcctgatactatgtccgataccatcttttccacatctttcaacagagtctcctctgtttcaatgtttcttgattcgtacttcatcaaaagggtttggctgattcggtacattgagtttgctgcttgagtcttgatgggccagtgcgagggcttatgcttcatgcatagtatccgatttttctcccatgactctgtaaactctttttgtgctatatctaccagctctttaagaacttcctgtggtgttttgctatgttgcttggatagttttcgaagatccacgttgagccatttatggtagagatcaactcctaaccaaacaacttctgcagctttcctgctgttagctaactctccttcgatgtctaagacctcttcgaacttgttgacatagaccaatgcctcgtttacagctttcactaacttcttgagcgagcaaggcttgatgttaggaagagcgacacggtgactcgtcagtgttaccaatggaagggcccaactattaggtggctctccagaggccagagaagaaacctcgtcgctgtcaaaatctcgaatcccttcaaatccttttgagatgaaagttgttgcctccaagagctctatcaagtttacaggttgtttcttccgacccttttgtatcaagtggtctgtggccacacggttgctacgtgccatgtagtccaccatctcctcctctccttcaagatgcagaacgaattgtctggttgatggatttgaaccggaggactcagcgtttgcaacagaatcacttttgaaggtgaaatgaaaacaacatagcaagattctactcgaacaatagaccgtgatgaaacggagaaacttgctagccagcactataccatactgtgttgcaatgcagatatcaagcatcaaccggtttaagtcgtgtgcaagcttcctgctgcagcgaccatggagcatccaaaagttcaagggacgttctttcttctcagcgagacactctacccaataactctctactcttaactcatctttcaaagatttcttgtttctaaatggacacctaaagttcactgccttgagccatctgctcgctggagcaacggttcctatggccactgcagctgtctgggagactagaaccaaagtggttgaccatttgtaatcagaatctccattgcagaaccctagtgaccggggttgaagaaagtaagaccggaccatggcttcagccaatgtgattgcactcaagaaacagaggaaaccagtggtggtgcaagtaacagagcgagccatcacaaactgagggctagaagtgtgagccatcatccagaatttcatcagatcttctttaagcttaggaacccctcttcttctctctgtatacgaaggacactgcttcaaagcaaactcgtatctcttcttgtacttgagctccaagaaacgctttgtggctgggacagtgatagcagagaaactcaagatcataaacatcaaaagcatgagaataatgaccagagcgtgttcttgagggaacacatatatagctcctgtacccaattggatacagatgttaacaacatcggtgatgactagaatcccaagagccgtgaggttcatgaggagatcttgcgtgaccatgtaaccaagagaaggcatggaattagccatcacggtgcatacgaagacgctgctgctgagtttagcaagctgatcttggcgactaggcatagaagtgttgagatccaatgagagtttgacgcatacagagataaaggtgagagtggtagcgttgagagagaagaatttgcaaggaaaccagaacttacggtgccggaagccgtgaagaagatcggaaaacatagcaactccacagatcagtgaagctgtagcgacatatacacctatggatggcaacggcttgctgaactctgtgtcgcttagatttccatgtgagtcgcaacccatcactagatttgtctcactctctcgattcttctatttcttcgtcttcttctatggagagagagagcgacagagtcgtgtcttgatgttataaaattgttcagaatcttcaaagaagttactagctctgtccagtgtccactcaaagtcataagctttgacttgtctctagttagactcgttcaaaaacgaactgttggttgcgttcacacattaacacagctctaatctaataacaaggctctttctttctacttacgtgttcgtctctccacaacacgatcctactcctaccctcataacaaataatctacaacagtctatttttttgtcaacaactaacatgaacaagtcgcattacaagataaccctttaatttttttttgtgaatagtaacatctcctacctttttt

SEQ ID NO: 30411 - DNA, 3189 bp, Arabidopsis thaliana landsberg
  unsure (1)..(3189): unsure at all n locations
attatgatcaaaacagttaattacagcaaaccaaacaaaatcacgtcaaaatcgaatgtcaatattcctcttaatttgccagcaccacatatcttcatactattttaaatgaatttttttatattaacaaaataaatatataattaaatgaaatagaaacagaaaatgacccttgaaccaatggaaaacttacacaatttcatgtttcacgtcccctaaaaactattgttatggttccatagaaaaatcattgaaccattctctcctacggtttccattgaccacaaaaaaaaaatcctgaagttgtggaaaatttccatgaaactcatgtacccaaaaaccctttatttttttctacactcaagtttcaattaactcttctacgattcctttgaaaattatggtaatgtaggatttcatggaatttaaacttcaaagttcttcgatccccttcgagtctccaatacctactagttccataaaattattttgatagttaagattgacattagatctcactcatatattattacttcattacttaaacatggtatcattccaaaatattatttgcttccataagaacttttgtaattaaaagtcaagacaaaatatgcaactagtaccagaaatactaattcattagaaatggagttcaacaatttgtatgattatcagaaattctaatttattcactagaaatggattcaaacatttaatttatgttgaaaacataacatattaccatcgatctatatacatgtatagtgattgtcacatacacagctatacataacttatgagaaatatcttattctacgaggaagagacgacagaagaagaagagagacgagagatttgatccatgaggaagagcatgcgatcgtgatagtcacgtgcctgttctaaagactcgacctccagctccgccagctgcgagcagagttgctcttccgcctcctccgccacaaccgttcgctgccacaacttaatcatttctgtcttcatctccgccacttctctcgagagctctatgttcctcctccttagctcatccatctcttccgccgccaccgtcacgcatcctcctcggttcgccattaaatttaagattctttgtgtaaaaggatttgattgtggttctaactttgtttcttgatttgttgagtgttagggtttgattatgtttctttaataggcgctttgtgtagcttttgcatgtccaggttcaatgtatctgcttcttgatttttatttctcctcacttttgatttcggtcaatattttctccttacttgaaacttaaacatactcatggcttatgtatgcatagaccaccccaaaagagaaaatttactatgtttttagaatgttcaattttttttttcgtttttttatcacagtttcgctaggttcgatttaaatattttttatatgaaacttaaaccaaattaatttcgaaatttccggtttatccatgttattaactagttttaactttaaaattaataaacaaattgccgtctatacaactataaattgataaatggataaatatatgttaacgtgtaaatagaatagtaattaataattctaatgccgtggtttacacaaattcaatttaattatttataaatctctggtccgtcaaatttgtaataaaaatgtgttggtctgatctctgatgtatgtatgtggtatatattgattacattattgagttagtagggcttgaaataggtgacgtctgaagccaatcactatagtgtttctcactttcttgtgatattgtgagtttgtgacaaggatttattctttagattattaactaacaagttaataatttgggaaatactgccgcttaatattgcgttacttatattatgattgaagaactattatgggatatttcacgacattatacatctacaaccactataaaatagaaaattagtgtactatcaccaaaaatatatttctcctgttccatgaaatttgatgttttagattttatttttgttccataaagattgatttcttaggttaatattattattattattattactgactaatagagagagaaaagaagtagaaatgatattattaaattaacaaaaaataatataaataacgtaaaagttatttttcttaatttgggtgaaaaacccaaaacattattcttttaggaacatagagaatatataatagacatttaaaacttatacatttgttgataacatgcagtatgttagtttgaatacatatttttcacgacagtaataataacagttgttagaagactaaactacattgtaagaatcgctttctcttgtaatgatacaatataacatataacatttaaaataaaataaaaatctgtaggttttaaaatgttagctacgtagtccataacttcaaaaaaccaatggttttgaactcattccatagtgatgattgcaaatacatattatctggtttacaaaaaaaaaaaaaaagtgttccaattatctagaaatgttgggcataatgcttaaacagtaagcccatatacttaaacatccgacttggcgcatttgctgcaccttctctactaaaaaagcgcgtgagattcaggttcactgtatacattaagagcctattgtcttgactcctgtaaaaccagaagaaaacaaaaattcaacaaaggataacaaggacgtggctattcttcattggctgcattcacaagagtcgaatattaattagtaatttcacagtatagtacattaagatttacgagacctattgtctcctgtaattgaggcaacaagataagggtaaaacgagaaaaacaaaagagaacaaagacgtggctatttatcattggttgaattcaatattaatttaattagtaatttcacagtgttctnnnnnnnnnnnnnnnnnngtttcttctacctctgaaactctttttgtttatgttgatcatcatcatcgtcatctgcgtgtaaaacacactcacgccatcgttgacgtctcagatcttcacataaaagcttctattatcaaactctcttcctcacggtaaccctaactatctgtaatttatctctctacactttcttcatctcttaatcaccttaatcatcttaagcgttgtatttctagatccttctcccagaacaacgattcgtgagtctccgtctc

SEQ ID NO: 30412 - DNA, 4702 bp, Arabidopsis thaliana landsberg
ggatcacgcctagctaaaacgtccacacacacacaaaagacacattctatacaataagtcttttccattacctgttgtaaccaatcccttttgatagttactttctctcgaacagatttttcgaaaaaagtattgaaatcaaactctaggaatgggttgttgtatcagcaaatgctctccaaagtcgaaagatttcaaagaagcagaagaacctcacgagaagtactgttctgttccagagaagatgttcatgtctcgttgtccaagtcgtgtttctccacttaatcttccggagaaaaaccggtttcatcctatccctgtcccgaataagtttatcaatatcccgggtaaagtaatccctcccccttctcctgtgaagttggcatctttctctccaatccaaccttcaaccacaagcaactcttctctcagctcatcaaactcgtcactttcgaccgcctcttcagtttcggtttcgaaggagagatctttctccaatgatttcttgcgtgcttgttaccaagagaattcacatgttgctcgaatcaattccttacgagaagcttctctatctatgaaaaccacaaaaccgagatatcctagccggtttgattctccggttataccaagccggaattcaacaacaccaaacagagcaaatgaagattctaaaagaggatcaaattgttctaagagaactcgagagctatcaccaaaccatcgttcattgacacgaacaaagagctttcgtcaagatcaagaaagagttgttatctcttcttcatcaaactccttaaccaagggaaagtacttgaaatctccatctccaagcagaagatatgagggaaatttcttgaaatcaccatctccaagccggagatttggtgtagccgcggctagtttgacggtctcttcttgtgtaaggaaagatagtttagatctgtctggtcgcaagatttgtcatatgagcaacagatcagagcctcgaatacatcgcataagttctaagatcgaccaaacaattatcagagaagtaatcacaaaagatagggaaccagtggttccaatatttgaagaagttggcaatcctttgattgatttggattgctttatctttctttaaggagaaacatttgatttttattattgtttctgttgaagatgtgtttgtgtaaacagatatgttgtgtaattgtttgagacaattcccactttcttttgtttattgtaggtttgtgatgatcaagtagatcataactctcatacttaactttttttttcaaaaatctactttttatctgtatgcttttgaaatattttggattgaatacagctacgggagcttaattattgccatgtcttttaaaaaaaaattatactttcaaatcttcaaaaattctaaaagaaaagaaatgcaattaaagagcgaacaagaaaaacagaataacgacatacggtgcgttttggaccttgaaagtgttgttcattaaaaaggaaaacgcagcgtttttggatttcttgaaagtcttactttcttggtagacagaaaaaaataatctattttgatgtcttatccaaatccaaccaatgaacaagcagatataaattgcaatgctactacaacactatcccactctatcttctattagtgtgttaccaatttttgttacatctcttgcttttacattttcttgaattagccatggtggcacattcactcgttcctctctcaccggctgctcacgccgccagactctcctctccatcgccgctgtcactgccgtattctcctcccgtcgtccttgcagttccaccaattaatcgcaggtgatcaaatagataactgttggaaaaaattaatcaaagtctaagaatgttgttatgcttgtttatatatataattatatatatatcaaaaccaatttatgaatagagtgaattacaatctttttgtactagattagatttcttaagtgtttgtgtcaatgattaaaaatccaatccgcactgatattttccaaaagcacattgttcatcaacccaaaaggccaaaacactcttctcaaatcaaaaccggctaaatggaccgggctggtttaattcaaatcggtgttaaatctatgttatatttgtaaaattgtttaaatatgtttaccatttggcaaacgtacatatttcttaagtttttactgattaatattttataatattggttattttaaaaacaactattttttttccaaattcgatcagaccggttggaccggatcaacctcacatccactttgactccggtttttgcttttagtaccgtgatcgttgtaagattcctaaacaaaatcataaatggaagaatctctatgcaggacaattttggtggggctaggcggtgcgctatggagttggaacactctggccgctaaggaggaggcaatggcggcagcaagacggccgcctccaccaccacctaaggagaagaaagatccgaccgtgaccggagttcaggccaaggtattggcgagtaagaagcgtaaagaagaaatgaaggcttccattgctaaacttagagagaaaggcaaacctgttgttgaagcaaaaccatcctcttcttcttcagaatagcatccgagcaacaatttaaaccctttccattaattcatctgtctaccaaattcatccctatgatgttaattcactactatatttcggtttattcttatgctgattttgtggtagtaaattcaaaagcattctagcttgtcagaaatcatcacaattagattacacaattttttggtagttattatgaaacttttcaaaacaaaactcggaaatcagaataatttatagctgaaacatattttgaagaagacaaaaagtaacttatattatcatcaatttacacttacttttccaaatgaactgtgttgtcggctttacgttggaaattaaaatacagattttatacaattaaactcaacgacttaaaatttccaacgtaaagatttttcacttattaccaatgctcaagagtgtttaagagctaagtggacggtttagacatttatagcataacacattatagatgtaaataagtaaaactattatagttgaaaacatataaaactatctattaaaattatagttgtgacttgtgaaaccatttcttttttctttttagcacattttttttttgttgctaaatatgttaatatcattataaataagagttaggttttacaaaagagtagtacttatgaaagagtagccaagacaaaaaagaataaaaacaaggctacaatagataatgaaagacttggggtgactaacgaatccagaggagcattaacctttgccaacacttccgatgacgtctcaaagtgattatgttgcgaatttcacggtcaaccaatttgaagataacaaacggggacaaacgaatggagttatgcaaaacattattttgctgtcgctaaatgctatagatgactgcctgagctgataatttccggagaagagcacatttggaaaccaatttttttctttccttgtagcatatttggaaatgaatcagatttgaatgattcaataatatatatttctcctatctttttactttgttgtaagatcttaactagtattttgtaatatatatttatataaaagaaaaagaaaaattgtgaaattttcaaatatgattgaaaaagggtatatattttattgtaaaacattattattattttactttaagagataagttttttttggaaatgttatataacagtagttgatagaaattcaattactagctagcatattctgagaaaatattgatttttctgtttttttggagatgtcatatttagtagttgcacaattagaaaactaaccacgcgtcaaaactcttatttcttaagtaatatttctaatgatacgtaaaacacttggcaccaatgattaataaattacagtgttgcaacacacaatattaaaaaaaattcactcctacctaaaatattattccatgttttccacaaagattgatgttgtggtttttttttttcataaagattgatgttatgtataaattaaattattattattattattatttaaaccaataaatagaaaataaaaataaagttaatattattaaattaataattaaaaatataaaaataactttttcttgatttgtgtgaaaattccacaacatcaaatttggtggaacagaaaaagtataatttttttactttttcaacactaatatgatatctatatcattaatatataagaattcagtgatatgatatctaattatctatatcatttagatttcattcaatgatataataactgtaggcagatagtttactttgattagtttatttccttcaacgactggtatatatatattagtactctttgctcacaatatatctaaattgtagtcattgtataagagtttagataaaagagagaaaatgttatctaatctaccatatgatttgatagatgaaatactttctagggttccaacaaaatctctcatacgactccgatctacttgcaaacgatggaattctctatttgacgatcatggattttctaagaaacactttgataatgccatgaaacaaaatatgtttatcttattccttgatttgaatttttttacgattagttgtaacccaaaacggga

SEQ ID NO: 30413 - DNA, 4178 bp, Arabidopsis thaliana landsberg
atatgaaaactgagatccgcctaaaagtaattaatttattttagtcaattctcaactctacatttacaatacatagcagattgctattccaaaatcaggatatcaaatgggctcttgaattcagaatgtattatctacaaattctgtttaagaaactcctctttaagtctcttgtgaaggtaaatcccatatgagaaggttaagctagctcatgagaagcaatgcttcacgagttcggcccaaaagactcaaagcgcttgctgctatgtgatgtccagttagccctgcaagagcaagctgctccctaggcgatgcttcttctatgtagccatccggtaacacaatgggtctccactacacaatgttaagagcaaaattacaacttaaaaccaaaaacaggtgagaacatgaggttttgatttgtctctctaccttgatattcccatcgagctggccatcgagggctatgaactgcgccacatgagaaccaaaccctccaacacagccctcttcgacagtgataaggaatttgtggttctgacaaagatcacgcacaagcttgatgtctaggggtttgcaaaatcttgcatcagctacagtcacgttcaaaccgagtttcgagagaagcgagtgagcatgaagacaattctgaaccatcgctccataaccaagtaaagccacatcttgaccttctacgagaactcttcctcttccgatctactctaatatgataaagcagttcttgtgtcaccacggtctgtttttgcaaccaaaagatttgaagattagattggaacttacttcaattggtaatccagtggggacaagataattcatgttgacgatggagcctctagggaaccggaaacatactgggcggtcagtgacataagcagcagttgcttccatatttacaagctcatcctcatcggctggagccatggctatcatgtttggtaaggatgacatgaaagctatgtcaaaagctccacactgcactggaccatcggatccaacaagccctgcgcttgtaataacaaatcgcaccgcctttctctgccgatctacatcatggaccacctaaagaaaccatcaaagacactaaggccatttgcttgtaataaaaaccttttagaacaattttattttgtgctagaggaaagtgaaacctggtcataagctctttgtaaaaaagcagagggaataatacaaaatggcttgagacctccagaagaaagaccagcagagaatgtgacagcatgctgttcagccattccgacattgaaaaatctgtctggaaatctctcctgaaatgtaagaagtgacggatccatctccattcctgcatgaactacaacaatatctctatccttttctgcctccatcaccaaagcctcaacaaagcaatcactgtaagtgcgtctgtctgagacaaaaaaaaaaactacaaagtcaagattttggataagcatatattctcagaaaaaataacataaccagacagatatacctttgaccatgatgttctttacggtttctgcatctcggtttccctctgtgatcacgtggactcaacacaggacccattgaatctagagaagatacttctcggagaacacaaactagatcttaaatggtgtgtccatcaacaggaccaatgtagtacaaaccaagttcttaaagagagttgatcctgttggtccaaccataccgcgagcatactcatcgactttggctgcccattcatacattccctttccaattcttttcgtcatagcctgtcaaaatccacaccaaattgttaaacaccaaatttggagcttcaaaatatttagtcatcattaattgttaaacaccaaatttccagcctcataattgtaagcaactacaaagtttcaaaaagagagtatggaaaatgcatactttggctaattctctaaatttccggaaaactttgctagattggattttgctcatgatgctagaaagtgcgctgatggatgccttggatccctcctccatatttggatgtaaagagtgacggctatcattcagtataacaatcatattagaatccaagtaaccagcattgctcattgcctcatatgcttgaccagcagttattgtcacattgtcgatcacagcaacaacccggtccctctttcctttcatatctcgagcaaccgctaatcctaagaaacagaaataaacgttcagcataccatatcgataatagcattaattagctaagtctacttcttgttttacaaaaaaagtaaaaagctaaaactataggcaactggactctttaaaaagggtgacgaaattattaccgagcccagcagaaatactgttgcagccatgcccggttccaaaggaatcatattcactctccaaacgagaagtgaccccagaaataccactgttttgtctcgatggtattgcagaccaacgtcgtgtcaagaccttatgtgcataggtctacaaaagacaaaaaaaatgctgttaacaccacaagaaactcatcaaacccttgtaccaaaacataagaaaatctaatcatcaatcccctgaatttgaaaacataagcttacttgttccacagcatcccacaatatattgtcaaccggggcacgaaaaacataatgcagagcaagggtaagctctattgcagcaaagctaggattcatagacttttgggtcttcttccataatacagaatgaagctccgtacggatttcatcagctaataacttcaactcctacgagaagaaaaaccatccccattaaactcaagcccttcaagttatcattcaactacatatgggttaagaacatgaagaaatccaccttaacactcaaattcttcaactgcaatggagtttcaatgctgtctagtattggcgtctcaaatttctcatcgcagtatccatcagtgtttggcaaagaacatacccgagctcgatttgaatattcctagatatcaaacgcatacattaggagattccatcgatggcaaaaaaaatccaaaatccgcaattcataaacgagacccagattgaaagtttggcactttagtgttattggcataaacgagattaagagagataaacaaagacgggtcctttaccttgtgagtggagcttggagttgagaataggctttttatggaaacatcaagtttacatggaagcgaggagacagtaatatctgagctcagattaaaattgccgtaaaatcgagctgatattccgaattggtaaccaatcgaagccgaacccattaagagaaaaaaagcctcgaaaatcaattacaacggacgaggaagatgatataattctgaagaagaaatgaaaaaattacaagaaattcgaaacaaatgccgcgaaaaacgcccaaaatgttgacatgtggagaatggagaagctttagcgagagagaatccagagcaattggtaaagagagaagaagaagaagaagaggaagaacatttttcattcagatataaattaaagcccataaagaacccaattagattttagttgggcctaatccataattctgattattatttttttgttgtttcacatcgacatgtttataattacgatttaaaaatttatcgttgaacttaaaaatcatcaatatataaaacaacaactttaaacagatcaaaatccaatgatgttattgcaagattgtaaaacgaaaatatatataaatataaaatataatgattcaaagaagatcgttcaaattgtttgaaaacgaggtcaaggttgcatgtggttgaaccacatgaagacaataactcattcttcatctcaagctccttttgtggatccaactttgaaacaatcaagattctcgcagtctttaatcggcaagattttgccaagatatatgtcgccagacctttctcttcttctgttggaaaataagttctccacttgaaagtttggagactcgacaacaaacattgagggacatcaatcatttgcttccaacaaaacaatgtatccatactatctcctacaacgtttgccttacgacgatcgaagaaatttactatgagctccaagtcacgtagtttgggagaacctttgagtaaacagaatagtaacttggaccaatatgttttacttatgcgcagagtcgtacctcaagacaaaagaaag

SEQ ID NO: 30414 - DNA, 3909 bp, Arabidopsis thaliana landsberg
  unsure (1)..(3909): unsure at all n locations
aaggacagatccggtgcgacaagtgtactttttgaggatcccatatgctccgtgagaccaacaccaaaacctaaaggaatttattgtcagcaaaaagggtacaaaggtcattttataacaaaggtgaattaaaatatgaaggaattcacaaactaaaacgcaacgtttggtgaatggctttaggggtaaaacagtcattacgctcaaagcattgagaaattaggatatggatatgtgaacacctgaacagagttctatgcttcttcttcatcaatggcttccattagtagcttacacagatgggcatctaatcaacactctcgtcttcctcgaatcacttctatttctgaggctgaccaatctcgacccattaaccaagtcgtcgccttttcggttcctatatccacaagagacgcgagtattattcttctcagctcgattccattgacaagcttcttcgttctaacaccgagctcttcccaagctagagagagacgtagcagaaaagttatccctctcgaggaatattccactggccgttaagtccctcgctctcttcttagctatcggttcgtcttccgcacaaatttcacaattagtgtttggaattaggtttctttgttattgcacatgattactctcttgtttaattgggttttgagagtttctgattcgacgaaattctgaattgggggacataaaaggatttgcttgacttgtatgagaagtttctgggtttgtaaaaacataaactttagcttgttattaacacaatgtttgtgttactctgttcttgcagctgaagggttgaaattctatgacattgaggaaggcaaaggtccagtagcaacagagggatcaactgctcaggtctctctagctaatgattcacattttaatttctctatatcgaaatcgagttctcgcttttacaatgtaatggtgtctgtattttccacatttaggtgcattttgatttccgttacagaagcatcactgcaatttctacccgagaatccaagcttttagctggaaaccgtagtattgctcaggttacttcaccatctatcccttttgattagattctgcataatttttagtttgatggtggcttacttctttctggagcagccttacgagttcaaggtgggatctacgccaggaaaggaaaggaannnnnnnnnnnnnnnnnnnnnnnnnnnnnnattctctgcacaggctgcaccaaaacctcctccagcaatgtatttcattaccgaaggaatgaaagtcggaggcaaggttagaaacactactgcattttcgctctcttcttcttacaacatgtagttacatataagtagttttgacctatgttgttcttgcagagaacggtgattgttcctcctgaagctggttatggtcagaaaggaatgaatgagataccggtgagaacctactacaaattgtatatgaggaaagctccgttttttgctgaaaactaattacaaaatgtagtataatgcttgtttcgggtttaagagataataaaatcatgtatgttgttgcagcctggagctacttttgagttaaacatagagctgcttcgggtgactcctccaccagaagagaagtgaacgctaataagagaagtttgaagcttcaagcattgtcccaacatttgtgtaaagatgacaaaggagaaaagagagaaagatgtaaattttggagtttttagtttgtgtctggttggttatacaccaaactctggtacagtgaaataaccggtatatttgttggactaaaatttgttaaaagtatataattcttacgtggcagcttctagttggctacaatatcttaaaaccaaatcaaatcaaaacttgaaatgatttgaaatcatagaaccgagaaaaccaaaccgaatgtcaaaccataacaaatttggttttagttcaaccgataataaaccaaaatgtctacagctacctactaggtgagaatttggttgctggctctgcttgtgagctttggtagcgatatctccggtagcttcttttcccgagaaaatctagtgagaaaaatggagacttctctgagatatgctactaattccaggtctctgaaaattcatgccaaggagaagtttccggtgaactccaaaactcgcctgcaggtgaatttcttcaaattattggctgttatggtggattttagcactattcttcaatttgattgcgatatattcttttgattttcttccttaggattatttaatgcacaaagcctcttacttatttataggctaatggttttcagggtttatggaaattgtaattattttctatgtacacaggctttagagtcttttagtctttagcagaaagagctgtgtaggcttaaagaagaatcgatagctttttggaagattatacttaacttgttttttggctacactctatccccctgtcgagattatggagcagggaatgtttgtgttcttactttcttttgttggttttacatttgtgattagcttcatggagagctagatacaggagctggagtgccaagttacttctgtgcaatgataagatacttttttcatgaggttttgatcttgaatttgtgcttgagctctttgaaccttttaccagaccattttattgattaccatgaatttgtgtataggcttcaacaaaccttggagttggtttgcattatgataaacgcgaaaagcttcggtgtcttgtacgtgggaaaaagaagtttcctgtgataactgatgaggttgtaacctttaatatcaaaggaagatgtgattttgaccaggacttagttcaggtttgcctcttttgtttttcatcacttgtgtttctttgatggtttttaaaactttagaatggactgaaattttgtgattttgccacagaggaacgcaaaaggagctgctgaatttgattggaacatatggaagtttcagaaagatcaggatttacgcctcagaattggctacgaaatgtttgagaaggtacgactttagcttaccgtttaacaaagagaacaacaatggttcttattggatcattgaacactatgtgttggctttctctgttacaggtaccttatatgcagattagagaaaacaattggactttcaacacgaacttgaaaggaaaatggaatgtgaggtatgatctgtaatgagtaaacaagaacagaaacagagaatagtaagatcacattttcatatttgtatcatgttgagaaatgtattactgatagaaaaaaactcgctttgatttaaccagttgagagcaaattcagagatcttctgttatcatcagtcacttttactcttgcaagcatctaagaactaattagcttttgtctcctaggctcagatagctattatttccttgtctaaagatagaatccgtatctaactaggtttgactttatgcgtggtcttaaaccccatttgggttcctttagagacctccttttctttgtgatactgttatagataaccggaaaatacatactaaaccaatctgaagcaaaccctcacttgtatgtgccaatttggatgcaattggtgtgatagttcacaaaccaaacatcagaagtccggtcatctcagatcggcatacattagtttggtctgtgttacggttctggttgactttgagatcgtgatgctactaatatgagccttgaacatcaccatcagtatcaaatcaacaatttagtcccacatacacatgtgaaggaagatcttgttctataaagatttgcttctggtggtcatgaatcaaagatcttgcataaaaccccacaacgaccaagaatcaaccattaattttcaatatcaacagtaaatcgaataaacattgacaaaaatgcacatatttttggttagttgcttta

SEQ ID NO: 30415 - DNA, 1525 bp, Arabidopsis thaliana landsberg
tataatatattaaatcgagaaataggtttcttaaacaaccgttgattttgtgctttttcatttgtttcggattacaaaaacagaagcgggtgtaacatattatagttcatctacaagttggatgtggtccgatgaaggaatgaatgaggaggcctgacgtatgtgaagtttgtaaaagggttcgccttagcatcagagttgggactacttgctggagaatccaaaacagacatgtcagtccaacacttgtcaaaattagctatgcattgtcttcccgaaaccgccggcttgaaacttggttgtacttctctagcctccagcttcttccagtttatcgccttgaaccatttgtgtttttttatctcctctgctccgctcggtccacttcccagtctcctttctggctctttttgcagcagctataaaattcattacaaagtcagaatcagactggtctaaacccaatatgcttcatagtacacagcgattcaaaataattccccatgtttgtttacttacccctttcagcaaggcatgagcttcattagacagaaactgtggaagcttgatcttgtccttaacgattttctgctgtatctttcctttgctcccgagaaacggcggctgcagaaggtaaaacaaatggtgtcacaacacagtttcaatgatcaccttagacatataacaagacattaggctactatggaaccaaaaaaagaagaagacattttacctttccagtgagcatctcatacagaaggattcctacactccaccagtcggcagccttatcatgtccttttccacgaacaatctcaggggccatatactccgtagtcccacacatggagtttgatcttgtgttttcttcaaattcttttgctaaaccaaaatcagttaacatcacatggccatctacgtccatgagtatgttttcaggtttaagatctctatgcattatgcctttctcatggagatgggaaactgcagagacgatttctgcagtgtacacacgagccaagtcctccctgtgaaaaacataacatatgatttagtcaagcctcgcagaattctggtgaaactccaaaactagttcaaaaggaataaagccaaacctgaaaagcccttggtgatagagctggaagaaaagatgacctccgtttataaagtcaagaacaagatacaatctgtacttggtctgcaagaagaatgtataacactaagttaggaagtacttgagaaaaaccaataggatgcaaacagagagaagttggcttttacctgaaaagagtatttaagttgcacaatgaaaggatgatcgattttggttagaatatcgcgctcggctttcatgtattcagcatgattcttctcaacaattttatcttttctcatgaccttcatcgcgtatatctcagacgtgtctttattcctcacctggtacactttttcaaatgcaccttgtcccacaaccttcaatacctcaaaagcctcaatgcctactacacctgagacctcctttgga

SEQ ID NO: 30416 - DNA, 1727 bp, Arabidopsis thaliana landsberg
  unsure (1)..(1727): unsure at all n locations
atcaattagctgggacgatgcattcgcgttgtcaagaacttggaagctgaaacaaatgggtgtgtattatgcaggtaaatattctgagtagtctaaattcttctgttaatgtgtcttatgctaaaatttgtttgacaactctgcccttaaagttttatgggtgtcaccttttctgagagaatcaggtctatcttaaattaattgtttcggaagaacgctaggtctcttaaaagtattacatgtttcgatcgaccattatgtctatgttaaagtgtcttaagagtagaggttttgatgtgatagctgcattttgtatgtctggccaaatagtaaatagataaaactaacctggtatatatttttataatcttagctaataaaagattttgtctgcagtggttctgatttttgtagatcaggatttgggccgcggacaatcataatatgtgatcaggtactttctcaatcgtggcgagatcttaaattagattattctgtaaattttatatcaaactatttatctctattttgcaacagtgtgaaaaggagtaccacattggatgtttgagtagtcagaatattgtggatttaaaggtaaccacatatagcttcaaccccaactcacaatcttctgcgttgacatagattggatcattatctttattgtctgccctgatttcaacttacacggggtatatgattttctgacaggaattacctaaaggaaactggttttgctccatggactgtacgaggatcaactccacattacaaaagttacttcttggtggggcggagaagctttcagattcttctttgggaataatacagacgaagcaagagagaaatgatgtatattccatcagtgatcttgacatcagatggagactgatcagcggcaaagttacttctcctgaaagccgaatgttactgtctcaggcattggctatttttcatgtaagtgcctctgcatttcaaaacttagaattaaatctttatgtgatggcaatttctgtggtttgatttgataattagtactgctaaaacaaaggaaaaatctgtttagctcattgctgattctctttccatttaatcttgtctcggaaattatggggcagggtaactagcaaaatgctgtacaaaatacacaataggccaaggaaggttacataagtctatcttaaaagttgaatcatgtatgtatatatgtatgaaataaattatcttgatttggttagtatgtacaaatatctctatttctatgcctacaatttgaaccaaaggcataactatgcagaagtttatatctctctctgcatttttaatggtcacatatgacacacattttttctcaataggaattagctaaactttaccatcgtgccctaagtttatttcagtgtcttccttacaggattgcttcgatcctatagttgatccactttctgggagcaatcttattccgagaatggtttacgggtgaggactcttccattaatgccctcttcaagtagcctgactttcaaataccatcaataacaatcacaagtgcctttttcgtttaggaagactatgcaaggacaagactacgggggaatctgctgtgctgttttgactgttaagtaagatctttttcctacctctacctaaccataggccatatttgtattgcgngttaagcattgatttggcttttatacaatgcgactgttgtttctgctggacta

SEQ ID NO: 30417 - DNA, 3053 bp, Arabidopsis thaliana landsberg
ctacaactatcggagcattagcaaaatattcaacattttttggacacaaacaccaccatcatcaccatcaggaccggtaccatcatcattatcaccaccatgaaccaataaaatgttgtgagaaatggacgtcaaggcttagacaccaatacaagacttctcttgtgttgactgttgatttgcatggttgtggtaacttcagcaatgttcaaagcgccattgatgctgtccctgatttaagctcttccaagactctcatcatcgttaattcgggttcttataggtcctatcttcaactccaagctcttgttctttttcccctatctccattgctcaataattttcttttatagtgtaatatgatatatatatttagtaatgtttgagttcaatttaagcaagcagggaaaaggttacggttaatgaaaacaagacaaaccttgttattcaaggaagaggatatcaaaacacatccatcgaatggaacgacacagcaaaatccgccggaaacactgctgatagcttctcctttgtagtgtttgcagctaacttcacagcttacaacattagtttcaaggtaaggatatcgaggtcacaacaattaaacctaattagctaacgcatataatgatatgagttttcatgtgtgtatgtgttttgaatggagtaagaacaatgcaccagaaccagatcctggtgaagctgatgcacaagcagtagctctaaggattgaaggagaccaagctgccttttatggttgtggattctatggggctcaagatacacttctagatgataaaggaagacatttcttcaaagagtgcttcattcaagggtccatagattttatatttggcaatggaagatcactctaccaggttaaagataaaacacattcatgcatgaccttttccaaacatgaccataatactctaaaatcgcaaacaggattgtactatcaattcaatagcaaaggggaatacatccggagttaccggatctatcacagctcaaggaagacaatcagaagatgaacagtcaggattctcttttgtgaattgtaagatcgatggcagtggagaaatattgcttggaagagcttggggagcctatgctacagtcgtgttctcaaatacttacatgtctggaatcattactccagaaggatggaataactggggagactcgaccaaagaaaagtaagagactatatatatacacatctcaacatacataaaagatcttacttatgtcttgtatgggttttattttttaggacggtgacttttggagagcataaatgctatggaccgggagcagattacaaagagagggttttgtttgggaaacaactcacagattcagaagcatcttctttcatagatgtatcttttatagatggtgatgaatggctccgtcacactaacatagtctctgagcatacatctaaagacattggagatgatcttataggattttactaacatatataaggatacacatgaataaaaaacatttagatgtagatacatacatattataagtatatgtagtcacattgagatctgatttgcgatgaagatgaaactcatgtactgtatatcttaatatgagatttcggtatgtttaattagctctatcattctatcaagacatttccaacaaatctgaaattgaagatatttcactatcagagagaacataattcaaagagcttaatcatttcaatgagcattcatagagaagactatgttgcattaggtgacggaggcggtgctctaccttttcgtagcggcggacatattttgaggcaactttttttgtcatattcagggaagcaaatggaaggagcttcgacacaacacaaatactcgagtgtccatggctctcccataaatttatggaaacatttttctattcctttcggatgatcgggatcgtgttgacctacacaatcattaccttaaaaatgttacataaaaaaaaaaaaaaaatctatttacgtaaaaatatagcaacaatgaattgaattcataaagtttaatcaacgactgctattatatgagatatatattatgactgcgtttcaacaattccattcgcatagtcattgagagaatccagcacataaatgttaaatcttatttaagaaaagacaataactctaaaatgttaatttcatagatatatttcctttatttggttactttcattttctattttccccttcccaacaatcatgtctatttttctcatgattctcgttaattttcttttggtgacatgtatttccttataattaagagttatttgaggataatacagatgtgtgttgttacacttgcaaagacattaaattacacagaaaaacaaaatcatcgttttaatcattgatcttctgttatctcatttttcttttttagggataatcaatttggataagattgggatacgtataatacatggtattctacgttttaagaaattaaaagatataaatatttaaacgttttatcaaaaatagatatttatccctaccaaacaaaaaaatcgatatttatgcgtttgggctggatattcatattagcccaactgccataaccattgtgaagttttcatattgggcctatagaacgtgaccgaggcccattagctttatgtttaagtgtcttacaagcaaaggttttgatgttatatgatgttctgacaggaattgcttaaagaaaattggttttgctccatggactgtacgaggatcaactccacattacaaaagttactttttggaggggcagagaagctttcagattcttctttgggactccccccagatgaagcaagagggaactgatgtagattccaacaagatgcagactgatcagcggaaaagtttcttctcctgaaacccaattggttctgtctcaggcattggataattttcatgtaagtgcctctgcagttcgaaatttagaattagacctctatccggtagccattattttgtatcgatttgattagtagtactgttaaagaaaggacaaataggttagctt

SEQ ID NO: 30418 - DNA, 1563 bp, Arabidopsis thaliana landsberg
cttattctcgtttgttacaaataagtgatgcatataacacttttttaatttattgctcactcaattaagacaacatggttacaacataagcaatttaaaacctactgaattgaataagtgattgaatcatgcatgtacaaaggttttgctgataattgagatccttatggaaagaaataacctccaacagaaagttgttgctaaagctgtttcatgtctataacactatccatgtttgttgttcactcgtctgtcactgttacaggacaaggactgtttccaaattagagatgtttcatgtcacatacattgagggaattaaacacaaacatcattaatgattgtatcaaggatgaaacacaaaggtgctctttctcttttggccttttgggaagttgagtgagagtctagagtggagtcacctttcaatttcaagtttttaactcattacatgtttcttgtctcactaaatattgttagaactaacaacatccttattgtgagtaagtttctgtaagtaccatccagaagaaccttaatacatcatcaataaaacattatagattgaatctgaatcaaaagtctcatcacattacaatagctgcaaatcaatatctaaaataataaacaaacacatagaaacataaacaatgaatcatcactttgatctcaaaccacaccgactgctttacgcttccatctcaaagaaatctcctttagcaaaggcctgacatccacagaatccaagtcttttctcgaccagtcacagaagaattcttcgtgaacatccatgaggaatctcaaagcagtgttcaatggtcctttctcatcactctcatctatcttcttcttacattctgacaacaaacaagactgatctccaaaatacttgtacctagcaatctgtagcaagtttttcttgtcatgaggccaaacactactcttatcatcaacaaccacaattccacgctcatcagccaacacaagatcaagcgtcttaaaaccaggactctctcttctcgttataacccgattgccaaagtaaatcttatccggatcaatcatctccaacacgagctgagcatagtcataaccaccctttgtgtaaacatacaaagagaacatctcgttacattctttcagaaactggtgaacaaaaggtctcagctttatcaaagattcttcaggaaacccagtgttgaatctccgtagatctttcctcgattccacttcttctgttatatacttttcagattcagaaagctgtgaaactttaatggtgtgaacaagcgtgtggtccaagtcaagtactaagtgaagcttcttgtcttcaagccaagaggtttgagagatgagccgttttgtaaaacctaaagcttcattactcatctgaatccctgtgtagaggtaatcgaaagatctgccttggtaattgtccactattgtattgcaagaggcacagactttattgcggacgaaccagtgactgcagttacgagacggagactctttgacctctggatcgatcttacgtcttttgggttgtggctcaagagaaaggtt

SEQ ID NO: 30419 - DNA, 1502 bp, Arabidopsis thaliana landsberg
atgtcattacatattggattgccagtagtgattgtagtgataataagaatgttatagcgacaacttcgtcctatagatactttgattacacatatggttatcttcaccatgccacaataaaagggcttgagttattataaatttatttgactatatcccaagtaatatatatatatatatatatatatgtatatatatataaatttgtaagtaaagtaacctctctttttccttcttccttatgtaagtaaaaaactaagtatttccataaagttggaactggtagctccactagacaattcaacttcatgactcctccaaacgttggtccagatgttccctacacattcggtgttataggtatatagtccacagattcatagtttcaacagagtcatgctagggattttaaggatttatgttgaaaattaaatataatttaattattttaagattaaaaaattacaaagattttctaagagttattaagagatattaaagactcgtcttcaataagtgctttaatgtttctcgttctactactccaatttattccaggactgcatatatttctaaacttgtaaaaatcaatatgaacgttattacttcacgattatactattatgtattaacaaatatgacttgctatatttgatatattagaggtcgtagaagagtgtttcttattttagtgaataggctttgagtttcaagtttcaactatgagtttaaatgttttgaacctaatatcagtaaccttaactgtttttttaggtgatcttggacaaatctatgtctctaaaccataaattgtacaactacatgtcgaatccaaaaggcctagtggtgctttttggtggagatttgtcttatgttgatgaccatcctaaccaagaccaaataaaatggtaatcacggcaggtttgtggaaccaagcgccgagcatcagccttggatttgggctgcagggaaccacgagttgcattacgcttagagcatagtaagatccactctatatattaattttcatacttttttaggtttagtgttaaaacattaaatccgcttgtagggggagactcaacccttcaagtcgtacaagaaccgctaccacgttccttacagagcctcatagagtacatctccactttggtactcaatcaaacaagcctcggcttgcatcatcgtactctcctcttactcagcttatggtacgatctaagactcacactttattatattttactctatattacaatgttaatgtttttcttttgtgacactttaccatagacaaatacacaccgtagaactcctggctcttggatgagctcgagaaagttaaccgtcagagacttcgtggctgattgttctggttcacgttccatggttaaacaacaacaattattactatatggaaggtgagagcatgagagttaagttcgagccatggttcatcaaaaacaaagtcgatatgatctttgctggcatgttcatgccta

SEQ ID NO: 30420 - DNA, 3007 bp, Arabidopsis thaliana landsberg
  unsure (1)..(3007): unsure at all n locations
ccaacaattacccactcctcttactgatttcatgtttccatccttcttattacagtactaaacacaaactgttgcttcacatgcactcatgtggacctgtcttttatacaattgttttttctttcttattatttgttgtttttagaaaacattccgatccgtagttaagttcttcatttgcttaattatcctttcgatcgttggataaaataccttaaattctacgattactcagtaagtaatttttttttatataattgatagaatacacttttcagttttgaatctttcgactgatcactgatatatacaatatcttaggaaaataaataaatttgatctacaccataaatattataataatcaattattacccaaaagaacaatggatggtttataggagattttatagactatagatcataaagaaataaacacttacaagaggtttgaaggcttaatgggatgcatgtggatcagcacctatagtgacttaatttagtattaatttctgtattatcagagagagaaacctaatcccacaaataagtacctaaactctttgcaaatggtgttttgttgggttatattattaataccatactaattaatatattaacaagtaagtatgtatgctgacgattcgtcacatggccatcagggatcaggccatgggattcgctatggcatcacagacttgagagtccagcttttccttacgatctacacgcatgtgccacgtgtgtttcatgcatcttaaaaacctctgagacagcaagagactctctgactctgtctaaagccaaaatgggtttattatatgacaatttgaccaaaatgggcttattataaacatctcgggcctaaaggtaaaagcccataagttgagacgatgacggtatccaaatgaaggaacggctttggtagtgacacgtcacgattcttccgccaccacaccacagctttttgcttcatctccttcttactctctgtgtctctaactcctcgtgcactcagacatcacagatatggcttgtgttcggtcgattggttctttaacttctgtcaaccattctcaacgaaatgttcctcgctcaggtacgcgaaaaaaccctaatttcgcacttttgattcgtcgaattggtagttgaaatcttcgtgttgcatgtagcttgaataaggaaaatttcccgtaattttcggtataatgctgaatccgaaactgtaacgagatttatcggaaacgaatcggtataaatcgtgtttctttgcgagctcatgatttctctgatttgataaacaagttgttaaggcagtaacttgatgtaatctgatcatggtttcatagtaaatgtgtgttctaagtaattgtggattagggttatggaaaaagattggatttttacatgtctcgctatcaattaacttcaagtgtgtaattaagaaccatagtttgatcccttttgttgcaggcattgtcttatcttcatgctctgttcttcccatcaaaagctcatctttcactggatcccctgtttctctcccgcgggctcaaccatcatcccgaacagctctaagaccgatgaaacccgtctctatcacgatgatggtaaagccggcgctccaattcatccaagggacggatgagatgacaatccctgatgttaagctgactcgatcaagagacggaagcaacggaatggcactgttctctttcgaccaaccatccgttttcgactcgagcggtgaagtcggagagattacaggattgtacatgattgatgaggaaggtgtgattcagtcgacggatgtgaacgcgagattcgtgaatgggaaaccggaagggattgtggcgaagcacataatgcgatcgccgaaagaatgggacaggttcatgaggtttatggagcgatactcggaccagaatggcttgcagtttgttaagaagcaatgaggttggagagaattttcaatgagcaaaacaaaatgtgtatgttacattaaattttttcactcttttgatttataatcttgtactctcctagttttgatctttacttgagtttcaacttacaatggtaatctaggcttttgttctgattaaatttggtttaatctaaacaaatccatgattttactaaatgtatgatcataatttcattatgaattgtgctattagtcaaatacttaactgtgtttgtgtttatattacgagtgttcaatccaattaaaccaaaaccgtgtaagagatttaaaatagaaaacacactccactgaaattgaacagaatcaaaactaaaccgaactttgagcatatccggttttaagttgatgaccatatatagccaaaagtcgttaagaatagtttattatggaaaggggcatcaaagcattgttcctctgcatcatggcatcgacgttaatctcttctttggccgttgtcttgccgttaacgttactagctccgtcaatgtccatgaaaatctctagaatcgacgtcctcggatatatttgcaacaacggcaccgtctccaacgaggaggcttaccggagatcatatcagattaacctcgacgcgatcagaggtgatatgaggcatgtcaagtttggaactcatgaatatggagatcctccggagagaatgtacgttttgtcgcagtgtgttagcgatctctcatccgacgaatgtagtctctgttggtcacgtgccaccgatctcctctcgcaatgttttccggccaccggtggttggtttcacctcgacggttgtttcgttagagctgataattacagcttttatcaagaacctgtttctcatcaggacaccaaggtatcaattagatggtttggttttgtttgaaatctcatatcgaacatagagtaatatagaagcgacatgaaccaatccatttattaccaattagttttgagttggaaggggataaaaatttaacatattatctgaatatgataccattttgggaaatgtaggatatgtgnctagtaa

SEQ ID NO: 30421 - DNA, 2026 bp, Arabidopsis thaliana landsberg
tcttctcccttcgtttctctttcaaagtttgactctcaatgttcttgtatgaatattaattgttattctcttttgcgcccaggattggtaccgtgtcagcgaggcttacagacctcatgatgttcagtgggcattgcaaacaaaagcggtccttgaccgtttacaactagtacttgctgatagatgtcagcattattttacaataatacagcctactgcaaaatatcttggtcaactgttacgtgttgacaagcatggggtacattgcagttaaactccaacttcttctttatgtaagaaagtctaaaagatatatttattcatttgggtttcttattttttacagattgatgttttcactgaagaggttataagagcagggccaggagccgttttatcaactcttgtaaacagatttgatccttctctaaggaaaatcgcgaatttaggctggtaagatatgttttaccatgaatttgaactaaagaactatatttagatttgttccttgtagaaggtgattactgaaccctttatcgtatttttgctctaaaccaaaatggttctggttgagaagttggcaggttatcagctcggctgatgcatatgggtttgtggtttgtgtgaatgagttaattgttgttcagaacaaattctactcgaagccaactgtaattattgcaagtaaagtcacaggagaagaggagatccctgctggtgttgtagccgtgctgactcctagtatgattgatgtcttgtctcatgtatctattagagcaagaaacagcaaggcatgttatcatcagacaatgctgcaaaaagaagaactaggatcttcacaattttttcatggaactcatcttaagttcgtctgatgcagatatgctttgctacatgcttcgatcagaatgttctcagcaatctgaagtcgaaggaagggagagcaatatctattcatacaaagtctactggtttagttatcaggtaatcgaactcttattatgtcactgttctttacgcttagagaaggagtttctaataactctgaaattatatcacttgcagtgatggcaacaactctgatgtctctgttcgtcatatttttatttcctctgttccacggggagtgatctctaaggggaagaagttttgtggccactatgtgatttcatctaaggaattcactgatgaaagggtaaataagaatcaaatacatgaagataaaagttttcattttgagaataccatttggattttcatttctatgagatattttaggttggctcaaaatcatacaatataaaatttctacgtgaaagagttccatcatggatcaagatacctacctcagctgctcttccattcggaacatttgagaatatactctcagatgattccaataaggtataacctttaatcatttgcttctttctggaactctctaaaagtaatccaagggacggctcctcactgagcttgcgatccagaagtctcttaaatagatttggtgatccatcgcttttcaggatgtagcacgcaggatttctgtccttaaagattctcttaacagaggagacctgacaaaacttaagtccattcaagaagctatcttacaaatgagtgctccaatggctctggtaataactgggcatataattgtctttctttctctctgttcatgttccatgtgaatctcatgttgggttttgaactctttggtagagaaatgaactgatcacaaaattgagaagtgaaagaatgccttatcttggtgatgaatcaggctggaaccgctcctgggtggcaattaagaaggtaagaatctctttgaacgtttgtgtacttatagttaaaggaaccaagtgtttccctgatctccacatctgcataggtctgggcttcaaagtggaacgacagagcttatgtcagttgcaaaaaaaataagcttgatcatgatgcggtctgcatggctgtgctgattcaagaagtcatttgtggcgattatgctttcgtcattcacacaaac

SEQ ID NO: 30422 - DNA, 1332 bp, Arabidopsis thaliana landsberg
  unsure (1)..(1332): unsure at all n locations
agaaactaaaatgttagaagagagtggaattgatttctacttcattttggcatatatcaccaaactggagatggagagaaaacaagtatctccaaatcgaatatttcaggagcaaaactataagcagtgttacaaaatgtcaaaatcacttcgcacaatattacaatacacaagaagaagacatgaagagtacctaaccaagtaaccttatatttccctctacctactacaatccaacggtttttttgtttaaaccgtttctctggtacttgtcttctgttttcaatcccacaagtttcttggtatccttaaccttaagcgggtcaacattggccggtttaaccacgctgtcttgcagctgtaccaaggctcgaaccacttggtccatggtcggacgtgatttgggttcgaatgataggcattgcacagcaatgcttgccagtctcactgctccttcgggtttgtactgtgagttaagccgagtgtccacaattagtagaacctttcgcctgcttgtgaggtatggtcgagcccaatccacaaggttttgctccttggccgggcggttatggtctagtgcttgccttccacatagtagttctagcagaacaaccccgaaactnnnnnnnnnnnnnnnnnnnnnnnnnnnnnnnnaaaaaagatagaaagatgagagaacgaaactagctatcaacccatatgctcctttaaccacataaattttatagttgctatcttcaaatttacattaaaaaccagtgttaggcatcatgcaacagtcttacattttcttatccaaccattattacttgcatcatatcttagtgacagaatgtacctgttgagacatactcaggagctgcgtacccaaaagtacccatgacccttgtactaacataactttgttctcccattggaccgtctctcgctaaaccaaagtctgaaagctttgcgttgaagtcctgttgtttgaaagacaaaactcagtatcttttaagtcgttgataaagacaacaagtagacatcgaaagagaagaataccgagtccagtaagatgtttgacgccttgatgtctctgtaaatgactttgacgggatcactatgaagaaatgcaagacctttagctgcatcaagtgcaaccttaatccgtagaatccaagatagcggcttaaaatccttatttccatcttcaaaaaaatcattcaaacataagaacaaactgcctctcaaagtttcacaaaacatggacgagatcaaagactcactagcaaacagatgattctcaagactacccttgtgcataaactcatacacaagaagccgttgttcatc

SEQ ID NO: 30423 - DNA, 800 bp, Arabidopsis thaliana landsberg
  unsure (1)..(800): unsure at all n locations
aaatatcacatacactgattgattctggggattctgccttctaggtgtctgacacatcgttttcatggactgatttgcaagcaaaactgaatggcgagttgctgagcaacctaggcaactttgttaatcgagttctgagttttatagcaaagcctgataatgcaggttggttatatttctttcaaattcaatactcaagtgtttggtgttagctgtagatagctttttagtctggcatatccaatataaaatataggatgtgttgtattcttctactgtaaccagccagttggtgtgcaagtgagagatatttgaatcgcgggacaaatagattgtctaaaaactctaggatgatagaaaggtgcatctggcttactattattggtgtgcaagtgagagatacctgctttgtgatactcttgacaactagggcaagacttttcttatttgtctttgatgtttcaataccttactattttatgttttgtgaaggttacgggtctgtcattccnnnnnnnnnnnnnnnnnnnnnnnnnnnnnnaacaaaatcactggcggaaaaggttgaaaagtttgtggcagagtatgttgaagccatggaaaaggtgaggaatgttatatgaaccttggcgtggtatggctatctgagtttctgtgcctgggtttttaggttcttataaatcccctgttctttgatgtaggttagctcaagcagggctgaaaactgctatgctgatttcaagcgaagggaactattacttgcaggttctattctcattaacanactagatgttagcttt

SEQ ID NO: 30424 - DNA, 1463 bp, Arabidopsis thaliana landsberg
aaagaggttctcaaagaggaaagacctaccattgcaaaatcagaaaccactggttttaaggctgcggcctggaaatgtgccacctcagcccccgatgtgacggttgtgctatacaatcctggcgggtctcctatataccaagtaagtagaaggcgtgtgttcgctgctgtcttgttggttctaaattcaggaaagtttttcaatatttctttgtttcagtttgaaatattatggttcatgcatgttttgcccgatctttaattagcatcattaaggcgtagcaagaatatttactaatcaacctcaactctgactttaattcttctttttttttttgcagtgcggcttagattcatttcaggccactgcaaataatatgtcaaataggggtacagttgtacagatggagctaaatgaactgactttatgcatggtagatgaacataagggatgtttgaaagaaagcctttttggtttagagtcagatccaggttcattaatcaatataagaaaggtcagatcggaatggggcaagaaagaagtgttacctgagggcgatggttctaagggtaaacaaactctggtggttgacgtatcagaaataggtcttttattttctttcaggagtgttgaagcgcttacagtaaatgcaatatcaagtcaggcttatattaaaagtttaactggttctagtagtaagaacaaacaggaaaaaggggcacatagatcgaagccgccatcgggcagagggactcaactgttgaaactgaatgttgaacgtttctctcttaatttcgctggagattcaagcctggaaaatacagtcattgatgatcctaaacgtgtcaattatggatcacaggggggaagaattataattagtgtctcagctgacggctcacctcgaactgccagcgttttctctactttgtccgaagaacatgagaagttgaagtacataatttcgtttgaaatactcaaattcggatttactctaaccaaggagattcagtctacacaggtagaacttgaaccagcaaaggcgatctaccaggaattttggaggaacctcaccaagttccagagtgacactttgtgacatccaaaacgctaagtttgtacgtcgaataggcggtggtaaggaagtttcaatctgttcgctcttcagtgcctctaatattgccgtcagatgggagcctgatgtgcacatatcaatggtcgagcttggtctgcgtttgaagtccctagtcttaactcagaaacttaagcaacatggtaacagaaaccctgaagaggcttccactgtaaccggtgataaccagaaggaagaaccaactactaccccgaattcacttgataagaaaaagaagaaggaatctatatccgctgttcacgtagagatgttaagcataactgcaaaggctgaagaatggggtggaggctgaggtgcagattcagtcaat

SEQ ID NO: 30425 - DNA, 3364 bp, Arabidopsis thaliana landsberg
  unsure (1)..(3364): unsure at all n locations
tattgggtaagctttaaaaatatgtattgctaaaaagcgcattctcttttttagcctagatcatgagctaaaacacatgctaatcccaaagtctatgaaatgtcatgcagtctagtcttgtcagttaaaatgagtatgctggtcaaaagaaaagagcaataatggtcgtagatagtaggactttcccccttgatagaaaaatttctaccactcgaataacaccaataaaccacaccacctcgatggctcgattactatatagttttgaccgcatacaaatcaataatcagtgcatttatctacatcaaacgaatttaactgtccacaataaatatatacatgatcatcatacatactatcatcttgattttgcatacaaaaaatatacttcactttaagatttgagagttgccagctacctccaatagtccaatatatgttcctttcacgaaaattatagttaccaaaactcgtattgctcacatgatttgttagatccgtagccaacattacattatggtatttaactcttgatgtaaactgcatataccaatattatcctcttatttcgtgaaatgccgtgattagtgtttcaagttgaatgatttagccgttcatttcccaaacaccgtacacgtgacaatagaagaaaagctacaaaaccctggacctcacagcatcaacgcaaccttgactcctaattatcaagtcctctctacgccacgcgttttctgtgttactccacatcggtccattagttttgtgtcttttcacaatttcacatgccataatagaattttagaatatgtatgttttaaaattggggtcgaaattaataattagtcatgtcatcacccgacaatgtacttacctgtcctctgatcatattttcatatttagttcttctttttttgttagagctttatatcatatgttcttgttgacaaccaaaaaaaaaatgtatttagtccttttctcatcactataattaaattgttcctaatgtataacgtgttatatgctacatcgaatttgatttaagatataacctcagagagtcacagaagcaggtgttatttatttcggtcaactcgggaagtcttctattagtctagattgaaagttcaacgtacgtatcatttgattaaccaaccacgtaatattataaggaacagaattaataaaatttattaacaagaaaacttgtccccttactggttgtcgccaaaccatgctatactccaaaattgttttgaaaaaatgaacacatacaaagataagcaattgcacattgaattatttaatttccattatatatgtattgtctaacaaatatcttatcttatccaaagacatcatcgtcgacatatctacttccaccgaggaacaataccattaattacgtagagatacaattggacccannnnnnnnnnnnnnnnnnnnnnnnnnnnnacacttgtcgtaggtgcacaacaaagggcagagatggcatataattgtttgatgtttggcttttcacttgccaacgatttctttagcgtcatagaatctttcaactttttattaaccaaccactgccttcacaaaactcttttagtagtatggaatgaatacaaacaaaaaattgtcctaagatagttattttattccataggatatgaattggatacaattatattgtatttatgtatgatatttttggaattaaccaaatttataatttaatacttcaccgccatactaatcctttaatcacgggatgtttaaagaagaatgtcaccgtgaacgacatctcaaccgaacgaataaaacatttcacagttatgtgtataatatggttatctttttcgcttaaggtactagtattccaaaaaaaaacaaaaaaaaaagcatatataagataggttaattttaatttatctaatatcattcgttttttgttttccatttagtttagattgagattgcaaaaacaaaaccattttaactaactttaaacttttatagttaaagaactaaactttaaacttggttttgtgttttttttttctcctaagtcttaactcgcatgacatgaacttggtttattcaaattaaacacccagaaatacataaaatattttgaggcgtatattaggttaatctcaatctaatgcttccgacaaaatctaagtttttgcatggaacacaatttaaataggttgaattattcatacgaagcaagtaagtaaaactatatcattaaataatctactagttcaacgcagaataattactatatgttgcgttgcttctgacataatacaataacaaaaaaggttccagtactataaacttcataaaacgttatacattacaaattataacatcggctcatgctatctatacttattcacataacggtgcaggcgttagggttctcgtcgctaaagagggacatgagcttatcgtcagtacttcccggctgcgcctgagcctgctccgacttcctcacaaaacccggcggggctctcttgtcgtaagctccggcggcatatggataagccaccattgtgtatggaacatacggccacagctcagctttctttttcccagtgctctgcactgtcttcagcactttcttgggatcaacgtagccactcaccgttactttgtgcatctttctgttcacttccactgattttgctcctaagaaaaaaaaaacgagtggtgtgtatatattagtaaggccatgtttggctgatttggaagggaattgtgttttttggaatatgacgtgttagattacataatcatggttattttaaaggtagagagagtcaaagtttaaaattttcttatatctgtatgcatagtttcgtgtaggagataattaacttgaagcataattaattgtttgccctaactaatagaaaggcgagtcgtatttaattgactacgtggaacttgagagttgaagaacgaacctttgatggaggaaacagcgttctttgattttgcgttcgcatccgtcacagtcgatcttcaccttaatattcaccgtctgtttattagcaaaattttgaaaaggttaagcaactaataaacgacgaaacaacaactaaacggctgcgtttagagattttagttacctgcatgactttacgtttcttccgttttcttattgagacgtagaaatggttagagaaatactcagaaagataattgagagctcccatgtttactgtcacaagcgagcagagagatggagagggagagagctacggatgcttaaaatgggtgtcgtgtcttatatagagaagtaaggaggtggtgattggtggttataatgttccgagtattaggaaacacaacattaaatta

SEQ ID NO: 30426 - DNA, 1556 bp, Arabidopsis thaliana landsberg
atccaaaatatatattccactccttttgcgatcatattgataatggtattatatgtagcttgtttatagagattgattagagaggatttgagagcataaagtgaatacggaatataatggaaaaccaccggccatatatccaaacattcgacctcatctctgcgttacgacttgctcacataatgttggcagcatcaaatttattattcggcgcgtctctatatacaatatatatatacacatgaatattggaccatttatatttatatatatgcatatattggaccatttgtatttgataatattggaccaatttcgcagacaaaaactagctagctagtgtaaatgtgtaagaagatattacagaaaaagccgacaagaaggatagatatatccattaccaacaattcccttattctactaacctatttaactgaataatattctacttttatatggttgtaaaatcttgaaaaaataaataattatacttaaatgggactcaaatgtctcttaaaaatatcatcctatcataacaaaagctagcaaccatgatggttcatgactatcacatcaataactttgttatcatttggcatatcctctctaataatatgccattttaaaataaattaaaacctagcagttaaatttagaacttcaccatgtataaatactctgcatgcctctcactctctccccaaccaactctcacacaaattctctcgctctctcactctcttattctctttctctttttctctaagaatacaaaaaaagatgcaatacaaaacagaaactcgagggtcgttgtcctacaacaacaacagtaaggtgatgaacaacatgaatgtgtttccgtcggagacactggcgaagatagagtcgatggcggcagagaatgcggtggttatattcagcgtgagcacttgctgcatgtgccatgccatcaagcgtctcttccgtggaatgggcgtcagccccgccgtccacgagctcgacctcctcccttacggagttgaaatccaccgagctctcctccgtctccttggctgttccagcggtggcgccacatctccgggggcacttccggtggtgttcatcggagggaagatggtaggagcaatggagagagtgatggcttcacatatcaatggctcactcgtccctcttctcaaagatgctggcgctctttggctctgatgagtgctaatctcatcctccaaatatcaacctttggtttatctttggtttttaaggacagaagaaataggttaatcccagtgttgaattagagacagtgagagagaagagtgatgcgtttgttttaagcttagctctttgtctatcttaaatcacactaatatataaatgttaactaatcgctatgtctcttgttagctttcttatctctaattttacaatttgacagctgatttgcaaaatttaatggtcatttttcacacataaaaatttgccatgaaaataaaataaaattaaaggtcatactaagacaagaacgaggaggttattttcatgacccaaaatcttacccg

SEQ ID NO: 30427 - DNA, 4048 bp, Arabidopsis thaliana landsberg
  unsure (1)..(4048): unsure at all n locations
gtttaaaagcccagttaaagcattaggaaggacaaaaaacactagaaaccatttaggttgtttcttgatgaacaagcaacctttaataggttgacctttcttacgaaattcacagggttatacaaaatgttcagttggatactcatgttcatatccgttgtaatcataatacaatctttcccctttcgatatgtctctattagctacgagaagaaccctagcttctccgttgatgttgaacctcacacacttcaggttctgcttcttcctcccttctctgcaattcacaaaatgtcaacaaatacacaatgaggacaagcaatactagaatggttccaactaattcagaagcaggaccaaaacatggagctcaggtgttgtgaccagagagtcgactttaaggaaccaaatagaagagaagagaaactcacggtgagtgattgttgatgccactgatgaaccgggcgatgttactgcgtctgtcagggcaaattacgagacattgcgaaggatcagaggcatgaagtagagtcatcatactgtctccatcatagtcatcttctctattgctcagataatcaacatctccaacatactctgtgataattgtccagtcttttataaacctgtccgcctctactgtgaacctgttcagatagaaaaaattagacttcaatataattatacattgataaatgcattttcctactctcttcttggttataaaggtcaaaagagaagctaataagaatgttaagtacccttcataaggatcgaagacgaccataagtggcgggcattcaccgaggtccatcattttcttgcacaaggctaaggtctctacgccttctttagatagaacctgtatgaaattaaatacaaaatcaacttttctgttgatacttaacccaacaatgaatgctttcaagaaacctaagaatcaccaaaccaatcatatagatgtgactgaagaacaagagcaatacatatcaacttaagatagatacctgcatgcctcctttctcaaaagcagtttggtttgcagatcttggagcctttccagatacataagtaagctcattgctgaacttggtgttggaagctctcaacgcagtggccagagacgccatttgctctagcctcctttgagggatcattgctaggattgtatggaagaagccttctcttcttctttgacatcaccaagctagtctttttccgtttcttcccaatactatctgcaaacatttcactattcagattaatatttctagggatttagatttctaatctgcaaaattacatacctgaagaacttgagatttgagatgaatctggagaccgcttaatccggaagaaatctataattttagtctgaataagagggaaagctgcagatttacaaaacttttcattagtaattcagcaacagtgtaatccaaaacctgatctagtagtgtgaaatctgaatcaaattcgcgaaatcaaatcaaagacagagatcaagaaacccagaagaatcctaagatctaaagctcaacaataaacatatcctaatcaaaagaaggaagctttgaaattagagtcatgtgggtatagtgaaaaagcttacatttagggatctgatgtttggaacaagaagggcagaaccaagagcctttgggaactgaaacgaggatcggtctgagacagaaaagatgaaaccctttatcgcatttgtcgcaaagaagcagctttgctggttgtttaccggaactgcattcttcgcagactgtatcccaatcggaatcggaatcatgatccgacatgtgttgcggtggttcggatctagggtttgacgcttgtgttctccttcgcctcacagccaccattgttacacttattgatttaccagagaaagagagagagtgagagattataaatgtgagatctagccgaggttgagtagaagagttcgcgctctggattcaccggattttcccggggaattttaatttggcgccactgttacggtttcccgatttgcagactggtttattttggttttatctaaccgattttgagaaattaggattagatcggttcatatattttggttgttcggttcggttcaatttgattatcccaccggacaaaccaaaaccgacataagactctccttcaatgtaactttcaactaaattgattttgctctttgaacgatggagaccaatctaaagatctatctagtttcatccaccgactcgtccgagttcactcacctgaaatggtctttcactcgttctacgatcatcgccttagacgccgaatggaagccacaacactccaatacgtcgtcgtttccgaccgtcactctcctccaagtcgcatgccgactcagtcacgccacggatgtctccgatgtcttcctcattgatttgagttcgattcatcttccatcggtttgggagctgttgaatgatatgttcgtgtcgccggatgttctgaaactagggtttcggtttaaacaggatttggtttacttgtcttcgacatttactcaacatggatgtgaaggtggattccaagaggtgatttgcttttgaaagtcttgaactttgcttcgtagtgttagtttaagctaattgtagtcgaattcttatcaaagttttaacctttagctctgttatattctcttgtacttaaagttcttgtgtttggatcacgtgtggtgtttatagataggtaagtattgatttgtgtgtttattgacttctgttgaaagtagattgttgaattgtgtttttcttttatttgcctttttaggttatgttgctttaaagctctatgtttgtgattgttgatgtgaataggtgaaacaatacttggatattacaagcatatacaattatctgcaacataagcggtttgggagaaaggcgccaaaggatatcaagagcttggctgctatatgtaaggaaatgctggacatctctctctaaaggtttgtcaatgattcctgcaagaatttgacttttcgtgaaacgtactgttaataaggcttttcttaacaggtttttattctttaggaacttcaatgtagtgattggtcatatcgtcctcttacagaagaacagaaactatacgctgccacagatgctcactgcctgctccagatattcgatgtatttgaggcgcatcttgttgaaggaatcacagtgcaagatcttagagtgataaatgttggcttacaagaaattctgactgaatcggactatagcagtaagattgtcacagtcaaactttgcaaggctacagatgtaatcagatcaatgtcggaaaatggtcaaaacatagccaatggagtggttccaagaaaaacgacactaaacacgatgccaatggatgagaatttgttgaagattgtcaggaagtttggagaacggatcctgttgaagagtactgatcttctaccaaagaaacttaagaagaanccaagaagacgtgtcgcctcaagcactatgaacacaaataagcagttggtctgttctgcggactggcaaggtccaccgccatgggactcatctttaggcggtgatggctgccctaaatttctattggatgtgatggtatttgaatcaatttctgttttctgttgctcttttgtttcttggttttatttaattagaggacaagaatttgatttcacctatttagtatctttgtttttgaatgtaaccattttcagtagaatccatgtggtatcataatcagtttcttgtaaaactactttataggttgaaggtttggcgaaacatctacgttgtgtggggattgatgctgcaatcccacactcaaagaagccggattcaaggtactttatcctaaagctgctattaaagtttttctgtgacatggggttttgatcacaatatctgtataggattgattttctaattgtgatgttgacacaaatgccagggagttgcttgatcaagcattcaaagagaacagagttctattaacaagagatacaaaattgttagacaccaggatttggcaaagcatc

SEQ ID NO: 30428 - DNA, 4115 bp, Arabidopsis thaliana landsberg
gattaacacgaaggacaagagtatggaccaagaaaattgagaaatccaaactccgattaagccattaaggcaaaaaaccatccatgcagagagacggataaattcatagggagagagacaaaaacacgtagcaataaaaaagcaaatgagtacaaaacaaaacaaaatagaagattgtgcaatgtaacgcaaggactcatgaagatcatcatacctttgctttgagaatcaggatggacaacttcagacttgtgtaaccccttctttttcgtcaagattaattacttcttttcgaattcaacgtgaatgtaaaaatctctagagatcaaattttaaaacatcaagcagtctaaacattaaacaacatcagcttaacacagtttaaacgcattaaccactttataaaatgttgaaactatttttgtaacccacaatattataaaacgcatgtttcttgttttctaaagaaaatctaaattttgaattgatcaattttttgtccaaatcttctatgatttccttagggagagccacaacctgattccaagcccaagaagaaggatgctccacgttttaaagttaatcttggaagcgagcgacaatgcttgggatggaatgttaaaggtagcagatgcatactctgttatcatagtctatgtcaaagtatgtggatatgaatagtttccatggtcgtacttgtccaagaaacttggatttgtattttgtagctactcgaacacaaaacttgaaaccaagaacattttttttggtgccaataaaataacacactagtctaagtgacatgtatatttttatgagatttgctctccaatgtggctcaacctgtgttttctttgggtatatacatactggatttttggccgaagtcttggaaacagattatatctgtgatttggaaaatgcggaatcacccactattataaactgaaattttcttaacttatcatttctatgcaacaaacacacttttactatcaaatctaagtacagagatacgttacaacaagaaagtaatatcatccagctccatatatatagcaaagaccatttgattcaagagcataatcattatataaaacccatggtcataacatgataagtattaagacatgtacataagaattttgacagtgtataaaaagggtgtaagcccgactttcacatatataacttaaacccctgacttatatgttacctggccactatcatctttcaaacagacaagattgtccttcaagcaagagagtcctcgtcaatcgtcatcatcttctagcaagagccttaacttttccttctcgggtggtgaataaccaattgatttccttcaaataggtctggtcagtaactctccaggtcatctggtgtgtactttatgtactttccagcatgcctaccaccttctagttgactcctattccttccgaagaaagcccggtaagccgggattactttctctgatatagatattctcagttcttcacgaagttgaggatccgggacctttcaagccgtttgcagcctgtataactcttaaagctggcattaaaacctctgaatctctcttttaacgccatcttggaagaattgttgcttctttgtccataactcggactaccacttgaacttccacccatactttcgtccctcaaagcagatagcaccctgctccaggaagccctgaggtaaccggtagcatattgacgtatctgccctcttcgttttctaacccaatcatcacccaagagtttaccaagctcagaatccttcaccttctgaactatgtagtaaatgttgttcatcatgaacacatgttgcagcccaccatcttcatacaactttgatttatcttcaagatttgattccaacgacgtaatcaaccccaatattcttttcgcaagaggagacatctcttctgtactatcatcaccagatacgccacttgactcattactctccagaagcgaatttaaggtcaccgcataatccacaatcaatttcatgtaattcatcacataacgtatcattggatgaacctcaccatttgtcgtcggtctctttgatgtctcattccgaacattattctcaaactcaacaaaagtccccctcgcagcatcacccagtgcttccaacacccccttggtctcattacacacaaaacagtcagtgaccatcacctctaaagtctgcaacacattagccaacgcatcatacatgtccagaatcctaaacaacttctctgatgatcttctaccaatcgccacagcctctccgaaattcaacaactgcatcacacagcttttagttgtctcgttaaagcaaacctctttactcgactccgaactgctaaagatctcatcacatatctttttctcaccaacaagaagaaccctaacagtaatcttcacagcttgaatccacttcttcatcttctcatccatagacttccaatcaatcttctgaacttcttctatactcagcttctcaacaccaagaatcatcaaacaatcatccaaagcatcacgcctaaccgaactataaacctgaacacactccttctcataaccagcgcgaatcatccgctctgcaatctccttcaaatcttcaacagcagttggattaatcaaatcaacccaaagatcacaccctatactccctcctctctcatgaaacaacctcctcctactcccactaccatctccatcagcaaccaaaccaaaattctcaaaatcctcaacaacatcaccatcagcaaaggacaacgaaacacgccgcatcgagccatagagtcgctcagcgtctaaaggaacagtgttacgaatcaaaatccgtctaaattcatcttcaagctgagacatagccatctgcaaagcactatcagctctatccaccatatcaggcttattctcagacgaaagatcctcaagcaaagagataatctcatcaacagctgaaagaaactcggtagcttcctccggagattcatcaaacgaaagagaaaacgaagaggaacgatagttaccagaagacgaagacgagtgacgagaagaatcattaccaccatcccaccgatgaataaccgattctgcagcctctaaacgcgccacaagagcgtcgttttgattctcttcctggttcgtcatcgcggttttgatatttgataaacggttatcgaagcttgagaagataagtaacatatcttcacgaacctcttttggtgtgttgaggcttttcatgatctgttgcgccgtagcgagaacacggtcttcagctcccccaccaccacctccggcttcggcgttgatactcgccgccgtggttgttgttgcggccatctatggagaaattcgaaaagggaaaaatcaaaatagagaggtaggtgaatcagaaagatgaagacatggatcgtgttgtgagatttagagatcaaaacttgagagagattgaattgaagaagaagagtataatttttttctagggttgagtggaacaaagacagcgaaatggattgtttttggtctttccgaaaaaaagaaacaaagtcaatacgttttcgttgacctaaatgttttggtaccggttattttccggtttaattctcttctacgaatcacagatagacagaaaaggacggtaatgtttttggttactttcggtttagtcttttttttttcaattgctgcaagttttggatagagtttttagactgtttcaaatttagttcaaggagttttatttagactgtttcaaaatggttagattttgtgattttttaattgttcattcagtatgggtttagcttgagaatgtttcaaattgtattccgatcctaatatagattcagaaaaacgaaccggaccaatgtgattgatttgatagcagcattattgcggtggagtactcttccggcgtattgacgctgtcgtccgcctaccgtatccaacggttgataattatagttgacaataacagattttctaatctctcaaatcaatttttttctgctaaacgacagatatctgtgttcacacttcacaccatcaacattcatctacctgttgtttattcaatatagccaacacaattgattttttttt

SEQ ID NO: 30429 - DNA, 2429 bp, Arabidopsis thaliana landsberg
  unsure (1)..(2429): unsure at all n locations
cttcttcatcagacggtttctatttaaaaaacacacagagtcgggtctggggcatggtgtcacctgaacaacggaattccccataattggcaatacttttttttgcagggtaatatgaaaattaaccaaaatcagtaagatcgagacttttatcgttccccatttgatcttcttctcttcatcgaatcaattttagacattatctcttgtcttttcaatcgattatatcaatccggtgccgtgattcgtgaagacagaaattctacgacagagggaaaacaaacggtaccgtgaaaattttccgttgtaagctagaccgagaagcgagctgcgtctccgtcgcattatgattcggattcagtgtcgggtccaggtccgggtatgtcgagtccgttactgagttgatgtgatcatgtgaatgcagagaacgttatagcagaaatgcaaactcgattcatatatagaaaggctacaataacggatccaatatgggcatttagtaggcctcttttagcgtgggctttctttaatctcaagttgagcccattattatttttaattcgaaatcatgacaagtaattattttttaacctcgaaaactaagtacgttttactgttgttcaggatctgtcaaccaaattataatcgtgttttatatgttggttcagcgagatatcatgacagttgacaataacaaaataattttcaaaaaaaaggaaagaactttctaatatcaattaatcaattcacataataaaacaaatatcaaatgttaacggtcttttaaggtagggtgcttcgtttaggttttcttgattttgtgcctgaaacaaatttgcaccaaagttacaactcaaaacatatagccgaatatgagttctcttgtctcaaacataacgttttttgaagatattgtgtcgtttggttgggtctttaggtttcttggattggttaccagatttttgacgacctgagttgtattccatgtagacccttccatttgcaccggacattgcactcatcgatcccatgcttcgtcgcgtctttagagcctttccatctgtgtcttcttcaagttgttctaaaccaaccatatcgtctccagcattcaacacctttccgagaagagacaactgttcttcttgactgtggtagcccaagcttgaacccgcgtccggaggtgggaggcttgttattaccttgaagctataaccttggtcgatcaaaaactgctgtcttttcgttgaataatacatttcctgcatttcaacattcacgatccttacatcagtcattctccattcaatcagtcattcgatttttatcggttcaggaattcaagtcacgggttctggaaagcaaaaaaaaatctgtgttttggaaacgagtgcggactagaactgaattatattttggttctgatttggtctgatgaatttcagtttttatggctacttcaacaataaagtgatttacctgtgtatcggtagaaacaagcgagtagaagaatgcattgtactcttcttttccaccagccattctatcttcaagtttaccctgtttttgatcacggagaaataaagctttnnnnnnnnnnnnnnnnnnnnnnnnnnntgttggatccaacaaccaagaggaactctaggtgagacgcaaaatgtgatgagttataatactgaaaatcacaccttagccctaaggatacgacccaaacgttgagcctcttgacgtctagaaccagcatgtgacgaaatctggatgatcacattcgcttcagggatatctatggagttatcaccaacctgtagtcaaataaacaaaaccgaaactaagttccttgatgaaaatggaatgaacaaatctctatatattcccaggttaatggaaaggaaacaacggtaatacctttgacaggaatacagtgttcacggttttactggttttaaatgcctcgagaatttttgttcgttcgatatggctacatattgaacaaagagaactatcagattggaaactgagtgaaacatacaaaactgtgctctcaataggtggttcttcaacgaacctggttgcaccataaatcatcggtttccggagtttcattgcatactctgtaagtgcaaaaagattgtctgcaaagacgatgattttatccccacgttgttgttcatggaaacgtatcaaaaattcacaggctctgaacttgttagggttcatgacataaagcgcctgcagacaccagaaaacaagatatgtaaatgtcagaacaattgaaggggtttcctagtttcaattacagggtgatctattagaagcatttgccaaattataagacagacacaaataacctattatattgatgtttaccatattttaaggttctagactacatcaaattcatggactctagtgtatcanaacaaacaaac

SEQ ID NO: 30430 - DNA, 3323 bp, Arabidopsis thaliana landsberg
gcaagctgatctagactgctctttcatacaagggctcatctacaaaagagcttgagagttaaacctttacaagtgtgtcaacaactttctatgtagcagtaacattggaggcctcacatgtagggactgaacatttgatgcaatcaaggaaatatcaaagattacttagaaaaaagttttgccaggtcactcatcctctacctaccggacaaactggaccttgggatgaaattactgactgcatttcagaaggatcagacatgtaacccaaccgcaggtagggaagcatgtcttgaacagcttctctttcttttcccacacgaacctgagatggatgcaaaaccaaaatcagacagaacatctcaaagtagacttgttgccatgggaaagtcatacctgaaatacttgttgggataattttccgttcctttgagcaaccattctcttgtcctggtattgaggatcctcagtgttcaacgctgccttgaatgtgtatgacgcataaaacatgcaaacagtgaggaattacatgaacactacactagtgtttacagtaacgcaacaaagttttgtaattacctcaactattactctatcataagggttatcctcatcaacaaatccatagttcagaagcaatttcgcatttggttgtggcccacaccttcaaataaaggaggaaatgcaaaagtatgaaaaatagatcagaatgaaaaagctagctgtaggaagcaatttggcttacagacgcaccagacaactataggatccccggccttatatggcctatctaccacgagttcaacagcaccatcaacagcagtaagcattgccttgcagttggaacaataggccaacaagggaggaccaaaaggaaccaaagcacaccggcgaggcaaaccgacattatgaagtcatgaagaagcatagcaatctaaattagaagaagcaacatgcaccagctgactacttgcttaaatgatgagctgcaagctaaactttaggttcagcgatagagtaatagttttaagatcatattattatattttactctaactattctttcaaatacagaaagacattcaagttgtgaaaagtaaaccccaaaagaatgaaaattacttgtaaatgcaccacacatgactgaatggcaacaaatgcctgtttgaaaatctcaaatgaaaaagcttcagttggtatgtcaaatgggtattgctgcaaaacacaaataaaatggtgtaagtccgatgccgatgtttagcattccatatattaaaatgacaagaagaagccgaaatcgtaggtagccaaacacctgaaacaaagatccagccatgaaccagacagtgtcaagctcattgtattctcttttgatcccttcagccctctcaagaacttcggcctgaaccatgttaaagaagttaaccactaagaacccactatactagttcatcacacgtccggcatatactaacgcaataccttggtaggactaccagttaggtaatctaactcagcctctgaccacagcaaaggggattccgcatctaactgacctcttcctctttgacgatcaagttctcttatatagggataccatactgatttctttccttgtttcttctcatacatcaaatacaaagctagacaagccagttcggataatttgttcgtcgtcaacagttcagctgtgtgataaagagagtttatatggcttcagacaagaatcaaaacacccgtaatcccacccttatctaagagaaatcacaaagtctaatccaaatattatagtgcataactgattaagtagctttatggaataggaaacataatagagaatgtctcataccaatagtctcgtttcccaaaactctttccagagtgaccaccagagaatcaggaactgaaaacgccacatcacccttctgtaaaagacaggtaattaggaaaaatttaccatcaaaacccggaaattgatacttggaataccctatggaactgtgtataagcaaataaaactgttgaaatgctaagtcaaccacctgaagatcctcactagcagcaacataatgtataggtttatgcttctgatcatgagctggtctctccttgagaataaccttgcaaggtggcaacccattcttatccatccaaaacttcaaatcctcggagtcatctccttccttcttgctcgatactttgctctgcctctcgtcttcctttggtgaaccgcccgcgactaaagtatctgagctcgaagccgaaacgcacaagcttcttagatgaaccgatcgcgatgaagagatcaatttattgttcctccaccgaggaagtgaagaaaccctagaaagtgggaaagaacgaattggatgagagacgcatttcgtatggaaacatgtgataaccccttccatcggaattatcaattccaaaattccgattatgtcgaaacgtaaagattctccggcgacgattctgaggattttgctccgttcttcttttgcgttttctcagattatttttttcattgaggataagagagggaaatggagaaatcaggttgaaaacgaaatggggaagatgcgacataaaaaatgagtaaagaaataaaaatctacgtggcgcttagcgagaatgggcctgaaactagcccaccacaacaaggagtctatcagattccccaaacgacacgcagttaaaaacgagtttgatacgacgccgttgagacttctctaacccttgcaaatgataaaacgctcgcgtaagttagcacgagagatacacgcgcaaggggaaaaaattttaagtaaaagggaaataaaagatttgagggtccataatggtcttctctacttgttggcaattgtgacaaaaatatgaaactttttaaaccaacaaaaatgaacaaagaaatcaaaagtaacattctcaagattcacactacggttgtctttatgccaagttttgttggtgcttctcgactttcgctgtttacatggagaacttctgaggaacagtatcgaaatcgtctccaaagtcgtacctttgtctttcccttccaacctgaaaaaaagtagtcaaacggcttagtcagagaaacatgggtttccaggacagaagactaatggaatatggtattaaattacctttcccaagtataaagggtcacatgataagctctcatccatggctaagagattcttcgacagaccaatagtcctgaaatttttatcaaaacacataacttgtttgatgctactactttcctttggcaaaacagtcatctccatatcaacttgattccagtgctattattgcactct

SEQ ID NO: 30431 - DNA, 2303 bp, Arabidopsis thaliana landsberg
aatgttaatctcgagatttttttattaaccataccaataacagagaataactatagcttacctctgttccagctattcccattgctagtccaatgtctgcctcatgcaacgcaggggcatcgtttgtcccatcccctgtcactgcaactacctctccaattttcctcaagttgctgactaaagtatgtttgtccaatggcagagaccgagccattacctaaaggcagaaacaaggaattttagagatacttaaacattttcaatagacagataaacaataacaattcattctatctatcatatatcaaaggacctgaattttggggataatggccctcatttcgtgaggagacaagtcccggaattctgaaccttctatagctaagcctccttcggtatatatgccacattccttagcaattgctttggctgtgcttatgttatctccagtgaccatacggacggtgattccggcagcttgacaagtctgaacggcttccctaacacccggacgtactggatccttgattccaacaactgctaccattgtatagcctccatcagggagctctccactgggagcttcatctagatctttgtaaaccaagcagagagtcctcagagcctctgaggcaaaaccctctatgatatcagagatactcgtaatccgttcttcagttagcggaaccgattctccgtttgaatccacaacattctcacacattttcaacactatttcagatgcccctttgcagaaagcccgtgcaccacctccaggaagagctataagaacagacattttcttcttgtctgaattgaacggctcaatcttgagtatcttatgctctttacgctgcgtgttaaaatcaccacctaaaagtaaaccgaattcgagtattgctctttctgtcggggatcctaggatctgagtgtttccatctttatccttaacaacttccgaaccagtgttctgaaatataccctgcaaaagagtgctctgaacttcttccgatagttccaactcaaagctttctttacttccctcttgcctctcttgaaccttatcacagatccatactttgttgaccaccatgtgattagtagttaaggtccctgtcttatcagtgcagatgcaagtagaagaacccatagtctcacatgcagcaagatgcctcacaagtgccctgtcactcatcagcttcttcatagcaaatgccaaacttaaggtcactgccagtggcaaaccttcgggcacggcaacgacaatgatagttacagaaattgcaaagtagtcaagtagcgtcaatgcatcttcagatgaccagttggtgaagctaccagacgttgctttgtccaagacaaaccttatgcacaataccacaaatgtaagcacagcaaagcttaaaccaatcttaccaatgattgttgcaaccccatttagcttcacctgcagaggcgtctcatcttctccaccatcaaccagcgtttccatcaactttccccactcagtcctcataccaactgttgtcaccagcatttttgcagaaccgttttgtactttggttcctgaaatgtagaaaaggcttctctttattcacatgtgacggttcactctcacccgataagcttgactcgtctatctccaagttgtatccagatataaaaatcccatcagctggaacttgatccccaatagatagatgaactacatctccaacgaccaagtcatgaatggagatttcttgtctgctcccatctctggtgacctggacaataatcttcttcttctctcgatccaagtctctgaactgcaaagattgcttgtaatcactgatcgcagtaaccatgaccaccaagagtatacttagcaagatccctgtcccatcatacattccccttggaaatccttctgtagcaacacccacacctattgatactacagcgcagaccataagaatgataagggttatgtcgtggagcgcttcccacacaaacattaagaatgatctggctggtttctcagtataacgattttctccaaatatcttttccctaatgggcacttcactcgaacgaatgccttcagagagagatacagatacttttttagcaagttcttcaactccacctttctgtgccaggctcttagtgtcatttttgcgaaccatagatgcaagttcatctgcttcaatagaaaatccggctttcttaacctcatcagtgagcttgtactccggcctagcagcagctagagaaaaatacaaataagaaaagaaaagtttacataaccatagaaagtagga

SEQ ID NO: 30432 - DNA, 3870 bp, Arabidopsis thaliana landsberg
  unsure (1)..(3870): unsure at all n locations
ttgttgggactcgacgtcgtctctctccgatttatgaaccacttccatttctgatgctcgtataggtttgttttatgactccatggttctatatttgaatctaggttggtttgggtatgatttgattttgaatttattgtctgcttgatctaaatagtttgctctttttaaaaatgactgcgaacaaaagttcacaattagtagtcattgtaattattttcaagcttcgagtatgttttgtcctgattagcgaccgactttttttggagctgaatccttagtgttttttttctttacaatttatcttaggaagattgtgagatggtacaaaggagggaatagtagttttgaaatataatgttttggagttacaacattgcagagaagaaaggcaacgtatgggaattggggtgactatttttgcattttcattgactagttatggaagctgagtcttcaacccctcaggaacggatcccgaaattgcgtcacgggtatgcttctttttttctcatatcttactaactaataaattgttagcttgccacaatatcctactagattgacatgtttgtcacacctagaattgagttgcatgaccaattgtgtggattttacaggaggactagtggccctgcaagacgttcaactcgaggccaatggacagctgaggaggtgaaatttatgtttccatcagcttcttcttataagtttctttccaatcctatgttcatgtagccaattaatctggtctcacgttcttgatatatgcaacaaaactctgccctgtgtttgttcatttgcatgatatcattgatcatgagagatacaagaagtagacatttggatatatgcatttttacattctatgatctgcatatttgctaaatcattttaaccaaacatattctcaggatgagatcttgagaaaagctgtccatagtttcaaaggaaaaaactggaagaagataggttgacattctttcctttctatattcatttactgaagtgaactgtaatcttccttgtctaaatgcatgtcacatcttttcttaactctcagctgaatacttcaaggatcgaactgatgtccagtgcctccacaggtggcaaaaggtccttaatcctgaacttgttaaagggccctggacgaaggaggtgacatagttttttcctccactatttctataacatgtgcatcttgcactgtttgctttgaatttgcaaacatctctgatgactgtttattgctctcgtttgacatgtgtgtaggaagatgaaatgatcgttcagttaatcgaaaaatatgggccgaagaagtggtccactattgctcgatttttacctggccgtattggaaagcaatgtatagagaggtatgcttatagagacagctatttctctaacaacagtgttttactagcactatatagtttttgtcctcttttcaagattttaactgtgaaggctgttactgatataggtggcacaatcatctcaatcctgccataaacaaagaagcttggactcaagaagaagagctgcttctgattcgtgctcatcaaatatatggtaatagatgggctgagttaacaaagttcttgcctggaaggtactcatttctattgttatttgaaaaatcatcgtacatatttattcaatcttaaaggtattcttctatttgttctagcaatatagttttctgctatgttatcaacaggtcggataatggaattaaaaatcactggcacagttcagtcaagaagaaacttgattcctacatgtcgtctggccttttggatcagtaccaagccatgcctctagctccttatgagaagaagntctacattacaatcaactnttatgcaagtaatatagatggaaatggctgcctaaatggacaggcagagaacgaaatagacagccgtcaaaattcaagcatggttggctgctcactatctgcaagagactttcaaaatggaactatcaatattgggcatgatttccacccctgtggaaactctcaagagaatgagcaaactgcgtatcattcagagcagttttactatccggaattggaggatatctcagtctccatctccgaagtctcttatgacatggaagactgttcacagtttcctgatcataatgtctcgacttctccaagccaggattaccaatttgattttcaggaactatcagatatatcactcgagatgagacataatatgtcagaaataccaatgccatacaccagggagagcaaggaatctactctgggagctccaaactccacattaaatattgatgtggctacttacaccaactcagcaaacgttttgacacctgaaacggaatgttgcagggtacttttccctgatcaagagagtgaagggcacagtgtttctagatctttgacccaagagccaaacgagtttaaccaggtagaccgtcgagatcctatcttgtattcatcagcttcagacagacagatatcagaagctacaaaatctcctacgcagagctcttcttcaaggttcactgcaacggccgcctcaggaaaaggaactcttcggccagctcccttaatcatatcaccagacaagtatagcaagaagtcatctggattgatatgtcatccctttgaggtagaaccaaagtgcacaacaaatggaaatggtagcttcatatgcatcggtgatccatcaagctccacttgtgttgatgaagggaccaataactccagcgaagaagatcaatcatatcatgtgaatgatcccaaaaagttggttccagtgaatgattttgcttctctggcagaagataggccacactctctacctaagcatgagccaaacatgacaaacgagcagcatcatgaggatatgggggcatcatcaagtcttggtttcccaagcttggacttacctgtttttaactgtgatcttctacaatctaaaaatgatcctctacacgattatagcccacttggcatacgcaagctactgatgtccaccatgacgtgcatgagtccccttcgactgtgggaatctcccactgggaaaaagacgttggttggtgcacagtcaatccttaggaaacggacccgtgatctgctgacaccgttatctgagaaaagaagtgataaaaagcttgaaattgatatagcagccagtctggcaaaagacttttcacgtttagatgtgatgtttgatgagactgagaatcggcaatctaattttggaaatagcactggtgtcatccatggagatagagaaaaccactttcacattttgaatggagacggtgaagaatggagtggcaagccttcttcactctttagtcacagaatgccagaagaaaccatgcatatcagaaaatcgcttgagaaagtagaccaaatttgcatggaggcaaatgtcagggaaaaggatgattctgaacaagatgttgagaatgtaagtctctttctttcctttaaccatttgaatataagttgtgctactggtttacacaaactcagttcctttagattttgtcgccaatcatgtcattttgtcacctgtgttaaaatcttcattgttttggtgagttttaatcgtcattgtagcaatagattgtagatgtaactgacatacataacctttatgatggatcaaatcttatgcaggttgaatttttctctggtattctttctgagcacaataccggtaagccagtcctgtctactcctggtcagtcagttactaaagcagagaaggcgcaagtttcaaccccaagaaatcagttgcaaagaactctcatggctacgtctaacaaagaacatcattccccttcaagtgtttgtttagtgattaattggccatctcg

SEQ ID NO: 30433 - DNA, 1929 bp, Arabidopsis thaliana landsberg
  unsure (1)..(1929): unsure at all n locations
tgagcaaaggcaagattcaaatcctagaaaactttttaatgttcaatagctaaagtgttcgtgaccacaaatgttcaacgcgcattcaatgggctaaaatgattttaggcccaatagtttagtttaagcccattttagctccttccatatctcacaccttcctcttcatttcttcttcaccgagccatttcttctgtaagcggatttcatcagcattcagcagccagacgaaacttttaacgatctaccatcgaaccaggtctctcatatcttccgatcatcttctccgattacgattctttccttctcgtttttagattagctcaggaatttttctaaccttttcttctctgtcgatctaacacctgacctcaatttttcgttaccgataccaccattttcgaggtcagagctaccgttttcgtatctgtgttatcatatccggattaggttttgattttatgattacatttgttataatcagtgatttgttgtttattcgcgatcctcggattttcgctggatgatcttttgtgcttcctctatacgttttctaaacatagatttggatcgatttggtatatgagaagctgtgtttgttacactgttttttgtggtaacaaacacttaacattctacagcctccacaaggatccatgagtatatgtattttgatttgaatgtagtagctgatacttgggatacagtaatagattttttggtgacttccccattgtatgaaatgatgatgacaaaaaggattttgagagacaagtaccaataagtgtttcctcattatagattttctgtaactgtgtgtgtggaatcttgagattacctctagcatcgctattgtgctgtagattatgtttctgttaaagtaattcaccattgtcgctgatacgtgggatacagtaatagttgacacttgatacattagtatcttaattcaccatgtttatttagcaaaaaaatatttaccatgttatgattgatgatgacgaaaaggattgtaagagtccaatgttactccttataggttttctgtaatagtttttatggagttnnnnnnnnnnnnnnnnnntttcaaagtgaacgattttgttagttcctagaatctctctcattcactgtctgctttagttaaaatgagtttaatgttttatacacaggatacttcttcattaccatggcaacaagaaatgctttgagaattgtgtctcgtaggttctctagtggcaaaattcttagcgaagaggagagagccgctgagaatgttttcattaaggtaaagatcagaagctttccttattgatgtgaacaataatagtagactaagaatcctcgaaaaaactataagtatatttactttccttttgtgatattgatgatgaacacttattatcaagctcttgtttgattctatctgtctctgttgtacactattagataatatttggttttacttataagaaacttatcttgtgtcttaatcgtagaagttaaatctatttgttatctaaaccttgtagcatctagtttgaactagaaacctgttacataatacttactcttttcaaaacaatttatatttttcagtaagtcatcttctgtccttatattttaccttgtttatggttttctacattgcagaaaatggagcaggagaagcttcagaagttagctcgacaggtaaataattcctttaactccagttgttgaaactacgaatagcttgtttagataaagagaaaatttacagtcttgtgtggctgaaacttcttatgaacttactagggtcctggagaacaagcagcagggtcagcaagcgaagcaaaggttgctggtgcaacagcatctgcatcagctgagtcgggcccaaaggtatcagaagacaagaaccgaaactatgcggttgtggcaggtgtg

SEQ ID NO: 30434 - DNA, 759 bp, Arabidopsis thaliana landsberg
taaatctttattttattattttttaagaccactaatattaaacatatcaaatcatcctaatttagaaaagtattatataaaaccaaaaatgttatgtggtatgtataatattactatatataaaattaaactatagatataaatgtattagagaatgatacaatttgcaaagcttttctatataaaaaattattcttaaatgttaaaattactatttttaaaaaaaatcacgggacggtaaaaaaattatagaacgagttctattttggaattgggttatatggtagatgtatttgaatcaatatttataaaattttaaaatattattaatatgctgttttaataggggttaaaatttcagttttttaacaattgtttcatggattcgtggtataccgttacttaataacaattataaactgtaaaatataaatattttataaaaataaaatttgcaagttttaataaatattatttttaaaaaataaatcgtcccgcggtataccgcgggttaaaatctagtaactattaaaggtgaagtactaaacattttgtgtcgattttattttctaaatgaaatcatttttttaagatagaaattggaatataagctttttaacaaaataatatgcaagaatcacttgcattattgatggttacctcccaagtaactcatatgcatattcatataatcaaaacaaaaagaaaaaatgaaaaataaaaatatattgtccatctctctttcagatatacaaattg

SEQ ID NO: 30435 - DNA, 2135 bp, Arabidopsis thaliana landsberg
attgttgtgttaatatctctattcgtttgtcttctatcctccgatgcctaaacatttgtgagaactattagaagaagcaatggcatataatgaccaacacgtttgtctgtatgtacaaatatatagaaaactctgtagcgcagtgcggatgatcacctagtatatataaaagttgatatatattcaatgcattacattgtctcaaaacaattaattatacgagcggatatgggactagaaacccgagacgaatacggaaaagacaaggtctcgttccgaaatggacatatatctaaaattttgtttggtaattgggaaaaacgaaacccaaactattgtttagaacatttgggagagccgagtatataaaccttttacaatacacatcattattgaaatcttagctttctgaaattctaaatgtgagttggttaccacaactaaaataacagcccaattttactcatatttttaaatggaggggaagacttcaacaacacaagtgaacaacagaaatgcctacgactatcaatgacaatgaggatcactaatgaagaggccttacaagagaaatattcaagtgaagctttcttctttcttttcttttctttttttgattgaaatttatgctttctagattcacccaatccccacacactcaccatgaccgaaaaaaagtttccttttcacgatcatcctttagcatatgagaaattggacagattttcttgcattttgtgcaaaaagaaaggtggttttggctatttctgcgataagtgctatttttgggggcataaggaatgcatcaagcgctcacttctgcatccatctccatgcaaacattctctcaaaatctacacactcgaggcattgggctatgcaggtgaccattgtcatttttgtagagattatcttcttgatgatttttttcattgtttgatatgcaacatcaacatggatctcaaatgtcttaaagatccaccaccatcaagtatttatcacccaaaaaaccatatgcatatgcttactcttttgccgagagtggtcacatttacttgtaatgcatgtggtgtagaaggtaagcgtaatccttatgtatgtcttgaatgtaatttgatgttccacaaggattgtatatatctaccacgagttataagcatcaactgccatgatcatcgcatttctcgcatttttcatcttggtttcggagattggaaatgtggaatctgccgacaaaagattagttgctcccatggagcttttacatgcttgcattgtcctagtcttgcatttcatttaaaatgtgcgatgaaagatgacgtgtgggatggaaaagaattcgaagctgaacccaaagaagagcttgaagatgaactcgaagatgattccgaaggggaaattgaagatgatagtactgaagaagaaatcgaagaaccataaaactaatgaaaaataaatattggcgtgtatgttatgagaaattcattttaaagcttgatgcggattctgttagtgacaaactgacaatgtggtgcaacgattgtgtccaacaatgatccattctttttgtatacataatgtttgactcttgaccaaacgaagaaccctgaagtctaaaattttgtctatgactcgtcattagtaattctagagttaatggaacatgaccacattagcctaacacatgattaaaggggccaaactcatttttaaagattctgaaataacttattgcaattgctaaccacaattcatttattgaaaaaattgtatataaatgtcttcctgatttctaccataccaaaaatatatatttcttcctgattttctatgtaggagtttcaagatttaaattttaaaatatggcatatcaaatttaacactagtaatatggagtcatatctcaaaattgttttttataccaatttcacaaaaccttttttatctatatatgtaaaaatgttttaatcatttgttaaagaaataataatgatcaacctctatgatctaattcaattttgttgccttaaataaaataatacacatatgccacgtttgccttatttacataaaataccctttaaaaagatgttacaagcaattctggtcgcgattctataccaaaatttcttgag

SEQ ID NO: 30436 - DNA, 800 bp, Arabidopsis thaliana landsberg
actcatttaaataaaatatctatggaccttgtaaaagaccttcaagcccttttatttacctaagtaattctattatttcccctggttttattcatgtaattatatatatatatatataaatatatatataaattgttatagttaaagagattattttatgggcatttctcttttttttttcaacaatatatattgattccactcaaaagagccaaacttggaaatgctggtatttttggaaaatgatattaataatgaagtttttggaaaagaaaagaaaaatacattttagtggtaattctcttcttttcaatttatttttgttttatgttttgatcttctcatatttgtgttgaatcgattttgctttctatcttcagttaatgctacatattttggggttcgctgatattttatcacaagctttacagagaagagaccaagatattttgaatgttatgtcattggttgcatcgactaaacgagaggtacataacctaagagatgatggatgggatgattttctcgctaaagtctgtacttttagtgagcaaaataatatggaaatgcttattatggatgaagagtttgtcaatttacataaccaacttgcatcattacaaggtggactattactacgatgtcttagatatgcaactttaagcgtttaatgatctatttgacgaggtaaattcagaacttttgttttgcattgcatctctaagtccaatggattcttttagtcaatttaagaaatcaatgctggtgagattgactgagctttatctagatgactttag

SEQ ID NO: 30437 - DNA, 2187 bp, Arabidopsis thaliana landsberg
tgaacaaaagcttagtaagctagagcaaggtgctatggatgtttgcacatactatacagctttacttactttatgggaagaatacaagaattatgtggatcttcctgtgtgtacttgtggtcactgtgaatgtgatgctgctatgaaatgggaaaagatgtaacagcgtagtagggttactaaatttcttatggaattgaatgagggatatgatcaaacaagacgacatattctcatgttgaagcctattcctacaatagaagaagctttcaatattgtaactcaagatgagagacagaagtgtgttaagccatctactagagttgaaaatgtcgcttttcagagtgttgctcctcccatgatgaatgaaatggataatgcttatgttgcagcttacaacactgctagaccagtacagaaacctgtatgtactaactgtgggaaggttggacatacaattcagaaatgttacaagattattggttatccaccaggacataagataggtgcatcaggatatattggttatccaccaggacataagataggtgcatcaggatataactacaggggaactactcaaatgcaaccaagaatgcagatgcagcagatgcaacctcgtatgcaacctcaaactcagatgcaaatgatgccttatgcaaattctatgcagaaagctaatgcagtagctcatgtgtatactgagaatagttcctatcctcctgatggttatatgcctatgcctatggttaatccttatggatctttggctcctcagtatatgccgcatgttattcaaggtggtaacagtgttaatcttcaagcgtttactcctcaacaaattgaacaaatggtttctcagtttcaagctcaagcacaagttcaagagtctgtagctgcttcaagcacacctacgactactgtttctgaacatggtttaatgggtattacttcaacttctggtactgaaattctattcccttctactagcctgaaatatgagaatagtaatctcactttccaaaatcatacactttcttccttacaaaagcttttaccacatgatgcttggattttagatagtggagcttctagtcatgtgtgttcagacttagtaatgtttagggaattaaagcctgtttctggagttactattactgttaccaaatggtactagggtctctatcactcatacaagcactgtgcatataactcataagttgattttgcataatgttttgcatgttcctgattttaaattcaatttgattaaaactttggcatgttcagctcatttctatgtttcttgttgtttaattcaggaactttctcagggcttgatgattgggaggggtaaactatatcacaatctttacattctcgagacaggaaataaatccctctctacatcaatacctgaagcttgttcttttactggatctgttcttgatgatggcaatttgtggcaccagggtttaggtcatccatcatcgcctatcttacaaaaacttgttagtcatattccttctttaaagtcatttcattgtgatgtttcttcttgtaaaatctgtcatttagctaaacagaaaaggctagcttatgtgtctcatgataatctagctgaaaaactatttgatcttgtttatttagatatatggggtccttttagtattgaatcaattgaaggttttagatattttcttaccttagttgatgattgtacttgtttagttgatggactacttggatatacatgttgagaaataaaagtgatgtgtctagtgttgtcctgcatttctgaaacttgtttctacacaatttaatacaaaagttaaagcaattctttctgagaacgcgcctgaattagcattcactgaattgattaaagaacaaggcatgattcattacttttcatgtgcttatactcctcaacagaattctgttgttgagagaaagcatcagcatttgcttaatgtagatagggcattactctttcaatctaaagttcctatgcaatactggagtgattgtgtaatcactgcaactttcttgataaatcgtttgtcttcaccattgcttaacaacatatcaccttatgtacttctacttaaaaggaaacatgaaaacagtttattaaaaaattttggttgtctctgttatgtttctagggatttacataaaagaaat

SEQ ID NO: 30438 - DNA, 1464 bp, Arabidopsis thaliana landsberg
ccatacgtcgtactcctaaagttgataatgtggcgtctcagactgtttcttataacagtggtgatccttatatggagaatatggaaaatggattcattgcggcttataatacagcaagaccagctcaaaaacctctgtgtactaactgtgaaaggttggtcatactgtgcagaagtgttacaaaatcattggctatcctcctggctataaggcagctacatcatacaggcaacctcaaatacaaactcagcctagaatgcagatgccacaacaatttcaaccaaggatgcaacaacctgtagcagcacaaatgcagacaaacatgccaaatacaggaccaatgcagatgatcccttatgcaaatcaaatgcagatggttccatactcgaattcaatgcagatggcgaatgctgcttatgctgaacaaggttcttttgttccaacgatgtcgcatgttaccagtggaggtaataatctaaacttgcaagatctttctcaagatcagatacaacatcttatttcacaattcaatgctcaagttcgggttcaagagcctgcagctacttctattaatacctctagtcctactgctactattactgaacatggcttgatggcacaaacatctacttctggtacaattccttttccttctactagcttgaaatatgaaaataataatctcacctttcagaatcatactctttcttccttacaaaatgttttatcaagtgatgcttggattattgatagtggtgcttctagtcatgtctgttcggatttagcaatgtttagggaattaatacatgtgtctggtgtaactgttacattaccaaatggtactagggttgcaattacacacacatgaaccatttgcatcacgtctactctcattctgcataatgttttacttgttcctgatttcaaatttaacttgattagtgtctgttgtcttgttaaaaccttgtcttactcggctcatttctttgctgattgttgttatatccaggaacttactcggggcttgatgattgggaggggtaaaacctacaataatctctatattcttgagacacaacgtacatccctctcaccatcactacctgcagctagttcattcactggaaccgttcaagatgattgtcttctgtggcaccagcgtctaggacatccgtcattacctgcattacagaaacttgttagttcaattccttctttaaagtctgtttcatctactgcttcgcattgtagaatttgtcctttagctaagcagaaaagattagcatatgtttctcataataatctagcgtctagtccatttgatttgattcatttagacatttggggtccttttagtattgagtctgctgatggttttagatagttcttaactttggttgatgattgtacaagaaccacttgggtttatataatgaaaaataaaattgaagcttccaatatatt

SEQ ID NO: 30439 - DNA, 3438 bp, Arabidopsis thaliana landsberg
ttttattatgatattattataatattattatttatatgaatataagtttatgatattaaatgtgatttttttttaattgttgtattgcgaaattacccacgtataactgaaattttgttttaaataaggtacttatcaatattcaacatgttaatagatatgcaagtcctaatctagtatattataaattttggtgtattcaaataacaaaacaattctgtaattttgacttgatcaaaatactttcttgatgattagatttagatatacatcatgaatatatacaagtttttctctaacaatgttaaatctggtgactggtggttaatacttataggtataggtatcactttgatctttgcagatgccaaatcagctttcacgaatttgatctatgcatgtgctctactatgaacatggtcgaaggagacactatcttgacagtccaacaatcatcggaagcacaatgcaactttgtaaactttgaggcatttgattactgttggaagttgattctctactcaatcatccaattgacaagaagaccaaagaaggagaagaagtctcaaattgaaagaacgaagaagaatatgtatgagtcgtcaagtacaaaggaagaaaaggttggtaagatctttgacttgaaaattaagacagaaggtatcccacttcacgtaagctaaccactcctacacaagatgaaaaagaagaaacaaatggaatgtgaggaacaagaaacgaaagatcaaaaatgatctacaactgctgtccagtgcggtctgatacgaaaatcaactcccaataaacagtcactaagatggtgaatggataattaatcttggacttcaatggactcgtgaagcaaaaacctttggtatattaaaccggcaatctcgctaaagattggcaaaagctatagttgcttacttcttacataataataataattgatgtcgcaaaattcagaacaattctaaattcaatatgtcgtgttaaatctgtattcgattatcagataaaaatatcattttatagtcacattagaggaattcactactttcaccattttacattaataatcgagcacaaagcatcgaaaccatttttttacaacaaaggccgagaggacacatttcttacagaaaaaaagaaacctctccaagaccaatatcgttgttacatgattacaacaacaacagcacaaaagaaaagtaaatacaaattattttcagaacaaaagtagtcgagtcactccaatgtaagaaaacaaaggactttttactccgtggtgattttcaaaacagtggtaagtcttggcttcttgtatcttctaagaagcaaagattagcaaacaacactaaccgaagagagtgccatacatgctccggctgcccaaggcggtaattgcacccgcagaaccgggaaaaacactcctgctgctatcgggattgacactacattgtacgccattgcgaagacgtaatttaatcggattcgtgttaaggtttttcgagagagatcgatggctgttataacgtcttctaagttgtttctcatcagaacgtaatctgctgcttctattgctacatctgttcctgcaccaattgccattcccacatctgcagcggctagagcgggagagtcattgattccgtctcctaccatggctactgtgcttccgtccttttgcagcgaacgtataacgtcagctttaccagctggcattacttctgctctcacatcttcgataccaacctgcactcatgccaccataaaccccatcaatattctactaaaacaattgtttatcaagattgattacacacttatagaagtaaatattttaacgaaatcgaaccactataaccgaacagaatgcaaaaaaaaaaagaatgcctacacctaatcacatagattgtgaaatgagattctaacctctttggcgactgctcttgctgttctccagttatcacctgtaaccattatgggtcgaacacccattctaaggagaccttccacaaccaaagcggcttctcgctttagaggatccgcgattcccatcacaccaactaatttcccattataggctacaatgactcccgtctttccgctttcttcaagatcttccacaaatttctcgacatggtctgggatgtttatggcattttctgacataagtttacggtttcccacctgatcaaagaggataaaacaaaactttctttcagttggcgagaacaggaccaaaagcaagaagttgataatatattatggaataaaaccccaaccagaatcatcttctcattgactaagcactgaatcccttttccgggaagagcagagaaatccgaggtatcaagtaaccatccagagttttgcaaatctttgttatttgtttcgccatcttcagtggattcatcaaagaagtggaaatgccgagcgtacgcaactatagcttttgccaacgggtgttcactgctagcctaaggaaattaagagacaatatgaaaagctttagtaacagtttatacatcactatcaatccaagcagctaggaaggaagatttatcttacctcagcagacgcaacaagtgtaaggaattctccacggtccatctctgagaagacctttgtggttgtcacagtagcttttccttgagttaaggtgcctgttttgtcaaagattacatacttcactttgtgagctttctctaatgcatcacctcctttgatcaatacaccattggttgctccaactcctgttgccaccataacagcagtcggtgttgccaagccaagtgcacaaggacaagcaattaccacaacggatattgagaacataagcgagaaaacaaagtgagtcccgttctccggaagccattcgtctgggtaagctccaacagctccaccaattgaccttcaaaatcatatgtatcaagaaataagaacaaactaatcccaagtgtttcgttctcagagaaaaattaaagctaaggtactagatcttaccagcctattaaggtgaacaatgccaaagtaatcactaccggaacaaaaatacttgcaacctgaaaattggacaagccagggtaagtttgtgtccctgttaatgactatatcacaaaggaacaagcaataacaccaatggatgacacgcttattgacatgtttatctaatatacttacataatccgcaaatttctgaataggagcttttgacatttgggccgtctcgaccaaactaataatctggctcagaactgcatcagatcccacctttgtagctttcatgtgaagagcaccatgcatattaatagtacccccgattactggtgaatcaacctcttttgatacaggaactgattcaccagtcaccatactttcattaacgtaacttgaaccccacaccacaacaccatctgcagggatctttgcacc

SEQ ID NO: 30440 - DNA, 3511 bp, Arabidopsis thaliana landsberg
atacaagatatcgattgtgcagtggatttacccaacagaattgagcagcctgttgaaggcaagaaccgtggcgagtctcaggttagatttctactatgattggttttggtttagattggccaatacaaccaaatttaccaaatcgaaccgaaccaaaattcgaatcaaccaaattttaattctagagtaacaagactgactctgattagtatagacaattttagtatatttaaatggttttcttgttttctatgaaaatgtgtgtttagggaccattgacgttatcggggctgctgaatttcatagacgggttatggtcaagctgtggagacgagcggattataatattcacaacaaaccataaagataggcttgacccggcattgcttagaccaggacgtatggatatgcacatttacatgggacattgctcttttcaagggttcaagactttagcttctaactacttgggtttgagcgatgccgcgatgccacaccgtctatttccggagattgagcgtttgattgacggggaagtaatgacgccggcacaagtagcagaggagctgatgaagagtgaggatgctgacgtggcgctagagggtttggtcaatgttttagagaaaatgcggttaaagtctgaggaatcgaatccggtgatgatgaagcagaaagagagtagactggagatggaggagatgagattaaggagtgatactgagggttctccgaggaagaacagcaaaagatttaagaagcttgtattgttttggacataatccgttaattagttcaaataagattatgaggaagcaaacaaaaatagacgtataagaggctaattacaactctttaagtgttttttaaaagaaatttcttgtatgtttattttctagggttgtgaaccattgtaagacccattaagagatatggaactttatatttccttaaagtaagaaactatatattgagatagtctttggaggtacattaccaactaccaagtatgtaatactctacctatataaaggaagaaccaaagaaaaaataaagcatatagagtggaaagtctcttgccttgttacagagacttttgagaagagtaaaatcttgaagtgttgatatcttcttttatttatgtggtaatgaatatcccaaactgcgtaatagcttgatgcgtactttgcgttattagcctaatgggctggcctttgtggcccaaacgatgaataaagagagagaattatctcccaatacaaatctctatataataaacccaatttaccaaaagagaaaccaaaccctaaaagtcgaaaacaatggtgttctctaaagatctcccttctcctgcaacaatgttctctacctatgcgtcactagcgggatacataatgatgatcaaaccaatgattcacacgataattccacgaccgatacagaacttcgttttctcttacatcaagtctttcgtcggctcttgttcatcgactctcacgcttgtgatcaatgacatgatcaacgggactgataggaacgggatgccaagaaaaaacgagctctttttttcagctcaagcttatctctcaagcaagataagccccgatgcatcgaagctaaggatgactagagaccctaacaataagaacgtcaacttacacctcagccaaggagtcaaggagaggttgtctccgatgtctacaaaggcattgagctcaagtggtggtttttagaaggcagaaacaagacaaccacggttgtaggtgaagagacagaggaagcgatcgtcaattggcaatgcttcgagctaagcttcgacaagaaacacaaagacttagtcgtgaaatcctatatagcttacgtggagaggaaagcaaaggtgatcaaggaagagaggagaatcatcaagatgcactcctactctagctatacacttaggtggcaatctgtcaaattcgagcacccttcgacattccacacaatggctatgacgcctaaactcaagagttctgttatggaagatcttgatcggttcatcaaaagaaaagattactacaagagagttggaaaagctaggaagaggggttactttttgtacgggccaccagggaccgggaagtctagtctagtggcagctatgggcctatggctaactacctcaagtttgatatctatgatctccagctcgcaaacgttcagggagacgcccaactacgaagcttgcttctcgccactaataacacctcgattcttcttgtagaagatatagattgttccgtggatttgcctacaaggttgcaacctgcaaccacgacccttggtgctcccaaggtttggtcttcacaatggtttaatgttatctaatttgttttgtgtacatggatcctaaacaagttttgtatgaatagggatcaacaccattgacattatcaggactttaaactgcattgatgggttatggtctagttgcggagatgaacgcatagtaatattcacgactaataacaaggaggtgctcgatcccgccttcctcagaccaggccgtatggatatgcacatttacttaggacattgcagttttgagggatttaaaacattggcatctaactacttaggcatgcctcacgacaatgatgaccctcaccgtctctacccggacatcaaacgtttgattgatggacaagtgttgactcctgctcaagtcgccgaggaactaatgaaaaatgaagatgctgatatggcgcttgagggtttggttaaggttctcaaaagaaagaggtcagaatcggagaatagtgatgatgaatctaagaagatgaagatgctccaagagggagataagagaatatctaacagtactgaggagacatgaacaatctatgttttcacttgggagaatcttacaaatgggggtttcgataagatttggtacttcacatcgtttttctagttttagtttttgagttctagctttggttttacttcacatgttttttctacttcatatttaaggttatgtttcaatttgtattttttcaattatacactactacaataaataatatttgttttagtaattaaataatatattttaaatagtcagagatttacaactgcctaatagtatgaaaatagatatataccagaatataatttagttatagagattttaccgtatataaaaaggaaatattatttcttctatcgcaaaggaaaataaacttcttaaccagaaaaagaaaagaatttgaaataaaaggacaactatataaataaaataaaatttaactaaaagccctgataattaccgaaaaaaaaagaagtaaaagccctgatccgaagcaacaacattaaaaaagagacaccaaaccctaatctcaatacgtttaattgtctacataaataaaatttaatttaacctaaagcctcagacgcaacagctttgaaaatgagcgaccaaacctaatctcaaaaacgatggtgttctctagagatatcccttctcctgcatcta

SEQ ID NO: 30441 - DNA, 3450 bp, Arabidopsis thaliana landsberg
tgaaaaagaacaaaaggttctctcaacatttgactcccatcttttataactctaagattaagataagacaaataggttggatcaaagcaagacaaaggtttaacaatttcattggctacaccgtatagaccatgtaaatgtgtatccactgctaaagactttcataatgaatactaaacttccccaatatatacaacttttttcacaacttaatctagattcaagggaagggaaatacctatcatcccagcgtgcaaggcggcatgcaagatgtgctattagttcatgaacggttctcggaatgcaggctccaccagcaataagcatttcctggtaagacagaaggaaccccagaagactgaaaaccagttttgactaattgatcaacgagtaaaggaaaacaatgattcaaataagaagaacaaacctggacttcagtaatacctaagacactaatgttcaaggcaaagcctttaacgtgcaatgcagtcaccagaaaattctgtgcttgccaagaccttaagacaataggtatgtcatcttcttggatgaaaggatcacccgctgattgtcccaacagctcaaacagcaacccaccagcaactctgacaggcacctatccaccaacatattaacaaatttcagctatagaatcatagcacagctcacattacaaagaagcaacataactcagatttttgttacctcatagaaaatatgtttcattcgttcactaatcagtttgctttcgtcccgcagagcaagactgaccgcgggatgtaaccaatgcgcattacgtaaccacgaggcaataccatgatgggtagcatcaagatgacaccaccaagttggaccagcaagtggtcgttcccagtaaggagcagcaagctcagcaacagtggcttcatcctcatctaagtcaatctttcgcaaatcccaattattatcaacttgaacagtctgaacaagctcagagatcctatcccatccaattcctcgccaataactcctagaatgttcttcgtcttcaccagtaccaaattgatctgtttcacattcctgtttctttctatcacaacaacaacaacactgtttaaaaaaacactctacaagaaaaagaaaaaaagagactaagcactaatatgtatcaacaagttagtaacaatcatcatacattctgagagacgaatctccatggacacttgtgttattcttacgacgaccttgacaaaactcgaaagcacagataagtccattggtccagagattatggtaacctggattcccgttcttgtgattcgcattcatgcttcactttaaatcacagattttcgattcatatcagtcaaatctcgttttctgagtaaaaaaaacaatctcgaaattttaggctgcaatttcacgtaagatcatcaggaagcacggaattcgaaagaaaactaagccaaaggagtcaaacgcaacaaccttccccagaacttccctgaattttctgcaccgattcgaagaaagaaaacaacaatttgactgagagagagagatgaatgtggcacaggtcgaggacgacaagtcaaggctaagaacaaaccacacgtgtacatttacatattttgggccttattggaccttctctgtaggaccaatttaaaagcccaataagagtcgagtatggaaggcgataaaatacagagcagtggacgactctcattttttgttgtttctcaactctcgatcagtatttgattttagttttggtcccaaaaagggtataaatttggttgtaaatagctacaagatgtttaagcattattatgaatctctctgttaaagaagacaattgtcatgaatcaaatacttaatcatctgttgagaagtaggctgccagaaacttttcttttttttctttttttgcaaaataaatttgttaactattaatcacaatttttggtgacaacttaaccatctcctactcctcacaatcattcttttggtgtctctaccatttaataattcaccaaaatctccttacttaaactcacaaactcctcacaaattttctgaatctttcagttgaacatataacaacattcataacaatggctggaggtacagctctaactccaacctctgtaggatccaagtctgttccaatgaggaaccatgaagcaacagagagaggcaacaccaacaacaacctgagagcattacccaaagccgtccaaccggtttcatcaatcgaaggagagatggctaagaggccacgtggcagacccgctggctccaagaacaaacccaaaccaccaatcattgtgactcacgacagtccaaattccctcagagctaacgccgttgagatcagctcaggttgtgacatctgtgagactttatcggattttgcaagaaggaaacagagaggtctctgcattctcagtgccaatggttgtgtcaccaatgtgacattaaggcaaccagcttcatcaggagcaattgtcacattacacggacgttacgagatcctctcattgcttggatcaatcttgcctccaccagcaccacttggaataactggtctgaccatttacttagccggacctcaaggacaggttgttggtggaggagtggttggtgggctaatcgcatctggtcctgttgttctcatggctgcatctttcatgaatgctgtttttgatcgtcttcctatggatgatgatgaagctgcctctatgcagaaccagcagtactaccagaatggaagatcccgtcctttagatgacattcatggactgcctcaaaatctgctcactaatggaaactcggcttctgatatctactcttgggggcctgcgcagcgtgtcatgtcgaaaccttaatactactgctctaatctccacgtttcatcatatcaaatgccttaatcttattatctcatttaccttggaatcaaagataaatgtgtctgtaggttgagagagaaccgtaagtctggttaagaaactgaagcttatctccctttgtagtttgtacctgcaacagtaaaaagaaaaaactgaaaaaagcaaaagtaaatgattatgaattttaagcacaatcctctaatttaatacgaaaatattacaatatttttatccttgatccaaagtgaatgttggccattaatagcagaacatgtgaagaatcatacaaactggtgatttctctttacctgtgtgataccaattgcagttgcaccgttccagcaattatttaggaaactgagctagcaaccaacttctgattttactccactctcatcccagtttcaacatgttatataatctgtaaatctctagaggatttttgagggtttcactaacaagatacaaactcttgacgtttcagatatctggggattaaggaaataaacgcggtttctcatgtttatgattgggtactttcatagacaatgccaaa

SEQ ID NO: 30442 - DNA, 974 bp, Arabidopsis thaliana landsberg
taatcagatgctaatttggatatttaagaagaaatacttgtttattttacagtagtatttttttaaagatatcaaagatgaaatgagtataaattctacaacttcttcacaaatgtctagtaacatcgagaagctaattcttcaagcttcacttaaatatgtagctaatgcgcacaaatgtatttgtgggcgctagtaagtagtaacctcacgtcctcttattcctgctcccaaacagcaaggcgaagtaaaataagatcctaaagaagagacctgaagcaaacgtaatccacaagcaatcccacttgctcaattgcgtaataccctgttgtgcaagtaagtcagaccccgtcctcaagcatgtggactccgttatcttcgttctcagagatttactgagagtttcaaggagcttaaccttcccggagtcagacactcccccgagaagagtactgtcgaaaacctggacacccctaacaaaacaacgagacgggtcatcaaactcgttgattaagacagcctcatacggatacttgagaattgaaatgtaatgaaaccacgtccaataaaacggtattcgatctcggttgacgtagaatccactcaacagtaaacagtaggcgagataggtaatggagaccatgtaacataacatgatattcggaacaacaccggatataaaggtaacgacggaagatccagaccaaaaggaggcatagattaggaggcaatagaagacaaaaccctctaatcccccgctcaatccaacggtccagaatgtgatcgcggaaaataccaaggaaggtgcaagtagctgaggcagggacacaagagagtgtgatatgacgtatgaagatgttctgtacgcgttgtgtgttgtctctcttaagaaaatgtatcgttcttggataaaaacggggacattgtctaaacaacaatagaacattgttgggacgacaaatgcgaacggagtc

SEQ ID NO: 30443 - DNA, 819 bp, Arabidopsis thaliana landsberg
aagaacttcaagcacttatcttgtgcaataaggtcgttgccccattctcaacctcacatggttagttatgaaatcattggtgtatttcgattgtctcccctccaagctaagataaatcataattactaaacatcataaaacctcacactgctatctttgcagtatattctactattatctttatcttgagtaactgttactatcatttgtctctcttcgtacccaagttttgacatgtgacatgtcaactaacactttcacttccaacaaaacacttgtttattcaaattcatactatacacttctcatataatttacgaacattttctattgtcgtataaaatatttctatacaatttatgctgttttcttattctcagtttctcaccatacaatactaacagtaatagaatatgtgtctatcggtgaagtgggtgtgtcggcgtacataacgaagggaccaaattgatcatttattaaatatttaatcaaaagaagaaaaacaaaaagaatcaaaaacctccatgaaataaaataaaatcctctctcttcttcttcatgtgaatgtctgagtttcaatgcatgtgctcgctcttggatctcaatcgttcttctacagctttttcttcactctcttctctatcccttagctgtcacgaaacattctctttcactcttcccttctctctccccaaaataaatcagaaacctatcaacattcttcaacagccacaagtaaaatttatagacatttctgtctgaagaagaaaaagattgaatttttttgcttgttgtgggttctttaatggatccaagaac

SEQ ID NO: 30444 - DNA, 1733 bp, Arabidopsis thaliana landsberg
aaatggttcgaagatgatttggttggggaagtcatagcagaggagaataatgcgagttctaagaaacggaagagagaaaatcattctaaagggaccagagatagacgcaggtgtaaaccattgtccagacgaaaacagagaagcaatgtcaaacgaagaagataatatcaaggaaaatcaagaactcaaagcaaaatgataagatgataattggtccggattcttgaaaattgctttcactgtgactctagtttgtgtttggtcatcgttgatgcccttaatgaaccttggatagtattttgccaatttaaaggttaaagaactcagagactattgatttaagatactcggatgcaactgcatacttgtggatgtattatatatatcttatgataagtggttatgataaaaatttagacatgaaaaagcccaagaagaagcataaacatgtaactgttaagcatcagaagctgttgtttggatacacaagccatcattatacatggacactaacacaaatgtagatcatacttgtcagctactaaagagttaaggaagatttgctccagtacaccaatgtacactaacacgctagaaagtagaagaaaacaaacaaagacatcctaaagagttctctaacttccatcctacagattaaaacaagtaacaggatcctccaatttcaatgagcttcagattcaagtaactcctctttgcttcaccatggtatttcctccaccaatctaattctacaattgcttacctgtacaataaaggcagatcaaacttcagtgaactcattaccatatgaagaatgttcgactactatgaacattgatcttttttctcaatttcaaacctggaagtctactcctcctaatccagttcaacattccacgaagctggagaagctaaagaagtaagagaatgctatctagacttttccttgccagaccactggaagcacagaagctcaactgaattgtatattgacaaaattggtattcttcaaaagcagagaggcacatgactttcacatatcaacaataagtcaattactaaccagcctcatccatgcttacaacaactaacagcataggtataacattgttgttgaaatctaaggtccttccacggatacattatgcggtttaaagagaaagagtaacaaccatgtaaagtctaagccaccactagtaacttgaaaacctaatgtgagttcttcttacctgaagcacttgcgcgtttccggtgctttgatttctcaatctctaactgcatctccatcaacatgttcattcgttttaactctacctcctttgtcacttccattctctgcttctccaactcaatcatcatctgttgcttcttcccttcaattctctcgtaaacttctccaaacttgagaatcgccgtagctagttccctacacgttgatccttcactcagatctacctcttccacacgaggatgcttcctagcaacgaattcccaatcaccaacctcatcatcatcctcatcatcatcttcaagagagcttccagtagagttcgatccagttggattcagatgattcttaaaaggcgctgatttgacaactccgccagccgatttcttcacaacgggaccgattagaacatcgaggcggttatagaaacgccaagtcgacggcgagagtttagctttctctgctatggacttccttcttcaaagtatcgacccggttcttacac

SEQ ID NO: 30445 - DNA, 2242 bp, Arabidopsis thaliana landsberg
cacacgtgcctctaccaacaacaacaacataaaaacgaatttttatatcaaataaaggaatttttcagtcgaccaaaatttttaaaaagagataaagagagcagagcacgtggaagcaaaaagaaactcgacctcccattatcgttaacagacgaaaattatttttcaaaacttaaaacgttaataattatcaccattaacttacattaattcaatttcattcatatttttatatataacaaagaaaaaaagattacgaacataaccgagattttatgtcaccggtatacaaaactttctccggttccgtttagtaacggccggtataactatttatttatttaaaatattattaaacagctaaaagaggatccgacccgaatagatccccgatatcttgaaaatggtcctccatgtgccagctggataatccggatccgaaatcgaatccgaagttcatatccgtacacatatccgccgtgaatagatcttccccaaataaatcgccgccgagatagtcgggaaccactgagctccggaaatcgaacacgtcatcatctgagaacaagggcgccgagaaatcagagaaagtttcagataccgttgtcatggatggctcttccttgactacaacggccgcgactggtgatgaagaaatgccggagaattcgtcgacggcgaaaggagatcggagaacagacaccggagagcagagacaatcgttgctgctgcttctgctgatggaggaagaagcagtaacggattttttgcttttgttgtttttcttcttcttcttcttcaccggagacggtggtggggctttcttctccgtcgctgttgtcggagtgactgagaaattagtcagagcgtcgggaccacgaagctgaatagcggcgttatcgtaaaccatagcagcttcttccgccgtgttgtaagtacctaaccagagccgtacacgtttcaacggatctcttatctccgccgcccattttccccatggacgctgtctcactcctcggaacttcttctctcccgtcgtagtcgtcgtcgctgaaacaaccggagaaacagtagactccgatttaaccgctctcttttgtctcttcttcgactccatttgaccacaactaccagtaacaacagcaccggaatcgagatagacttcgttgacaaacttcttaacacgacggcgtttagagacaaagcgttgatgttcttcttcttcgtcgtcactggaggaatcagtagcgtctgggtcagtgactgagatacgaagaatcctggtttggtgagtgttggttaactccgatacgattgttgtcgtgttggttttgtgctctgtgaatttgattctcggtagaaccattttcttctccgcttccatttttctttcgtattctctgtttttgactcgagactgtgactttgtttctctctgtgtgtttataacatagagattagggaaagcaaaaaggaaagaagacaaagaataaagatggattttttattaaagagagaaacttgaacaacaagagtgatactcttcttcttctctaggtggaaaaagttttcttaaaggacgcgaattttttttttatagaaagaacaaaaggcacgaaaaacactgcgagagccgagagagaaaccttgctgcgtgaagatttttcccggaaagttgaagaaaggagaaaagggcttttggttatattcttaaggaatcgttcacaaacgagagagagataagaagaggaaaggagaaatagacaaagaggaagatgctcttttggagaggaggggttaaagcttgcttggtttttctaggaaatattcttggaaagaaaaaaaatttgggcagaggagagacaagaaaatgtttttgcagagtgtgagagaaagagtgacacgaggaagaagatgagagattttaaagcggcagagcacatgtaatggtagagagtgactattttataggatctttgaaacgtctcatattattagtgtttactcctttctttcttttttggtatttaattttaattttcgaatatcttataaaaaaaacttttgacaaagatatttctttctgtttaagggaggtggacaagattcatttgtatctaaattcttttttatttgctaaacactttgagtttagtgttttatatatatgtacaagaatatgaaagacatttcataattagtgttaagagatttttaacttttcattcgtgatgtcaaatgc

SEQ ID NO: 30446 - DNA, 1719 bp, Arabidopsis thaliana landsberg
gcctgctctcctcgtacccgttttgctctctatcttctgcatattcatcgggatatttttggcaaagacagatgatcctgacagtaagttgtttctttatattgttggaaacaggcgtggcgtttatttttccgttgaattgttaaccttccttttgttcccttgttttgatttgaacagatggaattacgggcttgcgcttaaaaagctttaaagacaactggggttctgcttatcaaatgacaaatgatgcgggaattcctgatccaactggagggacgtactggagtttcaagtgagtaacttccagaaattgtgttgctgatgatagaaaaactctagttatggttttaagttaacgaaataattttatctgttcagtttttactctcaaatttatttaccgttcttttcggttgttttcagtgagctggtgggtctattttttcctgctgtaacaggaattatggctggttcaaatcgatcagcttcacttaaagatacacaaaaatcaattcctgttggtacattggctgccactctgaccacaacctcactatatttgatttctgtgttgttttttggagctgttgcgacccgtgacaaacttttgactgataggtaacaatgttactccttgtgtggtcaatgtttttgtttcacagctgatccgttgtgttttcttaggcagaagtgtcctggagaaaatgcagaaacccacttatcacttgcactttcgtgtctttagcatggttaaacttgaaagaaactaaaaatggctgcatgttctgaatatactacataaaactactaggggtctacaaaagctgtactgttcttagtttatatgtcagaatagattttatcacgtacggccgcagagacatgttctttaagcatctcaacacctagcttacatcatgaactttctttaaattaatgcaatgaacaattttcctctgttgcaggctacttactgctacaattgcttggcctttccctgccattgttcacgttggaatcatcctttcaaccttaggtgctgctctccagagtttgacaggggcaccaaggttacttgccgctatagcaaatgatgatattctccccatcctgaactatttcaaagttgcagatactagtgaacctcatatagcgactctcttcacagcatttatctgcattggatgtgttgttatcggaaatctggatcttatcacacctactgtgaccatgttttatcttttgtgctattcgggagtaaacttgtcttgtttcctgctcgatcttcttgatgctccaagttggcgtccacggtggaaatatcatcattggagcctttcctttgttggagcctcactttgcataggtatgaaattttcaaatactcacggagaaagtgtctttcccagtctacctatgtagtccattcctatagaaattctgatttgaactaccacgtggcttcttatctcacctgaatcctgagatgtcttattacaaagccttgttgagtttttaaattattattttttctattcttgcagtgatcatgttcttgatatcttggtcattcactgtggttgccattgcacttgcaagtcttatatacaaatacgttggcctaaaaggaaaggctggggactggggggatggtttcaagagtgcatattttcagttggcccttcgtagtctcaggtcactcggaggtatgaacct

SEQ ID NO: 30447 - DNA, 1785 bp, Arabidopsis thaliana landsberg
gcaatgtacctcgatgctacattggacataaacaaatgtacgtgtttcgcttactgttaggaacttgtggatcttgaattgatttacgagtctacggagccatttcggcgattacattattctattgattttgtttttgatttgttttattgggaagattaccgatgatgattattgctaaactatggaattaccgtctgagtttattctttgacgagaaaaacgctggcttactgaggtttcccaatttttttgtaatcaagttttcaaaattattcaatttctgctatgtatttactgatgttggaactcaatgaagatgtttttcctttgttagttcttacaagaactcaatttttctcaattactgtactaattaagacagatgttggaactcaatgaagatgattgtcctttgcaagttcttacaagaacacaatttttcttaattactgtaataattaagacatatgttggaacgcaatgaagatgattgtcatttgcaaattcttacaagaactcaatttttgttaattactgaacaactttacacagatgttgaaactgttaattactgtactaattaagacagttgttgatactcaatgatgatgattctcttttgcaagttcttataagaactcaagttttggtaatttctgtactaagtaaagtagatgttgaaactgttaattactgtactaattaaggcagatgttggaactcaaacaagatgattgtccttcgcaagttcttacaagaactcgattttttgttaattgctgtactaattaagtcagatgttgaaactgtaattactgtactaattaagacatgtttggaacccaatgaagttgactgtccttcgcaggttcttacaagaactcaatttttggtaaatactataacagaagtctaatgaataaatctataacaattatcaaagtaatgatctttattgaatctacagacaaaaaaaaaatgataaaattgaatgttgaagtaatctacttccaacgttggttataaattagagaccacttaatcaaaaaagaataatcataaaccaatcaaagttttattattgattaagtttactaactatgtaggagggaagaatctgttgaggttaaaaggcaaagtgtagaactcttcattacgattatcacctctgaaagttctaaacttgacccaccaaggcatgcctctatctttctttgatctctctacttccattgtgttgtccatgaatactgcaatgattagaccaactgttgctggtgacatgaataatgtgttcaagaatgcgttgaaccatcctgcgtttgtgtgaactaatccgtaatgtctagcgtcccagtactgagcgaagaattgaggtatggagattccgagaaagagcgaaagtccggtgatcattaggtttctcattgagttcatgtttgtgaactgaagaaatgagagaccaaccgcagctgcaagaagagccaaccatacatgtattgaattcttatgtcttgatgatgatattgtctttgatgtagtaagtgatgatggtcttaccaacaaggccgaagaggatgcagtgcaacgctgcgtatatcgggactggtatcgatgcgaaaacagctccgaatttgcctgatcaaaacaaaacgaccaaaaccaaacgttaaggatcacaagagatagtacaatagtatggttcaagactaggagtatgagttatgttataatatacccaatgttgagaaaacaatcatgaagcctgcagatacttgaaca

SEQ ID NO: 30448 - DNA, 3496 bp, Arabidopsis thaliana landsberg
  unsure (1)..(3496): unsure at all n locations
gatttcttgctagtaatgccgtagggtcgatggggagtacttggataagatttatagttaacatttacatattaagttaagaatttgatcaatatgtatctgcaggttgctcgtaaagattggtatataaaatattaatatttgtgcgtagatatatatcatttttatatttttcttaacattaaatgcagtggtagagagaatcatgtcttacacatcaacacttttttttgttacttaaatcaacatcacaatcgcatttccttttctttttgccaaatgtattttagacaaaagcatacaatcaaaaacatttggatgtcaaaaaccagatttggacattttccctttagtgtattgaattaataaatcccaaaagaataattctatatgttttcttctgttttgattgggtcaatgtcacatagtacaagtaatttaggaaccgtgtcatgaaagtaatgggcctgggccctttgccgacaaaaaatgtatgggcacgtggcaactaggaactgtgagattcatatatcctacgtggccaagccgtgtaaaacggatacgatagattaaccctctttttcgcccagaatctttctcctttcacaaatcatattgtatatagtccgatcgaattaatcaaacgaaagattttaattattataagaaaactgaaagagagagcatctctgctttttcaaaatcaaaatttttggatttgggaattttcgttggagtaaaaaagcttcgtgcttggtgcatcatcgattgtgggtttctcttcttctttcgcttttcgggtcgctttctagatctctcttaggcttctgatttgatcatctcttcttcttctccctctcgcttcttcaggttagtttttttttttatttgttggtgtaatttacattggatcttcgtggacagagagaaagctgcagtttttgcccctttttttttaataggagatttttggaactttgtgatctgagtttatttttcactagagctcgagtttttttttttttttgtttattaaagtcgaagcttaaaggttttgttttgcctcttatagtattgttggaaatgagcagagtaagttttcatcaatatgtatcaaacttaggaacttgagagcaaggtttcattttgattttaagaatgtgttgtccaagcatgattacgattgtttgattgaagtctgaatccgaggaagaaaatgaccaaacaattaattttcttgtagtaaatttgtttttgtttacattgttcagggcctttgtaatttgggctgcagtgtttcttatgaaaacgattgtttctatcgtgttatgcggttggatgacatgtttttttttcttactgtcagggaagaagagtttgtttttctttagttgaattgtgtttgttgtcctctgcgatatcgctttttctgagcataaactggtttgatggatgatgatgatatggagtttgaggaagaatttttgatgatctgtgtgtggacctgaccaatacaataatctttttggggcttcttattggctcggatttcagggattttcacacttgtagtagagttgcaacatagacaaatggacgacgatggagaattggggatgttctttcctagctggaccagcaagaatcctattgacacggttgaatctcgtggtttaatgttctcttgttttgttgctgcccttgttggtatattgaccatcgcctacactgcttttcaatggcgaagaaatattaatttaagttggacgaaagccatagccaggtcaaagaaaaatccaaannnnnnnnnnnnnnnnnntgttgccccacatagctgggaactcgaccctatagctcgtgcgaaaaacttgaactgttgtgtttgcttgaagtccatgtcgccatctcaggcaattgtagcttcagaaagttttttccacaggtgcacaatctgtggagcagcagcacattttaactgttcttcaagtgcgccaaaagattgcaaatgtgtctccatggttggatttgagcatgtggtgcaccagtgggcagtgcggtggacagaaggggctgatcagactgatgactcctcgttttgtagctactgtgacgagtcatgtagtagctcctttcttgggggttctcctatatggtgctgcttgtggtgtcaacgtcttgtgcacgttgactgtcacagtaacatgtcaaatgaaactggtgacatttgtgatttaggcccgcttagaaggttaatattgtgcccactctacgttaaggaattgacgcggaatccctctggaggatttctgagctcaatcactcatggtgctaacgaacttgcatctaccgcccttgccagtatcaggattcaaagcaaaaaatacaagcaaactaatgaaacttcagctgacactggtaatagtggtagcaattgcgatgaatccacagaaagcacagctgatacaggtccaactgttaatggcgctcatgccgtactggaaaattctatcagcgttatgaatggggattcttctaacggggacagtgacagcaatggcaagctggaaaagaagccgagtgttaaaagaaccgggtcttttggtcagaaggaatatcatgcactaaggtcgaaacttaagtatgaactagctgatttgccttcagatgcaagaccgttgttggtttttattaacaaaaagagtggtgctcaacgaggtgattcccttcgtcaacgtcttcatcttcatctaaatcctgtgcaggtagagtatactgccttgaaaactcgtcacagacttaaatctgattctgtggacattttcaatgcattttcttaatctgtagtctttaaagtttattgacgcgagccgtttcttgcaggtatttgaattgagttcagtgcagggaccagaagtgggactttttctcttcaggaaggttcctcactttagagttcttgtttgtggtggagatggcaccgctggttgggtattagatgccatagagaaacagaattttatttctcctcctgcagttgctatactgcctgctggaaccgggaatgatctatcccgagtattaaattggggtggtggtttgggttctgttgagagacaaggaggcttgtcgacagtattacagaacatagagcatgctgcagtcactgtccttgatcgttggaaagtatcgattctgaatcaacaaggaaagcaactccagccgccaaaatatatgaacaattatataggtcagttaaattcaaaacctctaggtgaaaaccttcacagctttgctttcgatataatttcaattatatgtgaggttgctaatcgtcgaagtagtggggcagtttcatttgtatccagagtcctttagttctgtttgcaacttttgtcccgtatatattactcttatcaagacttatctcggggttaaaataatatacaattaacacggcagtttgcatttaaagtctatataaattaaaagtgtataa

SEQ ID NO: 30449 - DNA, 2291 bp, Arabidopsis thaliana landsberg
  unsure (1)..(2291): unsure at all n locations
actggcaaaatcacaatgctagtgacttcggctttgttcataacacaaggactgaacaggttgtctttgacattgttgacatgggtatccctataatgcaatcattggtcgtgggacacttaatgctttcgaagcaatacttcatccagcatatctatgcataaagataccttcggaacaagggtccattgttgttcatgaaggccaagaagctgccaggaaggccgaaggaaactggacagattcaaaggcaatccataacatagatggagctgaagcttgtgagcagtatagatacaaaagagagaaggctgcttcggcggatcagccgaagcctatgcttctatgtgaagatatagcagaacaaaaggtactgttggggtctcaattatctaaagagcaggaaaataatttgctaagatttctattcaacaacaaagatgtcttcgcttggtcagccaatgatctctgcggtgtcgatagagatgtcattgagcattcactcaatgtggatccatctttcaggccaagaaagcaaagacttcggaaaatgtctgaggataaagccgaaggtgctcggaatgaaagaaaaagacttctcagtgctggtgtcatcagagaagtaacgtattcagagtggctagttaacactgttatggtgaaaaaggctaataggaaatggagaatgtgtattgatttcacagatctcaacaagacatgtccgaaggatgagttccctttaccaagaatagactcccttgtagatgcaacaacttcttcggaactcatgagattactggactgctactctggttatcaccaaatttggatgaagaaagaggatgagccaaagacaagcttcataactcccagtggtacttattgttaccttcggatgcctgaggggctcaaaaatgctgaaggaagcttcagcagaatgacagccaaggtcctttactctcagataggcagaaatgtgctgacatatgttgaggatatcatagtaaaaagcacgaagcaagaagatcatatcactgatctgcaagaaacatttgctaattnnnnnnnnnnnnnnnnnnnnnnnnnnnnnnnnnaatgtgtctttggagtaagaaggttaaatttcttggctgtctagtctcaacaaaaggaattgaggctaatccaaacaaaatcgaagctatcctccgaatggaaccaccaagtacaaagaagggggctcaaagattggtaggaagactggcatctctcaacagatttatatccagatcagcagaaagaaacttaccatttttcgaggtgctgaagtcagccgaagtctttcaatggggcccaagtaaacaaaaagccttcgaagagttgaagcaatacttgatagatctcacaacattaactccgccaacgccaggggtcctctgttgttatatgtggcagcttcgcactcagcagtaagtgcggcgcttgtccaggagaagctttatggccagctcaagaagcaagttccagtgtattttgtatctgaggtccttagtgtctcaaagaaaaattatacagagctggagaaggtattatatgccgttttaatggcatccaggaagcttcggcattattttcaggcatacaatatcattgttccttcttcgcagccgttgaaggatataatgagaaatagagaagctactggacggattgggaaatgggctgcagagctcaacgaattttacattgattatgtgcatagatcttcgatccaatctcaagcattggcagattttattgccgactggacgccaggggctcaggatgaagaagcaaataaagatgccgaagtgtgggacagtgttttgtgatggctcctggggaaccttcggagcaggagcagctgctgttttggttcaccatccaaggttaaaacttcgtacgcagcaagactggatttcagctgcacaaataatattgctgagtacgaagccttgctcctgggtcttcggaaactaaaggcgatggggatcaggagggcgatccttaaaactgattctcagattgtttcgggtcatattgacaaaagctgcaaggctaaagacccgaagcttgaaaaatacctagacacagtccgaaggatcgaagcttccttcgaaggattctctgttaagaatatccctcgagggcaaaatgaacatgctgatttgttagccaggtctgcagcacagggcgtgccgctaccttcggacgtattctttgaaacaataaaggcacttcggtggagttacttgaaagagcagttcttacta

SEQ ID NO: 30450 - DNA, 3189 bp, Arabidopsis thaliana landsberg
  unsure (1)..(3189): unsure at all n locations
tcacactaaagttaatttataatatttatagagtgtatatatttattgttattattttttatattaatataattaatccaaaaatagatagccttaaatgaataacaagaaaaaattataggtgataaaaaagaaaataggatttaaaaaaaaaagttggacagaagacaaaatttagataatgtaacgatataatatatgttatcataatcatcacgacggaatcatccagactctccattttggttcaacgattgtttttggtgtaggcatttgagaaattggcttagacgcatgattaattggattaaaatagagtcaaaatcggattattttcggttaaattctggataagtcaaaccggatgtataattatcggttgacaggttggttcaattgcaagcgtagttttaagaacaaatccgaaagtacatgtagttttatcgaaattaaagttttttatggtggttttttaagtggctaaaagtttaaggtggaaagttgagattccaactagtatagggctgaaaatatcacacccctttaaattttaggcaataactttttttttcttcacatttagccacgaacttaataaacaagtgaagacctatcacattttgcagtttcaacaaataaatatcccaaaatttagtggcggcgagagggaaaccaaaattcgcgagagagaagtatgtcgaagacgctggtgcaaccggtagggcaaaagaggttgactaatgttgcagtggttcgtctcaaaaagcaaggcaatcgcttcgagatcgcttgttacaagaataaggtcctttcatggcggtctggcgtgtaagcttcgaaatctttgcttatctccactataatcgcttcaatcgatcttcgtcgctgcttgattttgtcgaatttggttacggttttttggttgtttatcactgttaaaagtgtagttagatgaatattgtgtttaaatggatcatgtgtttgacctaatttgataaatcgcatcatcaatctttgtttgcgttgttcttgacttgtcttgtgttgattttggcgaatttgattttgatattgaggtcttaagcctaattttagctgtttatctctgtaaataatgtaaggaattggtatagtgtgatgaatttggtgttaaaatgacctaatctgaagagaaacgagtatcatcgcattatcaatctttgtttgtgttgttctttgactggccctgtgttgattttgttttccgaatttgacgaattctgttatgatttggaggtctcatacttaattagttgtttatttcttgaaataatgtatggtatgataagtttggtgtgatgagggatatgagttaatggcatcatcaatttttgtttgcgttgttcttgactacttgtcttgagttgatgtttttgaatttggcgagtcgattctaatgtggaggtggtaagtctaatttagtcgtttatctctgtaaataatgtacgcaaatggtagagcatgctgaatttggtgtgaaagatggacaatgtgtttgacctcttagaaaagtaatgagatttgagtcaaaatgtttatgcagggagaaggatatagatgaagtgctacagtcgcatactgtttattcaaatgtttcgaaaggagttcttgcaaaatcgaaagacttgatgaagtcgtttggatcagatgatcatacgaaaatatgcatcgatgtatgttaaaacgcttgtttgattttcttagatttctgaagttctgactccttataatatatctaatatgttgcatttccaactctcatgttcagattttggagaaaggagagcttcaagttgctggaaaagaaagagaatcacagttctcaagccagtttcgggatatagcaacgattgttatgcagaaaactatcaaccctgaaacacaacgaccttataccatcagcatggtagagcgcctaatgcatgaaattcattttgctgttgatcctcatagtaattccaagaagcaggtgagttgtttaaagttataatgtagaagcaaagtgacttgtgggctttctatcaaaagcttatgtgagtcttcattttgattatcaaacctnnnnnnnnnnnnnnnnnnntccgtgagctgcaaaagcacttccctataaagcgttctccaatgagactgcgtcttactgttcctgttcaaaatttcccctcgcttctggagaagctaaaagaatgggatggtagtgttgtctccaaagacgaatctggaacacagatgtccactgtaatgatctatatcttcaaacattttgaacttcttcttttctataatcctctctgatcatggtgatacatttcttgtgtaggtctgcgagatggaaccgggcctattccgagagtgtgattcccatgtgaggagtatccagggaagactagaaatactcgctgtatcagttcatgcagaaggtgacacaagcatggatcattacgatgagcatgatgatatggcattgcaaacccacaagccgttgttacctgctgagactgagactaaggatttgaccgatcccgtcgttgaacttagcaagaaactgcagaagcaagagataagtactacagataacataaagcaagaaggtggagaagaaaagaaggggaccaagtgcagcacttgcaacacgttcgttggagaggctaagcaatacagagagcactgtaagagtgattggcacaaacacaaccttaagcgtaagactcggaaactccctcctattagtgctgacgaatgcatgtctgagattgacatggacgactctagagcagatttgaaagactactctttctgaaactacaattttctccttttgtgcttttaattttgtcaatgtgttaaatctcgtagtcatatgtgagtatgaatacacaaaacttgtggaatgaaattttgcgcaaactttaagagtaaaaacttgtgtttaagagacaagcttggatatttggtatttgattaataactgtgaccaaacaatatacatcgtacggcttgtggtatttcattgcactaacaacacaaaatcatgaccgatcagcatcgttcaagagcattgcacatatttaacgttgcggtcagaatttatggaagtatggttaacacatggaacagaccatagagataaatgaaggatagagcttgattcat

SEQ ID NO: 30451 - DNA, 3779 bp, Arabidopsis thaliana landsberg
gaacaagaaggtacaaaaaaaagtcgtctccttttgattatttcgtgagaaaactttaaatttcctgtttgttttcgatgatgatttttgttcttcttctttgtgtttatctactactaccacataaacaattcctgttgctttttggcgcaagttagttttttttttgcacaggaaataatcactctggaattgtatgtatcaaacagtgatctaactatggatgaatcaattgttttgatttcctgtttctttaggatgctttggttgttatttgtgctattctctgtgaatggaggatgtcaaatttgttttagtcacaggactatgactctgatattgtgatattgttggattgtatgaaaaaatgtgatcttctcacagcttcataattgtatctaatgatgggaaaccaatgtgatcttaactgacccgtagctaaatcttactctttctacacaattgtttgacctcatcattgtcactgatctctctaggataccgtatgtcaagagcttttcataagtgggtaaaccacttcggctttcttattcttatgtgttactgattgtgtgatttgtttctgttctttgtgttttcatcttagcctgcgtctgggactccaataagtggaaaaggagtagttatctgcaaatacccatctgatccaactgttgccttgggatacctttctgctgcttttctccttgcctgcactgtagcaggatacaaatccttgttcatctcttacaagggaaagtctgttcctaactctgtcttgttcaaaagcaccagcttctctgtgttcttcaacattgccttgtaagcatttcctcttcttttcaagaacacagtagctagaccattacaaatattcttggattccggtattataaagcctaataataggagtctttttgtgacctatggttattgtcgtgtaggataacatctggactggccttgtctctgttgctctggccaaccattacagaacaacttcacttgacccgtaatgttcaccgaaacttagaaaccagttgccccacggctaagaccggtctgcttggtggaggtgcctttgtgtctttggactcgtgccttttctggttggttgctctgatgctcgctgataacgcccgtgaagaccattttgatgaagttgaaagcagaagcatcgatgggaactcttcctccagggatgtgaatctcaagattgatgcttgagagaatgatatgcttttattggtattgggtataagaagggtttttcatttgttttctacttgtttgattaggaaaataataatttgtttcttctgttgttttttttttttttttaatgattggctagaatgttatgaaacccatctctgcaccttgatgcattgtgattcataagctgtatatgtgaaaaataatcttttggttatatctcttacatttgacataattgatatgagaaagcacttcaaatcacacactatatcaacatttttctttctaagaatatgtaaatattcacttgaattcgggtggctactagtagtctagtactactatcacaaaccataagactctcttttatgtcaaaaccaattaacatgtttagagccaatggttggagcttgggatggcataaatgggctaggtatagcatatcataaagcccattagaaaagcccgatataaactacagatcagtaaaattaaaccctgtcaaaaaccctttcgttttcgtcgtccgctcgagaaaagaagattcacttccatctgcaaattccttcactccctgtgagctcaatagagagagaagaagagatgccgctcggagagagaggaggatgggagaggaccgagtccagatactgcggcgttgagactgatttctccaacgatgttactcatcttctcaacttcaacatttccaccggcggttttgactatgttctcgctcctctggtttgtttccttcttcttcctcgactctcacgtccttgcctgttgttactgtatcaattgggatttgaaattttatatctttgacggagtttacttctttctcttcctgcaggtggatccttcgtataggccgagcttggtggaaggaaatggtgtagatactcaggttcttccagtctgtggctctgacttagtcttgtcaccttctcaatggagcagtcatgttgttggtatgattctatttgcttctccaccgtgtgattttgtactcgttatgaatatgatgggttttgatttgagtggtaaatcttcattctctaggaaaaattagttcgtggattgacttggattctgaagatgaggtcttacggatggattcagaaaccacattgaagcaagaaatagcttgggctactcatctctccttacaggtgcttgtgcatctatggatttaactcactctctttgttttcttgcctgcaaagtgattttgaagagaaattcttttgttgcaggcatgccttcttcccactcctaaagggaaatcgtgcgccaattatgccagatgtgtgaaccagatcttacaaggcctcactaccttgcaggtggtttacgagtttcttgctgccggtctagctttatttcagatgagacttttctttacaagatcaccttcaatcaagctctaacattttgtggatcttctttgttttgtttaaatgtcatttctgcgctgaagttatggctaagggttccactggtgaagtctgaaggtgattcaatggatgatacctcagagggactggtaagacattggatcaaattttatgcaaacttaagattgttagtactttttgtgccttctcagatttttaagggactctctaatgcggatcccttggaatcacttgatgtggctgccttttaaacctagaaatacaaataaatgtccctatctgttcacgtttttgtacactttgtgtgaggattactttaatatatactctcttctatgcagaatgattcctgggagctgtggaattcgtttcgtcttctttgtgagcatgacagtaagctgtctgttgctcttgatgttctgtgagttgagagaaactcttgattattgttgttaatgtggacccaaagttttttttccactctactaacataacaccattttcttcatataggagtacactaccctctgaaacttcactagggcgctggatgggagagtctgtgagagcagccatattaagcactgatgtaagtgcctgacttcttgccgcattattataaactccactttgaagtattgcgaatcacaaaatgcctctaatttggcgttgcaggctttcttaacaaatgctcggggttatccttgcttgtccaaacgccaccaaaagttaatagcaggattttttgatcatgctgcccaggtaacaaacatcccactctttgtgatatagaaataaattaaaatcttcttttgactcacaaaagagatctattagactcgatctggtgctcattatcatcaatcttgtaaatgcaggttgtaatttgtggaaagcctgttcataatcttcaaaagcctcttgattctagctcggagggtaatttttctgtataatcttttgtcctctgaaaattagctattatcctctgggcttgttttccgtagctcaatttatcacgggcattgttataatcatagttgattccaagttttgagctaaatattttattacgggcattgtttgtcaggtacaaagaagaatcctctgcgcatatatttggactatgttgcttatctg

SEQ ID NO: 30452 - DNA, 1468 bp, Arabidopsis thaliana landsberg
  unsure (1)..(1468): unsure at all n locations
ccatgcctgaactggactcttatctccgcactgtttcaatagatatatttatattattacaagcaaaccagaaaatttgcaaaaaaaattccaaagtttggtaccttcgggtgtttagtgctttcccagctttcattagaaaaggtacaccatcccatcttgcattgtcgatgaagagtgcagcagctgcaaatgtcggggtcagactaccttttggcacagttttatcatcagtatagcttggataagtgactcctcctatgctgtggctcttgtactgtcctatcaccacatcttcaagttttattggtctcattgaacgtagtacctttacctgaattaatgcgaggacctcaaaatactgccttgaaatcaacaaaattataagaaagggaacaataggagaccttttcatttctgatatcctctgcatccaaactcacaggtgtttccatggcgaaaagagctaatatctgaagcagatgattctgcattatatctcttattattccgtaattgtcgaagtacctggatttgaagagtagaaaagtgtcaaaacataggcttcaacacacatgagaaataaaatattagacagaggacaacaatgattaccctccgcgtccttcagtgccgaaatcctcagaaaaaatgaattgcacgttccttatatactnnnnnnnnnnnnnnnnnnnnnnnnnnnnntttgagaatcgaagaaccgacaagttctcaaccagctccttccctaagtaatggtctatcctgtaaaaatcaacttttcgtatcagcaaggtatcttaaaccatcatcactaaaatttacaataacataaacacgatctctccacctaaatatttggtcttcctccaggtactgcttaagagactttgttaatgcagccgaggttttggagtcccggccaaaaggtttctcgacaatgaccctagtccatccattgacagatgaagcagatgagcttgcacatttcaccgcgtcaacaaagatatttggagggattgaaagatagaaaagacggttcgaaagtcttccaccctgcaaatagttatgtgatggataagggcaaataagaaagaaaaaatgtaagaagaccaaagttttctagtttttactaatttttcagaaacaacaatagttttcctaattctgtattcaggccataatctacaacatatcaccttacacctaccaaggtaactcatgacctcaattagccttcagaaaaatgaggcaatgatgcaatgtggttgcaaggaattcatgaggaatgcagaaaaaaacaataagctgaggaaaacatcaatacctcatgctccttgagcttctcgtccaatgcaacaaaatgttcctgagaatcatactgacccgaatggtaaaaacatctcttgagaaactcttccatcttttcaccgcagtttgccctgaaccatcacagttaaatgttaaa

SEQ ID NO: 30453 - DNA, 3605 bp, Arabidopsis thaliana landsberg
atccaccttctttatgtgccacccggcatttctcagcttgttgatcttcgtgatttgatcctttgtgagctgaaatgtgttttctttgatggctctcaccgccttctcataagcctcctttctcatagggtcccatttatccatgtcattgtcccacttgtacattttgaggtagtcatcaaactcttgcactcctatagccttccatatccccaatggctctttcggggccttcttagagcggtggaactcagcgatctcctcgaacatacctgacttcatcataagatccaaacgtaaagaaagatactcgaataacacagactgatccacatctatccaaatgaaacaacaatcatatttcaactcggagcagattgagcccttgtgatcagaaaacggatagttttcagggtcataagattttgcaaggagagcatgaatgtatgagttggatccaccggcaaggattgggagctttttacgttgagtaatctcggagatggcttcagccgccataacgcgaaattctgccgctgtgacttctccagcctccgggtttagttcaccgagaaggtgatgtggcactccacgtcgatcttcaatggtcgattgattcgtggtgatcttcaagccatcgtacaactgcattttgtcagagttgatgatctcggctttaaaatgtaaagcgagatcaacagagagtgatgacttgccagaaccggtggcacccatgatcacaaccattttgtcattacacttcatgtcgtaaattgagattgagaaacacgaatatacacaaacaatgttgctatgctaatatcatattttggttaccccatgcatacatatatatactgtaggaatgtgtttatgaatgaaaggaaagcttaaaattgatcacataagtctattataactctatattaaagttttcttgattcgttagttttgttcattcattattttgtaaatatctatattaacatttttgaagatatttttatctaaaataagaatgtaaatattcaattttacaaacatagaaataaacataaatataagagattttgtctaaaaacatatttatcattttaatttgaaatgtctttttattgataggtgtttacttgccaaaaaaataataactcctatatgattttaaaagacacaagttcattcattcaacaatacatagataaaaataaatattctagtcttgtatagataaatatttataactagtcataagttatagcagcttgatccaataaaaaaataatagccaagttattttttttgtttttgacatttatagatcgacatgtttgatccataaccaatttcctactacgagtggtaacgcaacttagtggaatcgaattccggtgaagaaagcaaagtcaaatgaactcctaattattgtgtagcttttgaaacactttattttaataaatggctaactcacataataaaacgattttggattatacatgtagaaagaccaaagtaaaagcagtcttgcaccgcaaccttcttctccaccaacacgattacacgatactatgaatccttgtgccgtcgttagccacaaaatcaacttatgccaacgatatttttccatactaaggctaaatacagacccgactcacatcaaaagctaatgaatcaatgaataatggcatccaaatttgtggggtgaattttaggcaaaaagaaatgaaattatatgctaaatatacgaatactgtaacttacatagcaattgaagttactacgtatgtagattttttttgtctgggtatgagatatttatgtcaaacacgaaatgcttcaacaaaacataatgtattcttttataatatcattttatctcaatgttttggcgacatttacaatgagcctcatcaaggcaatctttgttataaacagaattcattttttccttttttcttatttctcatattataaaacgtagacatgttgtcatcttatataagtcttaagcctgatattattatcgaaaatattcatcatgtgacattcttctgaatcttcaaatatatacggctcgattaaccatgcataattttaagtcaactacaagtctacaacacttgtaaatcttcttaattcgttgctctcgcattgttttgttaacaattgacaccgagcacactactactctggtagtctggttaattaagtatacatttttaaaaaaaaaaaatcggagtcattttcctgctccagaaattagatagatacaaaattagtaagagatgcaaaacttaaccacattatttcaaaaactgaattactaatttaccataacacagtttctatgtgatgtatacatattcatttacttatttccatttgtattatgaaccaaaaaaaacgaaacccgctcggtttaacatccattagacgcgaaggcgcatgttctcatcgtcgtcatcaacggcatcggcggctccagctgcaagatcaaggagtttctccatctgcactgtcatttccttgagcgtggttgaagccttgtcagtgtttttcccaaccaattcattcacgcgcctcatgttgtcactggaagccctgacgtcgtagttagccgtgtcgggggatgccttgagcttcacatttgcactcttgagatcagctgccacggccaagtaggccttgtggcactctgtaaatgcaaccttcaccgttggatctttcttcgcagtctcatctacgaaaatcgctgtcttctccgcgtgggatatggccaagttgatcacagcctccgacaatggaagctgtataagatttcattttttagcataaactacgataatgatcattcccattaaggattgagatgtcaaagaaaaaacaattcgtttacaataaacaacatatgtttagagatcttaatgtttgtattgtttcaaacccttaatctttttggcttccaactaaaaaataaactggtaataagtggaccagatcagaattcttatacgttactctaagtatcttttaatttacaatgtgtgattctaaacacgtcaatttctgttttaggtgaaataatttaacctaaagaaactgaaacatttcaactttttcatatataaaaatatttgtgttgctgatttgaaaacaagcaggaataagaaaatgcaaacaaataatagagatcataccaggccaatgggagcagctgtagggggattggtagtcaaagttttaacgcagaaagcttggtcatgggaacgatcgcagatggcgtcaatgtatttcatgtgaggggaagctgaagcaggagataagagtagttgcaacgtaattgccgccgcagcgaaggtggacagaacagaggacgttgccatttctcttagcgtcggaagttttgttgctcaagtttccggttgttattcagttttgtgttgtttggcttttggttcaaggcggatatatatgtatgcttagggtttcatctagggctggataactttagaatgtgctatattataactggtatcaaataacgttaaactttagtaacttttttcttatgttttctaaatttggccaatgccataattcgtggtttg

SEQ ID NO: 30454 - DNA, 706 bp, Arabidopsis thaliana landsberg
agaaaattccaaggtaacatcactgccttgagattgttatgaatgtatgtttttgaatctgaagtcacaactgcttaacttatcttgctctttcttcagttgcgagagttccttatggatcatggtcggattgttgattccttacagtaagtcttcttccttgccactagcaactcacattcatctccttgtgtagcattgtgatgaaaaaccgtcaattatagtgtaaatggtcgggacctgtgaatgtgcttagcaattatctaagattaatcgattatgcgcaagggacatcttactcgggagataaggagattgagaagaactacgaacatcaaagagtgtgctaggaatcaataagttcaaatatacgagttttattaatcttttagtttgtacttttattttttaattttgtattttttctttgtaatataatttttgtattatgatttcatataatgtaataatatgatatctttttaggtgccaattttttaatggtatttgattttacaaatattcgaaattattttttttttacaaatattatattttaattaaaaaataattcgtaattatttattattttgaatgatttaaaaaccaactaataacacaaaacatttgctatctttgctataggtaaaatctaattaacgagttttaataacatctttataacgctattatatacaataacaat

SEQ ID NO: 30455 - DNA, 682 bp, Arabidopsis thaliana landsberg
  unsure (1)..(682): unsure at all n locations
catgatacaaacaaaaaataatagttttgagtaagataaaataattgtaataattaagcatccaatgttttaaaagaatccaaacaagaagcacctttctatattcatgcacttaaaactctgccaaaaccatttttgattttaaaacagaaacataacaaaccaacgaaatcaccgtaattagtagccaagatccgaaatttcattataaaggtcgtgttttttgttttgttttgtacgaactagtaacataggtttttaaagagaaatagactagagctgtacaagtggaaatgttaaccacgaaaaacaaaacctatttttcttttgtcttcttcatggatggtatttgctttttgatggcttaaagacgatcccacttgtagcgaccttcaagcggttcgtcattgacaatatcgaagttgtacctgtgccaaagtgtgtgtgttcgataggattctgattctctctctttttaggatatttgctaaactacgcgtcggttaatctttttatcatgcgcacgcagacattnttactcacattcctctctctctctctctaggtacggactcactccaatttttcccaaaccccaaaaagcaaagcgcacacaacaaccaccagaacacacgtgagagagaagatgaaaattgtaaaatggactcactttttctatgaa

SEQ ID NO: 30456 - DNA, 878 bp, Arabidopsis thaliana landsberg
  unsure (1)..(878): unsure at all n locations
gccatgtggcatttcactcgctaccaattttttctgggaagtctcttcgttgttgtcctttggtttatacaaagagctagccaatattatttgggggcatttctttacatacatgtgtaaaaaatgttcgcctaacgtcgcatgtaggtgcatgcgtgtatatatatgtatgtatgtataagtttgtttgttgtatatatgtactttatcgtagatccgagcatgcaaagtaaggttttacgtacgattaaatagaataacaaatatttaaattggataaaaaagtgaaaatatttaagtaaaaccaggatgtatatagctaaattgatagtctaatataacgatcgtaacttttcaagatcttttcctagaaaatcttttttttctttctggagtctagaaatgatttaatatttcaatctacgaatcatatataaagagatattgtaaggtattcaagtctataatccacgtggaaacgtttgttaattatgatataaatacgttttagttaggaaatgatatctctatcatttacacggtttggttgaatcaaatggatgaggatgaaaaatttggaccaataggacacgaagacaataggaccatttgatgttgttttgattgaatatttaatgaatactttttgatcaacttgcgggatcttatacttgttaatttcctatgttcccctttgcagngtaacgctgactaagaccttcattagtatatacatacatatacatcaaatgatgtaagttgatactttataatgaggaatcaaatgattcacaatatttaaaatcaaaagtgttgatcataangtgcatgagataatgattaataattagttttattctcgaatgaatggtagttgt

SEQ ID NO: 30457 - DNA, 2166 bp, Arabidopsis thaliana landsberg
tgtttttgtcctagtccgcgctaacattttggcttatgttataacttccttggttacagtattctcctaatttgagcgataggttatagtgtatataaacaggaatcactgatagagaaaggacgtcgtatatcttcccatgctcacaaattggattatcagttaaccgaattaggccgaacaaattgtggaaatcaatccagtaaaagatttattaaataatatctaaataatacgaaagcaacaatgaatttaaaacttgtaaaagttcttcttgttcagtactagcttcagcgaaagtctctcaactctcaaggaatggtgatcaaactgggaacatagacagaggattgaaactcacatagcacttgatctatcttaatctttttgcacaaatctcccctcacaatatacacccaagctgctttaggtctcttgctaggacaacacagaacaaagctcttcccatagatatcattatcgacaaagtaacttgttgagatgtgactaagtaatatggggaagtcaggtcttgagacagtcatgaacttaatccacaccacatcgtctccatcatccccgttaccaattttatcctttgtcacccaaatctcaatctcccttggtttttttggattgttctaacactgaaaaccgatctcccttgtaaatcgagaggatacgagtatgtgtagtactttttttccccttacacggtaaaacaaaagatctttcgactcttttctatctctttcgaaaaatcgagcatttggatgaaatactgaccagtgtggggagaattataagctgtccagtacaaatttccattcagggagaccctaccggagtcgttcattaattctggcttttcgtgaaaacgggtatgatcagtaaccttccacgcattggttgcaaattcgaagactgaatatgtatcagtaactttaccctgccaagaacaactactccttccgataatcttgtaactcttttcgggtctactaccatcgtaaccaatggccttgccacatgtattctcagccttggcaatccatttagtctgtctccacaacaacgggttccaaacaacgcctccgcctccattaagaaagctatatatgaagaagttaccatcgcagatcccatacagatgataaccgcggcaacttaaatgatcaaagcgtaaatcacgcacctttatagttggattttcgtcttggaaatcgacgtttatcgaataaatatgggaatgtgtatttaacatgatttctggccgaccgcaagcaaagtgattgttgatgaatctcttattattgaaaagagtgttccattctctgcaaacggatctgaagcgaacgagagatcgaggtggaactcgaaagagtatctcttcttccagatctaatggaagctttttcggcaccattagggttttctttgtaaaggaagcaatgtaagaattttttttatatagtgtaaatattagggttttctttgtaaaggaagcaagggaagaaaaaaaaaatcaatctatagagtaaaaattattgcatattcgacaaatatgaattgagaaaatgatacttttctttttatattttaacaaaatactagacattattacaaattgaattgtttttaattccatggataacacctatcaaattttttgttgaagtttcctgaaatacaagcactgtcagcattgatagaccaattacaactataacaatgaccttgatctctgtcagatctatatgtatcaaaccatttgacattgttattccaaagaaacttgcaggtgaacaacgttgttctaaaccagcttggtctaaacttccatagaaacgcttgcccatgcagcaacagatgctcacctagatcatcgtctttagatctacaacttattgtcaaggttgtttgcgggctgatattgttggtgactgtgacaacggttttagcaaaaggattgtatccatgacaagaacttatgacatagaaaaggattatagagagaacgacaaatattttagatgaatttttcattaatattttttgttgttggacttgttgtgcttgtttcaggttcataaggtcagccaagtttccaatttatagggttgattttgtgttattaatctatgtattgagaaccgttttaataag

SEQ ID NO: 30458 - DNA, 3285 bp, Arabidopsis thaliana landsberg
  unsure (1)..(3285): unsure at all n locations
tcactattatttgagtaattgaatcatacgagtataaaataatgatttttcatatattaaatgatgaaacatttgggagttaatgagagtagtttaaatgtcgtggctgaccatgttttaccagagtcaaattgcattaagtaattcaacatgttttaacagttttgtttgttctattaacacactttttttacctagaaaattcatggaaccatgcaagatcaatagtatgatatataaatgttgcgttttccacaatagtagtatacaaaatgaaaaaaaaaatgaaaaaagaaagcgattttgttttgtctttgtgtatagactattttatgtaaatccaatcgttcgaaatgaatgaaacacgagcaaaagcaaaataaaatgggttgttgtcaattgagtataatagtaggctagtagcacatggttcttcaaaatattaatgttaaattctttggaataaaattaaaaaaacgtacgaaacgaataattacgagaacttaagaatgtaaaacaaatcatgatgatgattgattattctatgtgtggacgacgaatgcaataaacatctctttgttttactttctatttagtaaaccttgagtcctcgatggccaatcaaagtactatacataactttgttttgggtagggagtactactatacataattaatgtagcataaagcataacgatatattttcgccttaaaactgtaaacttaaccgtaataaaattgtgtgcctcatgtctaaataattcttgtgttcatcttttagtgaagtaataaaaggcaagggtaaaatggtccgcacagacgcagacatcgatgagatcgaaaacaaaagtaacgagatgagaccaaacgtgcaagccatgggttggtccaacacttatcatttttaggcctaaaagtttgtgattattccctgcctttttatcctcccattttttcttttatttaccaacatattttctttttacatacatcagtgagattttttcgacttttttttcaacttcgtgttcaaagatcagcgagttttttagtttgactattgatgcatcatacatttgtttaaccagtggtacatacatacgattgatacacttttacaatccacgtatttacggcaaatgtgaattaatatttaatacactttattattaaattcaggcgtctttcttttgtgaaaaaaaaaacacttaattatatgcattcattctataatcactcatttcattattaatttcgtaagtaattatttagtattatactactaccccgcagtaccatattatcagctttgaatacccataaataactagtttgataactacaatggattggattgaaacattagtagactaggaaaaatctcttttatataatactagtattcaaaaacaaaaacaaaaactgttatcaaatatacatccactttagtatgttttccagtacgaaccgaaattggagtatggacactgcataagcagcagaaatgtgtacttgaaaggttcacaccttaagatttcatgccgaccaatcgtgtcggcccaccaacactttaaagctctttaacccaattccgcgttctttcagaagaacaattttagcattcaactttttgaccttccatttttttttcttcattcttttacatttgattttctccccataaagtttaattttatcattgtttatgtcttttgtcttttttatgtaattcctcgagtaacactgtccgaaaataacaactcttaatcgtgcgcagtcacataatttaggaataacaaagtcatcctttataatttcattactagaattttgaaaagaaaattaagagactactaagttttactcctagtttgactgaccatatttgtcgattaatttataaaacatgttgtttgtttgtttttaacgggtaactggtgataaaacagaaatctctaaaactctaccgagttatatcacattacttgtttaattggttcagatattatcatcatcatatagaacaatccaccagttatgcctgattcttaaaatcagttataccaaaataattctcatatagagagaaaaaaaaatttggttggaactaaagcaaatgacaaatcagtacaacaacgattacatgtatatataacttaaaaagttaaaacaagataattgaatggttatccaaagaactctctcacctaataataatcttaagatgccacaaatccaaaaaaaaaaaatcacaattttgcaaatttaaatactttgctttgtctattcttggtaggttttgtttttctctcttccgttcacacaatttcttggcgatcacgaaagacaaaaaagaaaaagaagaaaacaagagatttcacatcaatcaaattgattccattgcgcgtgtaaccgcaatgcgcaattgggaggacccgtttacgcttgcgtgtaacacggccttgaagaagactctaccttcttgcattttcctcatcatctttatcagcgtgttatgtccggtggcaatgtctcaggtggttgtgccggattcagatgcagattgtctcttgagattcaaagatacattagcaaatggttcagaatttcgtagttgggatccattatcatcaccatgtcaaggaaatacagcaaattggtttggtgttctttgtagcaattacgtttggggattacaacttgagggaatgggtttgaccgggaaactaaacctcgacccattggttccaatgaagaatctgcgaaccataagcttcatgaacaataacttcaatggcccaatgcctcaagttaagaggtttacttcgctgaaatctttgtatttgtctaataaccggttttcgggggagatacccgcagatgcatttctaggtatgccacttttgaagaaaattttgctggctaataacgcattccgaggaacaattccttcttctctagcctctttgccaatgcttttagagttgaggctaaatggtaatcaatttcaagggcaaataccatcttttcaacagaaggatcttaaattagctagctttgaaaacaatgatctcgatggaccgatacctaaaagtcttcgaaacatggatccaggctcttttgcaggtaacaataaaaatgttctacatattaatattgtcatataatgcttttagaatcaaatgtcaacatgacatcctttntaggtgtgcaactagagaattcattattttcatataaattttgcataaacctttcaagagtttgatgcattttttatgacat

SEQ ID NO: 30459 - DNA, 2995 bp, Arabidopsis thaliana landsberg
  unsure (1)..(2995): unsure at all n locations
tttcagagaaaggatcccaagtatcaatgtgaagtaaatcaaagactgaagcacatttattttgattagaattaaaaggcaaatgtttttgtttagctaaaggacaaatgtaacaatgatgacttttatttttcttattagttttaggaattttaagtacatcagaaagcatatcaattctagactgagatggatgtcctagacgagtatgccacaaatttgcattaacaacagaaacagactaacatgatggtgtaatagaagaatcaatgctaccttgaatttcaaaagtgacatgattagtatcagattggagaatgtaaagattcgacacttcactacccttcccaagcatcaattcatgagtaagatcctaaatgaaacaagaagtggaagtgaaattgacaatgaatccttttttttttgttaacatgctgacactaagtaaattgaaacgaaattcaggtataaacaacacatcatgtaataaaatgctttgattaagctgcacagaacctattccaacaatgctcactatgtttccattacgtaagttgacaaaggtattgactagtgctaggaaatctaagaacctatctctattgtttgacacatgatgagtggctcccgaatctataaccaaagaactagtagatataccaatttcagatttggaagaagtaagcatgtgataataggtagagggataaagtgacacaaatgtatcagatatcggtttgatatttggcacagaagtagaagtagaagcttgggaaattgcaagagtaggagtgatgctagaagtgcaaagctgtcaactatagtaagaaataatatcttgaagctgatccatactcaaatctttcccaaggagatctgaagctttacatactgaagtagtaatgcttgaagaatccagagatgtgacatttgtactcggagtggtgatgatgaaaaggacttcttcttccctgtccatccaggtggataaccatgaagtctataacacctttctttaagatgaccaatagctccacaatgagtacaaacatgacgaggtctctgttgaaaattagttgcattaacacttccttcacaaactgaagcaggattagacgcagagacttgaaatgcagagggagatggagatgcaccaacaaaacctttagttgcagagttcacacttcgctggctttgatcttgatctagcatgttgtagatttcactcagacttggtctattcttcttgttgattatctgaccacaaacattagcataagattcattcaatcccataagaaactgtataactctgctagtttcagtatcctctaacaattcttcaaccttcccacaattgcatttgcatctcttctgtgattttgtactggctaacttctgccataaggtcttcatcttagtataaaatgttgataaatccaaagctccttgacgtaatgaccgtatgtcctgttccaattgaaactttctcggcaaattactgatatgaaatctctttatcaaatcaatccaaacttcagctgcatcattgaagtacaatatactatcatagatctcttgattaaccacattaagaagccaatatttgaccatactattgcaacgatttcagattttgtgtataggttctgattcagcaggnnnnnnnnnnnnnnnnnnnnnnaaactccatttgttttttgattccaaagcaatcgtcatcgcaacactccagctattgtaattagatccatcgaggttgtgagaaacaagagataaacatggatgatcaccggggtgtaagaagaaaggactgtgagagctgtcgaaggattcaagtccagannnnnnnnnnnnnnnnnnnnnnnnnnnnnnnnnnnnnnnnnnnnttcttcgatcatctgcaacagctcgagaatgtcatggatttggagattgagctcgttttgaagcgatcggagaagtcggaggtgttgaagcagatcgagctcgcgttctcattcctttcttcgccattgagaatgagaatcgaaccgatgagagaaagagaagaatgcggaagaattcgatcgagagatgaccggagaagagaagatcgcacaccgtacaagtcaccggagaaagtttgttacagagtggctctgataccatattagagaaataatctgaatgaattaaccttctcattaatcataaaatgatacaaaagtgtttatatacataagactaaaccaaagtaaaccactaatataattacagtaaaccggataaaagaaaccggattacataatctaaaaagtacaaaatgttcccaaagacttatccttcctcattcgcaatcgaggatcctccaaattcaagatttgactcataataaaataacttatcgagattaccagataacagtaagctacgtgagtctcataagtcatgaccattcatctttgaaatcatgaactagttcagaaaactaaatccttcacctcttcttttatcggcttaaacatttcaagtgaaaccattccctgacttattgtgtttgaaacatagaacattccgaaattttgtgtgtttctttcttctttttggagttggggccattagtgtttgtagtcacgggcttgggtctgaacaagtggtgcataacttagcccattaattgaatatcaaaaagaccaatatacaagcttgataccnnnnnnnnnnnnnnnnnnnnnnnnnnntcaaaaaagaagcccatatctttgcaagttgcaacgtttcgtggttacgaatcacacacccaaaataacacaacgaccgttgatctgttaaaaccttacgtatagaggatctcaaatagcatccacacacgtattttaatgtaacactgacaaacattgaaaaggccaaaagcctgaaaaccacaaagtaagtcacaggccacataaaagagccatgtgaaacanatacttatataaaaaacaattaaattaaaataatttattaataatca

SEQ ID NO: 30460 - DNA, 3841 bp, Arabidopsis thaliana landsberg
  unsure (1)..(3841): unsure at all n locations
aatcaccgagaaactctaatctctgtttaaggaacaaaatgatagcatgaggttagaaaactgggaataagtcagccaaataatgcaaggttaaaaatgatgaagtcatacctcgtatgaataggattcacgaagagaggagtgtgtgatagcctcttttaaaaggaactttgcagagaattcatgttggatctttctctccaactctgtgagctcatcttctttaggaatgtaacaccttagagaaactctattgatggcttcaacgactaggtttgtgtcaaaatcgacgtcaataccgagccatttcatcatatggagagaagcagtcaatccaccgcttacataataggcaccaatcagggcctcagcgcaatctgatacagattttgaaactgtccatctatgacccatgtcgcaagacttgcctattttgatagtcatgttttctgtgaagaattttgggtccaacggtacttctctagtatcaatcccacacttgcaaggaacaggaaaaagagaaaattgaccaggtgcagtccagcgacgcggttcaaaagcgccatttcttatgtatccctatcaaaccaatccccatgaaaagatatttctttagtgttctgactgatgtaagacattacttgcaaatgttagaagatacctgtagtttgcgactggttgccaagcggtgaagatttgagttggatataatcgattgtctctgccgtgatagttgcccctcatctttgtcaggatacttaaggaatagatgacagctcgcaacatacttcaagactgaatccccgagcagttccaaccgctccattgaaaatgattcggggcatgtaagtgttgtaactgcttcaagaatctgatttattgaaccaagacaagagtttaatgacaatcaagatatctagtttcatctctaaatgacagatagtttcaaaaaccatactgatgtacttgatatactgaagttatctatgctacaatcaatctcttccctaagctggctggccaacattagagactctaggcggtgcatcactgaaggcagcaagtagattgattttagcacagcacgcggtacatcaattctagccaaaagctctggaggcaaatgcgcatggatattcggttttctttttctaacattgccagcttttggttctgtcttcacaaccactgtccatttacattggaaacaacatcttagagctcgcacactacaatatcatgagaacatacacaatgattccatatgttggagaaattctcaagaatcaacttactctcttcattgaagtcgactaaaaggttgtgcgcatggtgactctgcttcaacttcatcaacggctggttcgggtgcgccaaaacaatcccatacctgattaaaagggaataacattaactagaaatttatgataagtagattgaagagaacagccatagctagaatatcacttactttttgttaaaatattctgcataagtagcatagcctgatgaagcatcgacctcaaaggggctcatagcagaagaatcgcttacggcttcaactatagagtatatccgtccagtatgaattgcaatgaccacaagttcttcgagactattattatcagacgaagcgttggcaaaatgaatcagattcgtttcttccattttatcgtctagtacgacttcctcaccagatgaggtattgcactgaatcccatcactaacccgaagatcaagaagagaatttttcttcaagaactcaactattgaggcacaggagttgatagctgaccaatcaattgtcgcactcgaagctagatcatttgtttcaactggcagcagtagaaacataaaggaagggtgccaaagagaacttgtgtcagtttgaagcaaaaattctctctttgttccctgtgacttagatccaacaaacaactttccaaacatgccattaaagaaaaactgctgaaaatattttgctttgaccatctgcatccaaaacacaaagaagaagacattaagttcaaaccatgaaacaagaaactgtataaatcctacggatcagagttatgtacctcctcttgactcaaacgtatctggccacaaggtgagacagaagccttgacaagcttcctgaccaagtaaaggtccatctcaactttaccaacatcctcggcgagggttgactcaagcaaaagagagaaactcgagtatacttcgccagaaatattacaacagaagtcaaacttataagcctgaaaggtggcgccatcgatattttctccccaggttcctgacaatgcgtttgcacaggttgttccgtgcaactccttacgtttttttgaacctgttcagcgaaaaaaaggaatgtatacataagtaaacaaattaagacaagctccatgaccttagacataaacatttgatatgcaactgctgatgtgtgcgtgtatgtgtgtaatacaaccgcggctgatagaggaactaaagactaaaatcagcgacaccacgctaattgacgaattaatagattataaaacatacctgcagccgatgaagatgatttacttttagaagaggcaaccttctctttggcgttggattgtaagagattgttatctaagcgtaacttcttacatggtggtaactgctcatttctgctaggaggatcaatcatagtttgtgtggaagctgcttcctcagatacagttatgttagaatctgggataaccatggattcaatctccttcacaccatggccatttgtcactggaggtggacacgatttcaagtttggagcttctggatcttgaattgggacttctcttcgcataaggtcatgcagatggtctctttgcttccggttccctctacaataattagtattcagaaataagctacaaaaactggaatttggtaaacattttgtgttaataaataatgcttcctacctttcaagaaacatgatagatttagaattactctgtttggcatgtttttnnnnnnnnnnnnnnnnnnnnnnnnnnnnnggcaggtcaaaacaaacgatgcatgagcaatctggaacctgaaatccctcttcaaccacatctgtgataaataaaagattcacctgcatgcattaaaaagctttcagagaagacaaactaaaaacatttctcaatttataaaacatctgactgtgatgaagaacaactaaccttgccatcttgaaaaaaatcaggggtttcaatttgcattttctgtgccgatgcattgatggaggggttgttttcggttaaatacaagacattaaggtaagccaaagaggcttctttcttaacgaatctttcgatcacttccgcagttataattctctcgactaaaataaggcactgtttttgcttgtcacctctgcaagcaaatcgatatcgtaagaacagatggagattttgttgcaattttgaaagttagagaaacaatttaaattacctaaaggaatccaatagatggaagagttcttttagctttggagatacatgcccagaaattactgctgacagatggttttgctgcaaatctaccagactcttatcatctgttaaataacacaaatgataaacagtgaaaatattagtgactagaagaggactcaatgcaatatagagctttgaatacattaccttgcggcaaatacaccccaatggtggataaaatatcctcaagaaattccttgcacaccattgagcattctttataagtttcactttcctttttggtatctgagattttctccaagcagacttcagccgcctatcgcgaaagcaagatgaaaaaaaaaagaaaaataatcagcaca

SEQ ID NO: 30461 - DNA, 1341 bp, Arabidopsis thaliana landsberg
aagctctcgtcttcaatataattaccatcacattttctccacttctataccttttcttcttcctcttcttttcctacactagtgctctcttcttctgcttcttcttcttccccttttctctttggaatttgtatgttcttcttaaacactcggcacaatgcatacgactcctgttttagatcaacattaatattagtcgatatggtttatcaaaaaaaaaaaaattagatcagaaatgaatatagatatatatgttaatagaagtttgtgcatgggaaataatttaccttcaaggaggaggaaggagcgtgcgtgagacgatattcatgcatgacccaattagtacgaaggccatgaggagcccttcctctataataaaccagtgtcttcttcattcccatcttcatcttctttgattctactgtacgatctttccccgtggccttccagtaacccgctcgggtcgcacggttcgtcctagagccatttggatacttcttatcccttgtgctgtaaaagtaccattccatgtcgtttcccggcaaaaatgacttttctgttccgcgtattatccaaataaatagctcataaaacctccaatatcatatgtatgaatgcatcatgaccaatatatgtaatctataacgtcagattgacataaacaagctgaaccatatatagagagagatataaagttttgcgtttttaccaggcaagtcccatggctcgcatggataatgatcaacttatgggatgatctcgagctcaatggcttggccgttgaccttcctatcaagatagcaagccaccacttcttcatcagtgggatgaaacctgaatcctggaggcaaactcatgggcgccattcaaagtgtatgcgttagaaaacgagagagaaagagatgagagagattaattaaagtgattaggatgttcgtacgacatatgaaggtgactatatataattaaaaagatgagactctgaagaagatatgatatgggaatgtgtaaaagtatgccatgggattggcatcttctgagattaatattttgtcttactttgggttgctttttggtcagtgtttgtcatgatactcatcacacatattttctaaaaccaatatatatattttaaataaaaacctaactctggcttttgaagattctgcaagtgtgaaaaccctagtaggaggagagacggaaaaagctttagcaagaaggccccatctcacaaatactcacatatatgaatgtatatgcttataattccggttagaccttaacgtgggtcatgaatcattatagagggatttttataacgttcgctttaaaccaaaaatg

SEQ ID NO: 30462 - DNA, 1443 bp, Arabidopsis thaliana landsberg
gacaatgaccggtttttaacatgcaccaaaaatggaatatacaccacctcttcacatctacaaatgaaagcacaagcgaaggaaatggaacgttgaaaaacaattatttgatctccaagaccattgaccaatcaaattagtagatattaaattctaagataattgataaatgttaacaaacaaacaaaaaacgatgtgtcgtctaacatctcaaaatttcatatttttaaaatttgcataaatctatgtaaaattaaaaggctcaaaaggatggttattatgtgattttaaaatattagtgataaattttggcgtagaactaaatttttccatgaggatgaaaacaatggaatctcaattctagcctaaaaatgatattagttctaaaatatacatttgattataaacatcgtagaggtacaaaattgtattataatactttagacatatgtcaaatcatatttttaagtttctttaaattgttataatatatagtggaagctgatatgagagtatatgacaatagcctatacaaactttaacacaccacagttaattaatggacatgagaatcttgaatcatcttcagtaattccagaaaggttcaagatcaaccggtccagtagaggaagacggatcttcttgagaatcaaaccgtctcttaccaaattcaaaatccgatgagatatcagtgttcatgtcagttgaaactccggtttcttgtgagacactcatcgttttgagactttgtcttctgttgttctcgatcatagcatgtagaactgagtgttcttgcgtgagaaccgggctctgtagattcatagaaacctggagggactgagtttgatagagtggaatcctgtgaaaaatgtcggcttggatcgagttaagaacagggctgctgaagcaattgagtgtggttccttggttttgatccgtttggttggagaagcagggcacgtagaccggttctgttttggttttatcgttgtaaggcgaagaatcggttaaagagggcaaaagcgaagggttaaagtcggttccgagtgaaccgattcggattagactcgaaatcgggatcttcttccctccagcactcttttggaacaccctgcatatcacccattcattctgcaaaccccaaaacaaaaacaaaattagtaaacaaaaggaaaacagagcataaacagagtaagtgtttggttttcgggttaacctttgcggttttcggcaagttatgggcagagaattttccttcaagcctgtactcatgcatcacccagttggttttctgacctttaggagctcttcctctatagaaaacaagtgtcttcttcatcccaacaagtgatttgcctcggtatatctctttatccttcccggtcgccttccaataaccggcttcagttgctcggttagttcttaaaccggtgggatgctttc

SEQ ID NO: 30463 - DNA, 979 bp, Arabidopsis thaliana landsberg
gatttacttcccaggtattgttacgttagagctcctactggttttaagtaatggtaatttgaagttgttcatttatgttttcttttgtttacagatattgatactatggataataccagcacatttgggtgcatccggggcaaactatgcgaaaaaccttctacgagctgcagttcttttccaatacattccaaagttatatagacttctaccgtttcttgctggacaaacacctaccggattcatatttgagtcagcttgggctaattttgttattaatcttctcactttcatgcttgctggacatgttgttggttcttgctggtatctatttggtctgcaggtatgccaaactctcaaaatgtctttcatttttatcttgtcctgatcagcagaagatgcataaagtgatttatattgtttcccgttttctgttggttctttcagagagttaatcagtgccttcgaaatgcttgcggtaattttgggcgtgaatgtcaagatcttatagattgtggtaatggaaatagcagtgtattagtacgagctacctggaaagataatgcgagtgccaatgcttgtttccaagaagatggttttccttatggaatctatttaaaagcagtcaatcttaccaatcattctagtctcttcacaagatacagttactctctcttctggggcttccaggtaactgtttttttttttctctctttcagttttttagtaggaaactaagaacaactactcaactactttgcattgattggcatatttggaactcttcattaagatcattaattttataattctcatagcaaatcagcactcttgctggcaaccaagtcccaagctactttctaggggaggtcttctttactatgggtatcattggactagggcttttactttttgcgcttcttattggtaatatgcaaaatttccttcaagctcttgtaaaaggtaaacaattcgatca

SEQ ID NO: 30464 - DNA, 825 bp, Arabidopsis thaliana landsberg
  unsure (1)..(825): unsure at all n locations
ccttactctaaaaaatggggacgtcagccccgttctcatgaaatcattaagcgaaatttcatatcgatgtacagatagattatgggataaaatttctttatgttattgttcatcttagtgggcagagttatggcgaacatatctagtagaagaaagggggtacaaaagagggatgcaaaccaagcttggaagaatacacgcaaaatgcttggatttcaattgctgacccaacaatgttaattcactttgactgtgctttctctgaccatgtctcaatccaaatcttgaagtttatcacaacaccgtcaacaaatcctccgtctagttaatgacctcggaacttcgctaataaataacgaatcttcttacttctagtagtgttgagttataaaatcaatttaaataatcaacctactaacttctagttgtgagtgtttgattaggatgaattggcaagagacgttctaaaatccaatgttacatgcatgagaccggactactggagcatcacaggaaaaggcacgtaagtacgtgcagtagatgattagcaacccaagggactaggtgaactacgatacaaaaacggcatgcaactttctannnnnnnnnnnnnnnnnnnnnngaacctggcacgcatgttgcaatgaatgtatcaacatggcgatggtcatggctgtcccgacaaagccaagaccgttgatcatgtccaatccttcctcgttgatccaataccattatattgatttcacacttttatagtaacaacaccagtttataatataatgtgatatgttggatttcccaaacaagttcggaccaaaaaag

SEQ ID NO: 30465 - DNA, 2137 bp, Arabidopsis thaliana landsberg
tatccgacgcatcgtggctatagttgctgcacttattacagttattgatgacatctactatatttatggtactcctgaagaacttgagctcttcactgctatggttcaaaagtaaggactctactgcttatatttattctgaattttctttgtatataattacaattacataacattatatttaaaataatatagtatacgatgtaaattaagtgtgtttaatatatcccatattcacgttttaaaatatatttttaagtcatagtcgtttaaaagtatatataattaatcatatatccacacaagttcacataaatatttttttcaattccatctttctattagtttttttttgtaaataaaaattatagaaaaaaatgatatgttgatgatagattattaggattttaatcagctatttttcatgatatttttagttttaaataataatgttatctaaaatatttatttgcagttgggatataaatcgtcttgatgagctccccgaatacatgaagttgtgttttcttacattgtttaatgaaatcaatgccatgggatgtgatgttctcaaatgtaaaaatattgacgtcattccttatttcaaaaaatcggtaagttcaaatttgtatttacacattatagtctgtttttgataaaaataaataattattgtattatatatgtttttgttcaaactatagtgggcagatttatgtaaagcatatctagttgaagcaaaatggtacaaaggaggatacaaaccaagcgtggaagaatacatgcaaaatgcttggatttcaatttctgctccaacaatgttaatccatttttactgtgctttctctgaccaaatctcggttcaaattttggagtctttggtccaacaacaacaagacgtcgtccgatgctctgccactgtgctccgtctagctaatgaccttgcaacttcgccggtaagtgttctctcttgtaacttcgccacttttatgtgttttaaatcgtgtatgagtatttataacaaggataatcttgtaagtaactcacaaatgaaaccaaagtttaaaaatcaactgcataaactaggtgaacgaaagtctctatatcatggcaaaaaaaggctaagcaattcatgtatgacttgacaatgtaggatgaattggcgagaggagacgttctcaaatcggtccaatgttacatgcatgagaccggagtttcggaggaagaggcacgcacgcatgtgcagcagatgataagtcacacgtgggatgagatgaactatgaagcaagaacggttgcacgcagttcttcgttactttctcgaggttttgttgaaactgcaatgaacctggcacgcatgttgcaatgaatgtatcaacatggcgatggtcatggctgtcccgacaaagccaagaccgttgatcatgtccaatccttcctcgttgatccaataccattatattgatttcacacttttatagtaacaacaccagtttattatattttgtgatatgttggatttcccaaacaagttcggaccaaaaaagatcaattcaaaaacaactatcgatgtccaaacgtaagcaaccatggacttgcatacgtacaatcttatagcctaagactcacaatgtaaatctatacatttttacatctattacgggttcatttaggttttacctaattttaactctcaatctactgccactacagtgaatcaactactggcagtaactaaagctttaatcaagtcggctcatagcaacaaacacaactacaaacaaacaaacaaacctgcaacgagacatgtctcatttgagcctacaatgagatatatctatcaatagacagtaaatccacacacacaagaactaatcagaagatatatgagctactcatctcaaaagttacacttacatcacaaaagttcgttttcttcctctataaatcatttatcctacaagatatacttgcaaagtgaatatctgtgcaagacaattatgttccaaaagggaaaaaatcaagagtgaatatatgtgcaacgcaaatcctttctaaccttgactcccaaaagaaaactttagtgttaatgaaaacctaaaggcaagttatctgaacgacttttgaacaaaaaaag

SEQ ID NO: 30466 - DNA, 1690 bp, Arabidopsis thaliana landsberg
caacggttctgattcttttcttttttccctggttacaggtgctcctaatgactattcaaaacgcacctcctttccttgattatgaccgtgataagaaattttctaaggtactcgtgttctttctaggtgtatttcttatgctgttctagttttgctagattttctgttttttcatttgcaataaatttttactaaactaactagaggactttcagttgtgcccagtcctttaaagaaatggttgcaatgtgtttggtgaaagatcaaacaaaaaggccaactgctgaaaaactgctgaagcactcctgtttcaaacacacgaagcctccagagcaaactgtgaaaattttattttccgatttaccacctctttggacacgtgtaaaatctcttcaggttagccatgctctttgtgtttcagcttttttgtggaagtgatgatgttcttaccttttgtatcgggttgttatatgacaggataaggatgctcaacagcttgcattaaagagaatggccactgctgacgaggaagctatatcacaggtgacacaccccttatattgacaacattacctaaatacttaatgagtcgaattgcagagtgggcataaaacaatatttttaatgtcagagcgaataccaaagaggagtgagcgcttggaactttgacgtcagagacttgaaaacacaagcatctttggtaatttacttctcgcaagctatctgtgattgcactatccttaaatttctgttcattggtttcatcacataatccctgtttttatattgtttgtttgtgtactagttaattgatgatgatgatctagaagagagtaaggaagatgaagaaatattatgtgcacagtttaataaggcgagtactatgtagataaagttcagaaaaatgcatctataaaatttcacttccttggtatgcaagtttggttgtctgaacatatcttagaaaatccctgcaggtgaatgacagagagcaagtatttgatagtctgcaactatatgaaaacatgaccggaaaagaaaggttccaatactgaggtggaagacctacctgcaaagagaaattcactttcgttacaactacttcttctttagaacgaatgtcaccaaattcagagcatgacattcccgaggccaaggttaagccattaagacgccaaagtcagagtggaccacttacaagcaggactgtattaagccactcggcttcagagaaaagtcatatctttgaaaggtttgacatttgctaattgctgtttgagactacactttaaatctgcttgtcctatatatagtacctttcaaacaatccaacttgttaattttctatctgctagatccgagagtgaaccgcagacggcaccaacagtccgaagagcacccagctttagtggtcctttgaatctttcaacccgtgcttcttcaaacagtttgtctgctcccatcaaatactcaggaggtgagcaagtgatataggcagtcttcgtccagcttagtggttttattgcttctcttgcagttgagttaaaggttgttttgtccatttcgaataggattccgtgattctctggatgataagtcaaaggctaatctggttcagaaaggacgattttcagtaacatcaggaaatgtagatcttgcgaaggttggtatttaaattactgctattaat

SEQ ID NO: 30467 - DNA, 2538 bp, Arabidopsis thaliana landsberg
gtttaattgcctagacctacattttctattagaactgacacaattacaaaattggcgtcgcttataaggtctacaatatagggttggcctctggcccaatagtaagcccatatattaaccgacgtcggtttatagccccgataaacacaaacaatatagataagatagtttcttctacttcaaaaaatggatgctttcagaaatttccagaaattacgggtccaattgagaaaaacgcgtatcgtcgtcttcttcatcaaaagcgaacaatttcgaaaacaaacctaacgaacaaaaatcaaatcttctctctgttaaaatctcaccgactagagaaaagctttgtttttttcaattaaagttacattttttgattgaacaaatcactttctgtgatctacatttgtgtggtcgtgaaatcaatgacggaaccagaaagattaggaggaatctccctgagttttccggtgaatgaagaagatacggtaacgacaacatcaccaaatactctttcacagaggctccgtcgtcgtcttctcgaaccgaagagtcctgtctccgccgcagagatcgattccaaactcagagaagctgatctccgtcgtcaggtaaaatcttaaagtttgaaactttgggttaaaacagaaccgaatttgaaaaaaagatgaatttttgcagcaatattatgaatcactatcgagtaaggcacgacctaagatgagaagtccgagatcaggaagtatagaggagcttagtcagagacttgaatcaaagcttaatgctgctgaacaaaagaggtaagaagaaaagaaagagattagttttgtgtaataaggaggaatttgtgaagaggatttaatcaaagttgttgataggttaagtattttggagaaggagctggctcgtttggctaagatggatgaagctagacaagctgcgaagaatggacttgagcaacgagttgagaaagagcgtgatgagttagagagtaaggttgaagaaagggttttgaaggctgagaagaataggatgcttttgtttaaagctatggctcaacgaagagcggcgaagaggcagcgtgctgcgcagagtttgatgaagaaagctattcaggagacgaggtataaggagagtgtgcgtgctgcgatttatcagaagagagcagctgcagagagtaagcggatggggattttggaagcggaaaggagaagagcgaatgcgagattgactcgggtgtttggtgctgctagttctgtgcggagtcaaaaggaagctgagagaaggaaaatgaaggaccgtttagaagagcggcttcaaagggtatgccaaaacattcaagcctttttccttaaagaccatattgaaattggctataagtatgattattgtcgtggcatttttgttaggcaaagaagctgaaagcgcaatatatgaggcgaaggagaggtatggatagttgttcatcttcaagatcagaaacaatgcgaaagaaccaagtgcatcttgttaggatgttagtaaggtaggtgtattgccctagaacattttgtatgatgtttaactgtcttacgtcgatggtctgattgtctttttaaatctcagatgctggaggagatttgctaaatacaagaaatctacttttgtcttggctagagcatatcacgagttggggatcaatgaaaaatccattgagtcagtaccatttgagcagtttgccattcaaatgaactcagtttctgtaattcaaacggtcaaagcattgcttgatcgcttggagatccgactcactctatctaaggcatccaatgtggagaacattaatcatcttcttaagcacatctttccgcctgttcgaagagggaaatcacccagtcccatgagtaaaggcgagcaaaattcacccaattccaagatgggatatcaaaaacttaaaaagattgcgagatatccagctagaatttttctttgtgcctacatgatcaagcaacatcccggtgcaatttttagaggaagaggtgaacatgagattgcgcttgtggaatctgcaacttgtcttattcgggagtttgaactgctggtgaaagttatattggaaggaccagaatctaccctcccgggcaatgtatctttcgtagctcaacgtccaaaaagattcagatctcagctagaagcatttgataaagcttggtgctcttaccttgagggttttgtagtctggaaaattaatgatgctaagcttctagaaaaagatttagccagaactcaagagtctgagctgtctgaggtatcaaaacatacttcctctcccaaaataatagacagtggcttgaatcagaagacggtatacccaatttcctctctttttcgtttatctttattgattctgtgtacacgagcctaaagttagcttattatgctgcacaaatatcttaatagcagaccatggaatatcaggggcttgatagggagaatgacttatctttattttcaggtaaaggcatcttcttcaactaatcgggctttattctctgaaactga

SEQ ID NO: 30468 - DNA, 1295 bp, Arabidopsis thaliana landsberg
ttcaagattctcaaaacctttaggctgctcaacaaacacttcctcctctatgattccattcagaaaggcacacttgacgtccatttgatgcagtttgaaacccattccacaagctgttccaagaagaaatcttatgcattcaagtcttgcaactggagcaaaagtttcatcaaaatcaagtccttcaacttgtgtatatccttgagcaacgagtctagctttgtttctggtgatatttccgacttcatcaaatttgtttttgaaaatccatttagtaccaatgacattcacctgtggtggtcgtggcactagatcccagacttggtgtctcgagaattcttctaattcctcttccatagccaaaatccagaaatgatcctctaatgcctccttgacatttttcggttccacaatggatacaaaacaagagaacattatttcttcaaaacacgcaaatgaggccataactctgtgtttttgtttaattccagccagctgtctatagtcctgcttgactcctcttgttactctttcgccactaggatctcctattatatcctttgaagcatgatctctatggacttgagccggaggtacttcctcatccgattcttctccagacttgttgatatcaccattttcaaattgattatcatttctttcttctccatgattatttgagatagacgtttgtggctcatttccgtttctgacaataatttgcagttcaggcatacttccatcatcaaacacgacattcattgattcttcaatctttcccctctgcttattccaaacacgataagccaaactgtttgtagcgtatccaagaaagaacccttcttcactgcgagaatcaaatttccccagctggtctttgtcgttcatgatgtaacagacacatccaaatactctgaaatagctcagatttggcttcttacccttccaaatttcgtatggtgtcttgtcagatcccaaccttacgtagactcgatttatcacgtaacatgctgtactaatagcctcagcccaaaatttctcaggaactccatttccatgaatcatggctctggccatttcttgaagtgtccggttctttctctcaacaacttcgtttgactgtggagttctaggtgctgagtattgatgaaagattccttgagactcacaaaaactgttgaatgcttcgttcataaactctcctcctcgatcacttctgattagacttaataaaccatcttcttactcatttttcagttgaagagccagaattttaagctgttacagtttctatt

SEQ ID NO: 30469 - DNA, 1820 bp, Arabidopsis thaliana landsberg
  unsure (1)..(1820): unsure at all n locations
acttcagtatttggggtttttcctttccattcatgttctcagatagcaattgactaccagatacttgccctctgtcattcacctgcaatgtgtttcccaataagttcaaacaaccagataccaagagagtgaagagatataagatgatttcgctgaatatttctttgcgaattactagccttattatgcaactgttcgccaaaagattcttcttcttccctactctctgttagaatgtcatcatcatctagctattgcacacaaaaaaagaaactataagaatatttgacgaaaaccaatggtttcttaaatggcatcatttaagagatactatcaaagcatagcttaccaaagatgcttgttctttcaaatcttcgatattgaagttccaagcacttactcctctttggtattcactctgacatgaaaaacaactttttatataagcattctgcaatttgagtcttaagtaatatactcaaacttgtgcgttcgtcacctgtgatatagcatcctggtcagcagaggccattcctttcaaagcaagctgtgcagcatccttggcctgttatacaacgactctatcaattagagtagaacaggacaagtactgcaagctcgacgaagatataagcatggcaaacctgaagagcttttacgcgagtccaaagaggtggtaaatcgacaaataatttttttacacagatctctggaggcttcgcattcttgaaaaatgagtgtttcaacaatttttcagcagttggcctttttgtttgatctttcaccagacacaatgctaccaattctttaaaggactgagcgcagctggacatcttctagttagaacaatcctcgaaatggaaagtattcaaataaaataagaatatacctaggaagaacacgcgtacctttgaaaacttcttatcacggtcataatcaaggccaggtggtgcattttggatagtcattaagagtacctgttaccaggaaaaaaggaataagatctgttcttaatacatataaggaaaataatgaataccttcatagggggatattttgagaaaggtgcatgaccgtgagccaactccagcgccgttattccaaaagaccatatatcagccctgtaaggaaggtacagaagaacaaaccaaccaataactgttattgcatttctttgatgcaaacagtttctaaagatttttcatttcatttgacaaaaaaatactcaaatgatagtaacttttaaacagctgcggggctgaaacaatcacacactatctagatcaactaaaatcaacggctttcgattttgagaagttggatgacatataccaaattgaacaaaccgctatatttaacaaggaccatgcagagaaattgagtatattagttggcacttgatattaaagcataaactcactttgaattgtatccactccctggctgcaagacttccggtgccatcctacaaaaagaaacaagatatgacatgtcaaccatcgagtagagagaaactgtgaagcttaagaagaccgaaacgagaaaactacagtaaccaaccagcatggagtaccaacaaatgtatttcttgcacgttgcctatcgccattgtcaaacaaacatgcagagacaccaaaatcacctaacttaatnnnnnnnnnnnnnnnnnnnnntatgtttccagcctaatatataagacacacaaaaaagttttgaatatagtcatggatcatggatgatctatcaaagtacagtgtgaagctgaccttaacatctcgatggatatgcccttgtctatgaagataatcaagagctttaag

SEQ ID NO: 30470 - DNA, 2226 bp, Arabidopsis thaliana landsberg
atttatctcaaacaaatctccaaagataaacttaaccaggagatcgcatctattcatggcgtaacgcttatatctactctcatcacggttcagtctctatctctcaataacgtgactttttttttgtttcggattgcatcaaagataatcaaatatttgatgctcatcctcaggaatatatataggcgatgagaaagtcattcatttcacttgtggaggtggtctagaaactggaactgggaccttcttggacaagatcgtcgttagtgtcatccctaatcataaaggagacaatccttgttctaattgtgaagagcaattgaatctcgaaggtgtaatctcttcttgccttgactgctttctcgccggaggaaacatctatcttttcgagtacagtgtctctccagctgcatttatcgccaaacctcgacgcggcacatgcactatagcaccttcggatccctgcgatgaagtcatttcccgcgccaaatacctcttattgcggaatgggtttggtgattaccatgctttggaaaacaattgtgaagattttgcaatatattgtaaaacaagcttgctggtcggaaaagactatgtgttgggaaggggcggtcaagccagctcagtgagtgcagctgcgtggcttgcgcaacttagtcctttcggcagcaaagctattcagctatttgcagatattggtatgagaaaggatgctattaaggtgcccgtcgagagcctcgttcctcgcgcatatgctactggtacctctagaaatagaaggtgatgaggtttgaagacacgccaacgggcgggtaggcgaattcttcgaagaatctataatgtaggaaacatgatccaatattgtagaaaaattcactactattctacataagccaaaaaaacaaagaatgagattcctcagacatagagttagaatgatttttttactttccatcaaggcaaatattctacaaagataacattttacattgaggagattaagatcttattgtcgagatgcagctagctactgagaataataaggcgggtggtattgaggcggcaacacatatccagtttgctgagcatagtaaagagattgaggagttgcacctgaaccaaagagcccagttaatgggttcacaacaacaccagaaaatgctgaggtcataagaccataagggttcaactgtaagccatgatgactatgctcaggcataagaagagcttctggtctagaaagtagctgctgactcggaactggaacttgtgacccattgcagtctctagtccgctttttccccttttgctgtggctcttgcttgggaggattagtcgtgttgcgtttcctcaatgccttatttttctccagctcttctacacgttcctcaactttctcctgagtaaactctgattcaaggttctgatctttgatgattttgatcaatggtttcaaggcactgacttctttatcagaggcttcgttctgcgacttgagagagtagttatcttccacgcaaactctaagagcagcttctctacagtccttaatgtaagatttcaaaacagggattggctcaaattcatcagtcatcccacactaatacatgaatttgactgctaaaattggtttaccagaatccaagagagtcttgatgagtttcccaactcttttcctatctacaccaatcttgttacaaaccaaagttgcttgcttatacttagcgatcatgaaaacgtaatcagaaagctcctctgtgtcaaattctgatcctaattcaaaagctgcgaccaaatgcagaaacactaacgcctcgaaaggcttgacaccaaccttagatttccaatggtaagccagtttcttagctctatttctcgtatcaacagtgatattcgcattgatctcaatcaaaacttccattaacaaaacgaaaactctccttacatcgaatgatcttcccgatgatgacggtgtgtagttcgaaccttcaatcgcgtcaagcaccatggacgccggatccggagagtaacgaatcgctgcagaaacttcctgattgagaggagtttcatcatcccatatcctaatcaaatacttaatcaaaccaattccgtcaatcttctcacacaaggctctcaactccggctcaacaacgggttgctccgatacctcctccgaagacgacgatttccctgcttcataagcgttgcttttattcgttttatgtc

SEQ ID NO: 30471 - DNA, 1397 bp, Arabidopsis thaliana landsberg
ctttatggataggctatggattattctatgcggtccagtaacagcagtttacaatcagaaagttggagcttcacacatatctcgatccaaatccatacatacaaagtgattagataaaggacagattcctgccaatatgcgcttgccatcattagattatggttttgtcaagcggatgcaacattagatccgtggaaacatatacaccattagatccaattttgttcggatcacaataatctaattttgtcaaccggatattgccaaccttcttcattttgtatagttgatgcagtatttataatctagattcctcctaatagagctacatcagttccaattagctagcctagtggccaatgatctcaattattggcacaggtagattctcattacattataaatcaaacgcatttataaaacacaaactaaaatattcactaggaaaacagaacaagaatgcagtaaactaggatcatttttcttttgtgtctttcattcctaagacaatataattaattaaatcaaggatcccaaaacacaaaaatgccagaaaaaaataaaaccatattaattagctacaaagaattaaaaccaccgcctttcatcatttgtctaaactctttgtagttaaccctaccatcaccatcaacatccactttctttatcatcttcttacaatcgtccaaggtcttaccttgtttgagccccaaggaagacaaaaccgccttcaattcatccaccgttataaacccatctccattctgatcaaacacattgaaagcttctttcatgtcctcttcttcttcgtcttcctcgtccattatcgtcttgtatagctcaccaaactcgtctatgtccacgcacccatcaccattcacgtcgatcttctcgatcatttgagtcaactccttgtccgggatgtaaatccctaggcttcgtagtgtctcgctcagctctttccccgtgatcgtcccgtccccgttcttgtcgaacatttggaacacgcgttttagctctgtcggatccatctcttttaaagttgtagtgttgcgtgtggaggaaagaaagataatggtgagggctccacgaggccgagaaaatcttttaccctttcctggcttcttggataagggcaggaattcaaaaatctaggtggaagttacaagagatgagacaaagagatattcactagccacaaataggacgaatgaaggagataaaaagatatgcctctggttgatattgttaatcggtagagatggacatgttggcggttttaaaaggatgcaactctatgagtgtatggaattaattattgtcttaaaatgtgttatatatatagtgggaatttaattaatactttgttttcaccaaacaaaaaagtaagaattaag

SEQ ID NO: 30472 - DNA, 3187 bp, Arabidopsis thaliana landsberg
accagaccaacctgccagcttctgctgtttctgtatttttaatttaattttctctatttctaaaaataaagttaatgaaagaaaacgaatcattgtaatggttaattttaattatatggatgggactgtagttaggtctgatataaagacacgttaattcatgtcgtacaatacgaatcaaagtctctaattgccacacacacgtttttgtatggatcccaaccgtcaaagcatttgttagtttgatgtattccacgagacccatagagttatccgaaaagtagttcgttatacacattctctcagttcttttagatgttttgaggtttttctaataataataatattataaaattacggaagatgataatgtaagaaattgtagctgataaaacctgcaaaatcacgagaacaatgtaccattattatctgatgtaatcaacttgctgagtaagtaagatgaagcatttaatggaagaccgtgacatacattttgatgtaaaagtaatcacataaagactgctactactctgaataaagtgtgtacatggatgttataaaaagcaaaaaagaaagtgtgtacattaagacatttggatgtataatgcggacatgcagataagcagcatatacaaacagaagagagtcacgagtacctagattcttgcataaacactacgtagttcgaggtgagacaaaattgttgactccaccagtaatggatacatcgccttgtagggtatcgtatcgttttctataaatttaaccggactcaacacgcaccgtaccgtactcgagagaaccggacgttaatcgattagtcggtttaataatattttcttacagagatccttgaatattgaaaagaactcgactttgaatatatatatctacaaggtgaggaaacagattaaagtattagtgtaagatgtattaggcaggaattggtatgatgtgtcgttgggaaaaaaagatggattatatgatgtttatagaggatttgattaatagtagtactaagtaataattaattacaaggttatagtaaaggtcacatgtcgcgaattaatatctacttgttgcgactcagctgtcctaactgtcataattgaatcaatgaataattacatctcaagttcattaaatggagaaaaatagaaaacttgctaatttcatatgtttactctgaaaacgtagatgttgtcatatttttgcaatatagtttccagttaaatcaaaattaatgtcgattaaaaaaaaaaggttacaaagattttcatgattagtttgtacttaaacattaagccttctaatggctatgttgttttgaagtataaaatgtcattaatctttggaaatcggacggatgaggatggtttggaggagtgtcaagtttgctttagctttgtcttttgcagagaaagagatgaggttcgatttcaaagtaataaaaacgatattagagatctgggaaatggcacgttatgacacgtgggccataatcccaaaagctgtgcttagatccaaatcaagtcttatgcgtgttcgcacttgtatcatcggttacattgctatcttctttatagtcattaataccaaaataaattagtgtagaggagatgtagtactcagataagttaatatcatgaaaatttgttacacgcgtgaatcataatttttatatttttagtggttcgctatttccatggtttttcctattgatatgatgattttcaatgggaacagttaaccccgagccaagcaagaccaagctattttttgcttaaactaaaccgaaaaggcgaaatcatattacgtattagtctcaatataacattttatttggaccctaataaaacctacgcattgaactaaccatccctatattaattaacgtgtagaacagttttggagagcctttaataactatttttgttttgaacagttcactttagattggctaaattaggttgtaaccacttctgttggtattagcttaaacattaaaccaaaagtaaactatattttgttttgactttagagtggacagtttttattagactgattcatatcgaaattcataatacttggttattaaatcatacctacaaagtacgcatttacgtaatgcattcgtgagtcatgggccacttaattagtcatttccaactccttggtacaaggtcgattatttcgtaacgtatagaacaaagtgtatggaaaccaacgtaatatgtaaacttggacgagagagaggacaaacaaacaaatactactaatcttctactagctaatacacaattaaaaaaggctatattcaattaatcataatggttttcgaacggcaaaccaacaccatgatggttttcttctgaatcacatggcatgatgattctatcactgtaccatctttatattcttataccaatcacagtaacaattagatagaaaaacaccgatgaaaataagtatctcgagacgatatagtaagcagaatctcgagacaacaataatacgaaaattctaccgtatactgtgtagagtacactcatgtgaacagaacacaagtctaagtactaaattaacgactaattaataaaaagagaaggaaaaaaacaaaagaatagtcatcactgtcaaaaagaagaagagtggacacaacagagtctctctaatgattccttcgtacgcatcctcatcttcttcttcttctctcttctactgtatttaaacactctctcgtcttctccttcgatccagagagagacacaacacaccatctcaatcatgtcttcttcgtttctctcctccactgctttcttcctcctcctttgtctaggattctgccacgtgtcctcttcctcctccgaccaaggaacttacatcgttcacatggctaaatctcagatgccgtcgtctttcgacctccactctaactggtacgattcatctctcagatctatctccgactcagccgaattgctctacacttacgagaacgcgattcatggattctcaacacggctaactcaagaagaagccgactcgctcatgactcaacctggtgttatctccgttttaccggagcaccgttacgagctacacaccactcgtactcctctcttcctcggtctcgacgaacacaccgcagatctgttccctgaagccggctcttacagcgacgtcg

SEQ ID NO: 30473 - DNA, 2837 bp, Arabidopsis thaliana landsberg
  unsure (1)..(2837): unsure at all n locations
tggtggtggtggtggtggtcatggttttggctcgctaagccccatgtttacacggccgttcaatttcggttttggtgtagagggaggaggaaacaaggcggttgcagatgagcggtggaggaaacaacagattctggaattggaagtgtattcaaggagattagagttggttcaagagcagattagaacgacattgaacgagttaaagacgatgccgagtggtatatgatgaagggcgagaagaataagacaacaaggaaccatttaggttgatatttgatatctttgagttaaccttctggtgtgtgagtgagtatagtaagagatttggatctttttaagttataaattggtaaggtattgtgatctttctctaggttttttcatcattttgatttttttttcttcttcttatctttaaattatttgtcaatagggatgaatcataggaggggggtttgtgtataaccttttgtattagattatagttcttttttcgtagaatcatttgttcaataacaaacagactttctagctgtttttctttcaaaaagaagaaaaataataattctaaattgtgtgctactctttctttgtctaataaaatctgtaataacatgtttatttctagatcggatactgttattgaagtgtattaaactttgacctctttctttatcatgttgattaatgtagttacttaaaaacttttgtgtttgaaaaaaagaaccaatgttgtgtttcttgctagtacgcatcagaagattcctttcctgattaagtaaaaaaaaaaaggcataatcaaaacaatttaaagattcaagaaggcagaaacttgtccacgtgacgaggcaaagaatgttaggtaggtttgttattgactttatagtttatacaatgattttaacaaaatacctatggaagatacatgattattttttataaatgtataaacgagtggatatatttggtggtggatgatggtgtgtgtgtatatgcaaataattcactttataaaagcttatcgctaatttgacagaacactagaacagttctctctttttgtcgacagtcttcttcttcttcttcnnnnnnnnnnnnnnnnnnnnnnnnnnnnnnnnnnnnnnagtctctggttttgtatctttcgaactgttcttttgtttctctctccaaaaatttcaaactttcataatttcgcctcctcaagttcgatttcagctcaagaacacgaatgcttcactcacttgtttcattgttaaatcttatatttagtttgatactcatgttttctgctgttcgatttttttttttctctgatttatattcgagtttgaacttaaatcatggttttggtttcactttacaattttggatctcatgcagtttcaaaacactcttcgatttatatgaatgttttatattattagggacattgcttgcagactgtgtcttaaatctttttgattttcttgtgatcttcagaactcaaattgggaagaattttgacatggaggaggaccggtgttcgatcaaggatgatgcaactcaagtaatcataatctttcagttgtcttttttaatcaactgcttcactggaataaagttctagttcctttgctcaagtaaaatgtacttagttccttgcatactgtgtcagttgataggtaacaccccaatggtatatctgaacaacattgtggatggttgtgtagctcgtattgcagctaagcttgaaatgatggagccttgctctagtgtcaaggagcggtatatatacaaataaccctctctctatctcttttgtctgctccaagcaatgtttgttcttttgtgtgtgtttctgagaaatatcttgtttcttttgattgatccttcgcttgctagaattgcttatggtatgattaaagatgcagaagacaagggattgattactcctgggaaggtagatcagattatatcatacattcgtgttttttcgttttcgccattaaaaatcaaactgatacttggatcctggtggttttactcagagcacactgattgaggctacctctggtaacaccgggattggtttagccttcatcggtgcagctaaaggttacaaagtggtcctcacaatgccctcatcaatgagccttgagagaaaaatcattcttttagcattaggtgcggaggttcacctcacagatcctagtaaaggcgttcaaggaataatcgacaaagctgaagagatatgtagcaaaactccagatagtatcatgctagaacagttcaaaaatccttcaaacccgcaagtatggactctcctttcacattacatttgctcttcttctctctctatctatatttatcaatctaaattgattattctgcagactcattatcgaaccacgggtccagagatatggagagactctgcaggggaagtagacatattggttgccggtgttggaactggtggaacgctttccggatcaggaagattcctcaaggagaagaataaagactttaaggtagagaaacttttattgaagtccaaccatagtagttatagatttggcttttcaagcacttctcttatcaacaggtttatggtgtggaacctacagaaagtgcggtaataagtggaggcaaaccgggtgagttcaaatcttgttcttgagtctaacataagtaaacatcattcgaggagtttcttgctgctaaatcactttcttgatcacataacggatactggtttcctgtttgtaggtacacatttgatccaaggtataggggctggactcatcccagacaatttggatttcaacgttcttatgaagtcatccaagtaa

SEQ ID NO: 30474 - DNA, 1004 bp, Arabidopsis thaliana landsberg
  unsure (1)..(1004): unsure at all n locations
aatgagcagtctgtgtctcgccagcttcatacggcgtcgtttatcagagaaaacacaccaacaaagaagtataaatttaaccaaatttttattgtaacatatttcaaaagaggacatgagtctttttctgattttctgtaccgaattcaaagtttagagctttttttatctaatgtagtgcaatgtcgatcaaaacaagttgaaacattgacaaaagctagtctctttttattctctcttattagatttttacatacatgatgaatagagagacagaacaagcgatatcagagagggatgcgataagtgggatcaaacatcttcaatataaacaacaagttgcctttgccccttgatatcctgtaaaaaatgaacattgtttcaagattcaaacgtttttggttgtcagttccatagagaaatgaaaaactatcattcactactgaccgtagttcctcgtccacatnnnnnnnnnnnnnnnnnnnnnnnnnnnnnnnnnnnnnnnnnnntaccggaatctgcacagcaaacactaatgatcagtaaaagaggcatatggtgtatgtatgagtcagtactaccagtttcccttatagcagcaagagttttggtaatacttacaaagccgagaattttaaacacttggagttttacagtaactgtctttgaattgagaggtgtcaagtctccagttacctaggaaaacattgtagtttgctaagtctcattttacaaactctgctgaaagaatattgatgataaaaactttggtattagtcctcctttgttcttgcctagtgagtcacaatggaacatgatcatacatatctgtgacaatggatcagatcaataggtttccgcatcacagagaaaagggcttcgtatatggtttaacacaaagcaaacctacttgtgaatacggacctttgccctattaccgagttatagaaaggccaaaactccaaactttgcacctttagtgtatccatattgatacattggtg

SEQ ID NO: 30475 - DNA, 1385 bp, Arabidopsis thaliana landsberg
tcaaagtctagaattctttaatgccatggatgtgtctctctaaatcaattcgtttggacttcaagaagcttccagtgcattacacatttagtaattgttccgatctatctccacaagtggtcaacgattttttagtgcaggcgatggctaatgtgattgcaaaacacataccaagagagcgtcatgtcacaggcttttctcaaaagactgtgcagcgatcgagtcgtgacagtcagcaggtaatactacatcctgctatgtacatctagcccggtccttcatatatcagatctgacttatcatgtattattgcaacaggaactcaacaaaactttggctttcagcttctgtgcgccctcacatgcgaatcaaaattccaaacttgatctgcaaccaggatcttcttcaatgacacgactagatccttcttggaggaacacacttgtgggctttgctatgctggtgcaagtcgcattttccgagggttactgtgatgatactgattttggcattagttgtgtttgcaaatggaaaaacaaggaaggccactctcataggagagaaataaatttgcattgttgggctttagggaaagctgttgaaagggatcatacgtttgtcttctttgatgtcaacatgcgtgcagataccgatgaaggaaatgaccccgatatctgggctgatttagttgtttttgagttctttcctgtcaataaacagagaaagcctctaaatgatagttgcacagtgacaagatgtggagtccgtttaataactgctgtaaactgcaatacaagtatcgagaatatatcaccagttttgtccttggatccgatggaggtttctggttatgaagatgaacaagtattgagagtcagatatgctggtttacaggagatatataaagctttgtttctttacatagcgggtttgttcaatgacgaggatgttggtttggtagcaccacttattgctcacattattgacatggacgttagttatggggctcaaggtcttagcctataggtctctcatacgtgtatcttccaatggagaaatagtgatgcactatttgctacgacaaatgggtaaagaaatcctccatacagaatcaaagaagactgacaaattggtcgacaatattcagagttccatgatcgcaacaaaggaaatcgagatcactcgttcaaagagtcgccgaaagtatgttgcttagtttttagattactttttgtagtatatcatacattttgtagattgtttaaaatgagttcttattgacggtggatgcaggaacaacaaggaaaagagagtggtttgcgtagtggatcgaggcagccggtccagtgacctatgggtttggcgaaagtatggtcaaaaaccca

SEQ ID NO: 30476 - DNA, 10684 bp, Arabidopsis thaliana landsberg
  unsure (1)..(10684): unsure at all n locations
atagaaagcagataggaatttagttcttaattcattcgatacctaaccctaaagtagagtttcgcttaagtagtgctcccataaggaaactacaatcactcactcaacacaatactgaaacgacaagaagttaaataagaaactacaggcattcttattttttgacatagtcaaagcctctggatgctacagagtatttccctgaaccttcttaacttcacttcagccacagggatcgaataccttcttgggtgctctcttccttggcagcttgacttctctctgatgtacctcaccttgtgttgctaccttatcaataccctctcctatttgagtcaccttgtccacaaggtgggattgtggaaatggattggtaatgcgcttgagaggttcccatgtattctcgcaatctggtagccatctccatttgatgagcacttcttggtcatctcctgttgcttcgtcacggatagctagaacactcgtgggttcagtctcccattccaagtttgaattcaaaatttctggaagcgtttgcacttgaacacaagaaggcagtgcttgtttcagcagagacacatggaagactggatgtatcgcactgccttgtggaagctgcagtttgtatgccacctttccaatccgctgaatgacttgataaggaccaaaaaatctcggagctaacttctcattacgacgctgagccactatggattgcctgtaaggtcttaacttcaaatagacccaatctccttgattaaattgcagctctcggcgatgtttgtttgcacttttctgcattctcgcatgtgctaattgcagattttctcgcagcgtcttgatcaatgcgtcctgctcttttagcagctcttcaacctgagcattcgtcgttgggacatctccgaatcttaagaaccttgggggttctctcccgtaaactgtctggaatggtgtcatctgaatagccgtatgaaatgacgtgttgtaccagaactcggcccacatcagcatttgaacccagagtttgggtttaccactcacaaaacaacgtagataggtctccaagcatctgttgagcacctttgtatggccaaatgtctgagagtggtacgcgctgctcttgtgcagtgccgtgccttgagctaagaacaactcagaccaaaaattactcacgaatatcttatcacggtctgataccatcgtctcaggaaatccatgatgcttcaccacttctttcagaaacacatctgccactgttcttgttgtaaagggatgtttgagaggtatgaagtgggcatatttacttaacctatccactaccaccaagataacatcaaaacttttggataaaggaaggccttcaataaaatccaaactgatatttgaccaaatctgcgttggaatgggtaaaggggaaagtaaacaagtagcagtaagagtagaatacttgttttgccgacagacttgacatcccttaatatactccaccaaatctttcctcattcccttccaatagacttcactagtgagtcttttaaaactcttcagcactccgccatggccaccagtgtggctagaatgaaacatctctagcagctttggaatgattggtgaatcttggggtataacgattctcccttctttgtacaaagtcccttccttaatgtgataaccgtcagcttaaccttctcccttttctaactctcccacaatgacagataagacggggtcatgtaatacctgtctttgtagctcctctctatccaaattcgcaggagctgtaagaaccaaattaagcagctgagtagtagtaggatgtctagataaaacatctttgctgaattgctgagatcgctttctggtttagctaatgtttgagacttctatggtcagttcttataataaccttcttcccagtcaagtaatgtttctatttgtcaactgaaaacacaattgctagcagctccctttcgtagactgatttcatcctcccttttgacgaaaaaccttgactgataaaggctatgggctgcttcccttgtgacaatacggcccctattccttctcccgaagcgtcggtctcgatggtgaatggttttccaaaatctggtaacgctagagtgggtagctgtgtgaccacttctttgagcttttcaaacgctgcagttgcttccatagaccactcaaaactgccttttttcagtaacgacgttagtggtcttgctatcttaccataaccagccacaaacctcctgtagtatccagtgagtcccaaaaaaaccctcaactctgttatgttctttggttgaggccatatcaccatggctaccactttctctaggtcagctgaaactccatctcccgatatcacatgacccaggtaagagattttttttactgccaagactgcacttcttttcatttgcatagaactagtgttgttccagcaattccatcactaactctaggtgcttctcatgtaactccacggtcggactggaaactaggatgtcgtcgaagaagactaagacaaaccttcggaagtagggtcaaaataaatcattcatcaccgattggaacgttgctagggcgttggtgagaccaaacggcatgaccagaaattcgtagtgcccttcgtgtatcctaaacgcagtcttctctacatcctcctttctcatgcgtatatgatggtagccatatttcaggtccagctttgagaacacagtagcgccttgcaactcgtctaatagctcttctatcactggtatcagatatctgtccggtatagtagccttgttgagtgctcggtagtccacgcagaacctccagcacccgtcttttttcttgactaatagcactgtactagagaatgggcttatgctgggccaaataatctctacaggtaacatttccctgatcaatgcctccatttcattcttttgtgtgaaggaataacgatagggtctggagttgataggtgttgtgcatgactgcaagttaatggcgtgctccatgttcctagagggtggtagtcctttgggaagttggaatacctgtttatggcgttgtatcacattctgtatccctgcagcaactgattctttctccgttgccttctgttccgtaaacaactctgatagttccaggagataagctgtgtctccttgttttaaaatcttttccagtgaatttagagaaatttgctgcctaagcagtgctgggtcacctagcagtgtaatccaacgctcaatcatcttgaatttcagtgcatgtcttccccaattcactcttgtgtcccccaaggtagctaaccatgaatagcctagtacaatatcagtagttcccaatgcaaagaggtaaaaatcttcaacaatgtctactccttgaatgttgagtggaaccccggtacactttccttgccctgcaatgacttgaccattacccatagcgaccccaaacccacttgttggtgtgactgttaatgaacactgttgagccacttcttcagatatgaaattactagtagctcctaaatcaattaatattatcacctcatgatcaccaatcattcctttcattcacatagacttctcattagtgagtcctgccattgaactcaaggataagtgcataagggtatgtgcttcagcctaaggctcaggctcttcctcactctcagactcttcatcctcttccaagatctgtcctgactcacttgtagctcccaactttagacacttaagcttctgattttgattcttgcaccggtgaccaggaaaatagcgatcaccacatgtgtagcaagcattgaaattgcttctaggctcagttatcctgttgtcacgcattccatcaaatgattttctcgcaagagtcaattcgtgtgccttgacagggctgttgttgttgctacgattgagaacttgagctgaattcgttcttgccaatggtttggagttgtagccggagtgaaacgatgatcgttcacgctccctttcctattcttcaattagccctacagtctccacaatctcgtcaattcccgatggtctagtcctcatgacttgatcccttatgttcttcctcataccnnnnnnnnnnnnnnnnnnnaagagatcatctattatgtgtggcacctccacagtcagctcctcaaacctctcacggaactcctccactgaccctttttgtctagtgttaagcagctgccaaatcacagaactgcaacgactatgaccaaacctttttcgaaatttcaccttaaaatcactccagtcacgaaagaaacccctcgtttgagtgttccttaaccaattcactgctatgattgagactacacacgacaaagcttcctccagtttctgatgttccatgacttgattttgagaaaaatatttctccatcctaaataaccagtcatcgggattctgaccttcaaacaacagaggctcaagtcgtcgccctgatgagcccaaggtgttgcttggagatccctgctgaacggactgctgatgaaaactgtatgaaccctgggatgtctccatttgctgggtcgataacgccaacggaggtaagggtaagattccgtcacctttggccttgatcggagcagttggcgtgacacaactgtcctgtgtgttgttactctgagtctgtgacgaagagattggactctcagaaacagctttacccatttgtttttctcgaccccacccttcaatcatctcatgcatccacttacgatcttcgtcttgtctctcttgtagtgcgtgaatggaggtctccaacctctccaccatctgggtaaatttctcttccagatctgtgatccgtgaaggatcgacaccttgaccagcttgagtagaaggagccatgatctttcaaacctctcaatgaaagcaccaattggtaaggttgaaacccaccaagaacacaatcggactgaaatgagatgaaaaatgcagaaaaggataagaatagcagaagagaagatgagaatagaaagtagataggaatttacttcttaattcattcgatacctaaccctaaagtagagtttcgcttaagtagtgctcccataaggaaactactatcactcactcaacacaatactgaaacgacaagaagttaaataagaaactacatgcattcttattctttaacatagtcaaagcctctggatgctacagagtatttccctgaaccttcttaacttcacttcagccactgggatcgaataccttcttgggtgctctcttccttggcagcttgacttctctctgatgtacctcaccttgtgttgctaccttatcataatactcatattctgaagtgaatataagatcttacatagctagtcaaattacatttaatatcgtttatattagaatataaaatttaaattattgtctcgtttattgctttattaacatatgattgattattaaaatacatggaagtaattttgattataagatctcattaagagagtaactgataagcaatgaaaagtaaatccgaagttaaaaaaaaaaaaaaaaaaaaaaaccttgaaatttcaagagtatatttggcttaaccggattggtcatcctggtttaatgatgatgcgaaagtattgagaattatgtggacattaggtgaaaaaccagaagattctccctaatgattgatcaattgttacttgctcagaaagcaatatgataatgtgatttttaccagtcaaaataatttggattttatctattcgtaagtatatacaaggagatgattatgggttgatcacccactgtatgacatttagatacctaatggctataaaagatgcatcgattcaatggacgcattgactcgattgttgcatcgactagaaggtcatatttatccttgttataaacccgcaacatagagtttgcgaggttactttcttgattaaagtacaagagtatttcagtgtttatttattataaccattattggatatccgttgggataagtgtttaacattttgaaattcatgttcatacacaaaatggtttagtaatatcgatacgcatcaatccaatgaataattaatagttttcccattcattattggttttgggtcagaaagcaaatagtgttcatctaaaatctttgaatgtgaaaagtgctccaccacagcacgcagagatgaacccttaaaggaggataataatacatgttggatatgaatgataactaagccatcctagaaggatttatataccgctcgttttgaagactatcatattatatagtcagctattccaacataagggggagaatgtatacagctggtgaaaaagataaatagaaatgaattatcaatgatcctcggagtaaagaatgtatattaagagtccaaaagataattcaattacagaatttagcgttgtaattgccagacgcatttgctgacccaaataaagtgatgaagtcacttataccagttgtaaattaaatgctcaagaatataatgaatgtcctgtaaggaccaatttcaaactgctattgagtcttaagatcgcatgaagtgtaatagactttggttccaaatataaatatcctcgtaaaagtgaaggagcacaaaattaaaaatgaccaaattgaggaaataaatattttgatgatctcttgaagagagtgaatgatctctaaaagagacataaacatgacaaatgaaacattcaagtacttgacaatgaagagatctagctagctatgtcatgtcaaaatataatggaatcaaaagcaaatcgacgtcgtaatatatttgcatgctatgagcagttgatattatggacaaaaaggaggatcatgaaagaaagtctattgaaaagtgtacacaaagtaatgattagccaaaaatggaaaagaagaaatagacatataattataatctctagtagagatatttggattagtagtctatgcacatgatgtgtaaaaccagtggaaaataaatgagtctttatgtgaaagaatagtgaaattaatgagattttcacaaagataagaaatgtattatgaagagatatattctcttgtggtggatgtaatatttttttaagtatctaaagtctggcaataagagacggaacactggatatgacatttatatgaaattcttgaaagatataatctctgaaggattaattatatgagaattatgttctctagaactctactcgatcgaataaaaagaaatatgtaacatgacatataatcatataaatgtatatttacgttgagtttgtcaaaatatattgatcaaactaatatttgttttgaaaatcattaaaactcctacagagttatcataagtaatacgatgacaataatctatgataaaatatcactagataatgatatttataagtctatatgaaaaccatataattttgatcattaagattatggttattaattccaacgagatattgtatttgattgaaaatcatctcctgaagaagatgtttctgagggggagattgaatgatatgcgtggatgtaccctttttccttatcatagtttttatcccacataatttttctatgacaaggtttttaacgagacattaaagaacacgcaaataatacacttgatgaatattaagaaattctatcaatcatccaaatgaatattatacactaatgatatttagagaaataaataagatggtcaagatgaatcatctaaaagattcatgagcagcagaagaatggcgttgtactttatccagaaatttgttcaagagaagatttggcagacttattctcaaatactgtttattctctgccacatcttctaatcatgcagagattttactaattcatgaagctagccgcgagtgtgtatggctaagatccatagttcaccatatacaagaagactgtggtatgtatgcagggaaaaagactccaacaattatgtacgaagacaatgcagcatgcatcgcacaactcaaagacggatacatcaaaggcgatagaacaaagcacatcctaccaaaattcttctacacacacgatctacaaaagagcggcgatgtacgagttctacagatccgttcgaatgataatctggctgacttattcaccaaggcgctacctactgctactttcaagaagttaatctatcgtatcggattacgccgtctcaaagatctcgacgaatatactcataagggggagtaattgtatgttgcactctttttcccttaaccatggtttttcccattgggttttcttggtaaggtttttaatgaggcagcatttcaaatactttacgagttatggtactataatggtcatcagggggagtgttatgaataaagatggatgcccattataaggcccatcatctaagcccatcatctaaatgtttctagggttttaccctttccttgtactcctatataaagaaccttttatttcaatggaataacacactcatttcctctatctctttctctgtttataacaaaagataaattttaaaaacatcaatttcgttttatttttattaatagtaccgtactatcagaagtaactaatcccagaactcaaacttcatcgctcaagtaccacaaactagaagaagactagtctattaaaggtagagccattcaaataaagtgaaaattaaccatataaacaagcttcagaactctagagcaacattgaatacgcttctaccatcacttaagttagatcctgaacatgattaagagctaaacaacactagcgcatacagaatctgaactttcacgccaattcgaatgaagaaaacgaaaaagaacttagaaatgagaagggtccagtggaaacatacctcacccttttgacccactacaagcacatcatcatcgtcgtcttcaattgaagcagttttcgtcgtcttgtcagtctccgatgtggataagaccggtggagagtataggtcgaagtggaggtcgagaaacgattgatttcttaaatttggggatgattttattaaattggtttagatgtgttagttaaatattggtttagagattttagttggtttaattcaattttacaaaatttgatgggttaattgggtaaaccactaaaaccattaacccattacaactcaactcattttactcatcaaaccaattgactcatcaactcatttgactcatcaactcatttgagtcaaaaatttcaacccattagggttcatgggttgaattgagttgagttgacccatgaattttgacccattttgacacctctatgtgagtaacataataaacttatttttctatgtatgaaaacgtgaaaacttgatcaatgtggtgaataattaaaaaaaaggtgtatgataacgttctaaacttttcaacgtatcaaacctagctatgtgataacaatatcaacgaggatgatgacgaattctggtcaaactttcagaaacagcacattttatttttcaactttttgggatttattctctgttctatctccaaatatagatgaaaatagattctagtacttctaaatttagaagccacatatgtaacggtctaattgccagttaatgcacattatatatcggtcttacgcgtaagcaccaagactcgacgaaatcaagaactattgaaaacagtacgatcatttgatcgaaatgggaagagacctcggctggtgcttcttcgtggcgacggttttgttagcagcggtgttgttacccgcaccaaccatagcgggtcgactagagctaaagaatgaaatctcgggggtcgctagtgtccgtaaagcgaagctagccgtgcggtgctggtcaaacgaggatgacctcgggtggaatatgctaaagccgaagcaatcgcggatatggaagttcacgacaatgaacatgtggccctttcagaaaaccgagttccgttgccagtttcgtagcgggtttggaaccacgaacgaagacgtggtgacagtgttttctgtaaaggacgggtttcgaaagcaatgcggggtgggaggggacgagtgcttttgggtagcgaagagagatgggttctatctaagaaggattgtaaaagatggaggaggggatagtcgcaagaaatatgttgatgttctcaaaagcaaatgggtttggaaatggtgaaatcttcaatttaattctttttatccaacaatctttaattttattttttttgtcaataacatgcaatttatgagtcttcgttacaaccactgatatacttattcattatcttcacccctttgtattagactcacacgacgcatccttgaatattcatggggttataaatacacaaaagtataaaaagtatgtagtaatattattatttcaaatcacaagaaattcctttatccgctttagttttaataagctgaacgtccaagcctttggtccaaattctccaaattctttgttttcttagttagaaaatatccaatcaagaagatgaaacttatgtattaatcaaattcatagtggtaggttaaaatgttgaatcacggccaccactattcgtgacttcatgtcgcattttggtacgtggactttactcttgtccgagacgaagttataaaataactagttcactccaaaactttagtactacgaatttgaatgggtaccgcggtcgggatggacaaatccatgagc

SEQ ID NO: 30477 - DNA, 4140 bp, Arabidopsis thaliana landsberg
aactatacgagtgaacatgctgtattctggtgcctccataaattgaagaacctggaatgagatctcaacattagtaattaacatgaatagttttcacttttcaggggaattctgagaggaataagtgccttggaaatagatgctatttcgtcaataccaggagaggcagcgttgagcatatcttcaagatttaagtcccctaactaccaaaaatgaacaacacaggtaagacataaatgaagttttccaatcataatggaggcttggaaaatcaacaagagagaaaaggaaaatgaacctcgccggcaaacattccgagccccatgctatccatcatatttttcacacttttatcgcccgtctgacgttttatctcgtccttcattatctcaggtgtgatctgtttcaacatgagaagaaaactcagcaacatatgtaaggtatcccggagtttgcagagacaagtagttttttaatcacctcaagagcaagaagtggagaatcaacaccttgaacgggctttaggactcctcctgacaagtcctggatttcaaaacaagagattagctgatgcctgaaaacacaatccaagcgaaaacatagagaaccaaataaaaaattgatacctgggaaaaagaatcgctcaaggagtgagcagggtcagtagaaaccacaatggtaggatgaccgtggctagcaaacttaaccgcaagagaagcagcacagctcgttttcccaacacctcctttaccacccagaagataatacttccgctgattcacagataccatctcattaaaatgagaagctccttcagcaagagtagctaatgatctcactacacaaacaaacaagaaaccaaatatcaaatgacagaactttctatatgcagaatcacttgcttccgtggataaaatcacagttcaacaggctacagagcaaggtgaacatagcttactcttcattatgtgatccaaacagcaatttctttacatattcaactacatgtttctcatgataaaccacaactcatctattcaccaatcagtaaagttctcatctttcaactccacagagaatcttgaagtcatgtcatcactccaagaggacacaaagatcagatatttgcaattaataacgttcccaattaacgagagttcttacaatagtaagagtcaagtccaaaactcaaaccaaaaatggatctgaaaaccatagtcaactctgcggagaaaattctagctaaacaaaagagaagagacggtgatgaagaaatgtcataaagtttgaatttttttgcagagagagcaacaaggggctacctcgaaagagtgttccggagattctgtcaccgtgaatttgagcattgaaggaattgaaacccagagttcctgcgacccggtggagagagattgagctagtacttcgagaaacacgattgaggagaagtaaagccgccattgaagaattcagaatagaaaaaagggatgaacttttcccggataatcgaagaagtaagaatcactctgttttggacggagccggcgacggaagaagggctttgcgagggttttaggaaataaattatttttcataaattattttttttctttttttgtactattagtataaaataaaaatatgttaaaatttgagtaatcactttgtaaatgaaaattgtaactttcaaatatgaaaattgttctttcaaatttgaagaaaaactgcttattcaattcattttggccaaaataaattaaaaaggtaaaataaagtttcacaaaaagcccttacaagttacaattcaacctaattgttcataaaatgattagtgagctaaactcataatttaatggattaaaaccatcaccaccaaaaacctaatctttacgtcgcaacaaaggtccataataatcataaaccggatattaaaaatatatgtaaaaaatgaaaaatgtttttataattaaaaaggtcccaaaattattacccaccactctctatctcaatgacggttaagagcatcagctttgaaaactgcttctcgtcttccctcaccaaacaaccctctcacgatcgctctcttcttcatcttgaagccaaagctaatatatctcaatatgtctcattcttcttctgttaacctccttcattaccattaccttcctcctgattttaaccactctttccggctctgtctcactgctccatcttcctctcgctggtctagtcccgacgattactgctccatcttagccatgcccaccacaactctccctggctctatctctcccttcaatgtccctcatagtgttgtgagttttactttcaatgcttcatagttctgatcattcatatgttgattaatttttgcgtacaactttaattttataaaatctttaatctagtggttagttgttcaaagatatcgtgttaatttgggttacatgcaccttgttctaaacctctttccatatataggctacatgtccggatcgatttattcgtctctttcattcacattaagctgatcagtagcttctgcataattctattgttgtatgaatgtctacgttttgaataagttttgaacattttttctcatttgtaaaagaagaatctatgcttaagttgggaatttttttgatgtgtatagaggacgaaaaagccaaatgggcagcagaaaaaggaagaaatagagaaagaggtatgggaatccataaaattagcttacgtacttatgtttatgtctaggcaaacatcaagtgatgtccttataaatatgtatctagatcaaggtattataggtgtccaatcaagttttcggttcaattttatctttataataaaaaaagaaatcgtaaatacatggtattattataatcaagaaccaaacgaaattgaaagattatggtatttctgattctacatttgtagtttttttttttactttttaattatgaggttaatatttttgttgttaatgaaattaaaaaaaagtattgatatgataaatcgttaggtgtggatgttacgagagatgctggatcaagaagaaaagacacgtgagatattggaacaagtccaaaaacatcaacttccttcttcttcctcttcccttactcttcctgcttctctccctcccaaggtacgttttcattagtaacacatatacgtgtatagtgttccaagtttggctagtgtaaaaaagcagcaagactttaatatatgtgatgatattaacatcatacacatatttttggtaacgttgcttttaaaccaagtctctggtcaacgaaaaatattattgttaattaacactattatatgtctacatgaaacaaaatggttcgatcataaacaaagatacatttattgtgaaaataaaaaggtcttaacattttattaattaagcggtaaaatgtttaaatttaccttaacactttgttatgggtgcagatgaaggaacttataacggaactatcaatcgtagaaggagaaatctcaagactagaaattcaaataagccatcttcagataaatctcaagcaagaacaagacgaaactttgaaacaagctacaacaagttcttcaagacgagcatggcaaactagtgagacttacaaggatgacaacataaccccttatcaagctccaacattaccaaaataccctaagctcccacctccaagccctatggtaaacaaaggcatgatgaagagtgaaaacaacaacaccaaatctactacaagtcatcatcaagagaatgcaacatttggtacaaagacattgcatttcatcaacaaagctataaaaggtgattacgcgattgaaagcttccgcaagtctaacgagaaagttggagttgttgagaaggaaaatcatcggtcggtccaacatgaaaataaggtgcaagagaatatgaaaatgaaaaagattaggacgatgaaatcgccttcgcctctacgtgaacctagatatacctctcctaataaggtccgattttcttatatgatcctttgtttgaaacatatgtttgattcgttcaattaattttgatttatgatttatttcagcctaataaggatcgtgtagcagcacttgatgcatcactagacattccaccaaaatctttatcaa

SEQ ID NO: 30478 - DNA, 2861 bp, Arabidopsis thaliana landsberg
tcatatgaaagagtatacttcctacaatgatttttttttaatttatgtttatattatagcttataatatataaattatttttatgttgctttattatgaaaacaagcttttgcaaaactttttttataataaaattttaatttgacaaattgtatcatattatttatatagttatcatgtcgaacttggcaaagcttgatataactgtctttgatgtttctggaaaaattatatgacatggacattatatgcaaaaatgtatctaaaagcaaatgggcttctcaaaaccctcgatctgtcgaaaattactttagaagagaaaaaggcaaaagccatgatgtttttgcatcactaccttcacgatggtttaaaagatgaataaatcacgagagaaaatctaacagatctctaggtctctctcaaagataggtttgatcatcaaaaatatgttatcttaccaaaagtcaaacatgaatgactaaatcttcggtttcaggattaaaaaagtgtaagtgaatataattttgctttgttcggattcacttccaggataattctatgtggagaaaatgtttccgattatgatatgatcgagaaaaatttcaaaacatttcatcctacaaatgtaatcctatagcaacaatattgagtgagaggatataatcgatattctaacttgatgcaagttcttgttgctgaacaaaataatgaactcatgatgaggaatcatctaactcgtccaactggatcagctccgctttcagaagtgaatgttgcttcatcctgttacaataattggcaaggacgaggacgcgaatgtggttgaggccgtggtcgtggacgaagaaaaggaaggggtctccctcccaataatttgaatgccaagaaaaccaacataaattttcaagtgaatgatgtcggtcgtgtttcaaagaaaccagatgaaagtacttgttacagatgtggcatgaaaggccatttctacgagacatgtcgtatcccaaaacatttagccactatatcaaacatctcaaaaggcagaagaaagggatgttgagaccaatctcatctctaatgaagctggactttctaccatggcctaaatgataaaacccatcttgatatcgctgattttctcgttcatcatgaaaacgggaaatcatgtgaataagatcgatatgacatgatatggttgtcgtagtactatatgtactttttgatttaaatgtatttcctagttttaaaagtttttggaataacggtgtcattgtaatatataataacattttttcagtattgtgttattttattaatgcatatttctaaatgttttgtctcagaaaatgtcaaattttgagattaaggatggagatatgtctggcaggcagtgctacgacccacacaatacttatagatcaaaaatatttctcctctctcaaaataaaagactctgctggaagtgtgatgcattatctggccatgcaaataatattgttgatttcatcgaagccaattttataatgccaaggaaaactcataattcggccatcaccagcaaaaattgggaatgaatcaccattattcttagagagaatacatggtgacatatgttgacttattcacccttcgtgtgggtcatttcgttattttatggtaatgattgacgtatctagtagattgtcacatgtgtgtctattgacaacacgaaattcagctttcgcaaaattcattttccaaataatcaggttgaaaacacaattttctaattatgcaataaagaaagttaggtttgataacgctggtgaattcacttcacaagcctttaatgattattgtatgtcaattgaaatcgatgttgagcatcatgtccctcatgttcatacataaaatggcataggtgaatctttaattaaacggttacaactcattggaagaccgttaatattgagaacaaaactcccgatttttgtatgggatcatcctatattttatgttacgacattggttcagatttgaccaagcgcgtataataaatattttcctttacaattaacgtctggtaaagagccaaacgtagcccatcttcgtgttgttgggtgcgcggtttatgttcctatagctccaccacaaagaacaaaaatgggaccgcaacggagattgggtatatatatcggttatgtatcaccgagtataattgggtatcttgaaccgcaaattggtgatatgtttacggcatgttttgccaattcccatttcaatgaagatgaatttccagcgatagggggagaaattaaacaagttccaaaagatattacatggtgtacaccataattggattatcttgaccccctacaaatcaacatgagctcgaagttctgaaaattgcacatttactttttttggcaaatcaactaccagatgcgttcacaatgggctgagattattagccgaaccggattaatcgaaccgaaccgagattttaggtgttcggattgggttcggctatagggaagaactgatcgactgccattagaattaataatcggttattggctattttggtttggtttgcatgaaccgatctgttattcaaaatcaaaacaaaaccctaaaaattacccacccttgattcaacatttgtagccgccgtgactgggtctctctttttttttttcctctgctttcttatttggatctattcttcttcttcttcttttgaactataattcttcttctttctttcttctttctccttcttttttctttggaatataatatttcttctatctcctctattttttttctttgaaatctctttttctcttccttcttttcttacgcttcggggggaatttattgaa

SEQ ID NO: 30479 - DNA, 4489 bp, Arabidopsis thaliana landsberg
ttttcgattgtgaacggtatcttaatgtgacgcataaatttgttactgatactgtatgcacaataattctacgtaactgcgaatatgagtgcagtgttcaattacagaaaaagttaaactacgttttcgaatgcatgtatcacaagtttacaatgttggagctcaatacttttttcctgagaaggaattaggattctcattttagtgtactgattattgattagtgattatgctgcaacatggatgcatgcctgtccattgagcaaaaatatatacagatttattaaatatgtcgtcatcatcaaataataatatctttgcaagtggtatcctatgagttcataaatcataatacagacaaaacattgtgtgattcaattttggataataacttatgctgatagtactttatggatttaattttggattcgaattccttgttattgactcattagtggcaaaacaattccattcacgttctaattatcatgaccacacgtggtttctatgatacgttgactcatggaatgtaaaaactaaaaagaaatggaaaacccaagtcatggatcttttacatctttagcgactcttatgagtcatgagttaccaaagcttataaactaacattttactttacacactctttacgtatttcagttgtttaacgtaccatatatagtttttcacattttcttgggtaattttttttataaaggcttaggtaaaaaaattacatcatcttgttgttgttgcggtaattaaggataaatatatttttcttggattggatatccgtaataggtccatgaattttctctaatgaggctagatattatgattgattttaaaaccagcatttgctttctaaacttttgttcggatcatatcagtcgatgaatatataacgtgatgtgttgaaattaggatgagctagcattgcgaaatataatcctaactacgaatatttgtattagtatagctctctataactatgaatattagagcaatttggtggttgactatagtcataaagatttattgacagagaagctcggatctaaatctacatgaccttcgtcgttatcttctctttctttgtggagctatattattttcttgttgttcttcatagttaatctgaacattagggaatacattaattaggatatatgataataaaactaaaacaaccacccgtacaagattttccttgatggccgtaagatccggaactagaaagtcaaacactgttgcagttcaaactctgtttaccttacgcgcagcgcgtgactaaaaataactatgtgagtgggaaaggaataaactaattgaagaagaagagaaagcaaaagaaactcggaacgcggagaaactgttgttgtcgtcgcggttaacgggtatgactcatttcttttttttttcttaaattttgttgctcgtttcattttcactttaattgctccacgcagctcaaagcaataacaaaaaaaagaaaccagaagaagtaccagtgttaaatgtgtcataataagatctccttaccaaagaaaaaaaaataaaaaaataaaataaaatctccttaccaaacaaaaactatgtgtcataagatctaagagcattatacggatctaaataagtaaataacatacaaaattcagatcgatgcatgagcttgtaagttatattttgaggagtatactgtggatatgaaaaactacttcatccgggtatgtgttatatcaagtatttcattgtagttgttaattggtctatatgaaaatatataaatttgaaatctaattaacataatcacgacaaaataaatatgcttttaaaataaagaaaaataaatatgattgttagttatttacattttttaataccggccagtagtatatgctgtggctagctctttgccatatatgatacgtgccggtgcatctttgttttgcttgactactaattttatagttctgtgtttattcataactcgaatatttgtctctatataacagatgatagaaagcatggttttattcaaatgtaatcgattgcgttttactttaatgatgctttacatacacgatatctccctttttcgacacattatctcttcgattagaacaattattgtgtatgtttgcgtgttttgatgagtatcttatagtactacttatttgaaattaataacttatacaaacctttaaccaaacacattttttgttttatcaatattaataaagatttatagttccccaattccataaatatgaatacgacacatcaacgaaaattatgaaaaacagccatatatagtttgcaatgtcgaatctcgatatctccgatggtggtcacagctattgataaacaataattgaacaaatcatgatcatacttaataatataaatggccatttaataagctggtagaagttctatcaattaaatagctagatatttaaattaagcaatttagtaaattttccactataaaacaagacgaagtttatgtaaagtcttaaacatgtatagttttaggtagagaatcgaagacaatttttttttttttcaaaagtttgcatgtgttcagtggttgagaacttgagataacgattggtttatctaacgaacacgctctttcatatcttacaattaacgtttcaatcagacaaaggtaaagtcaaatagatgtgtagtaaaaaagaaacataccctgtttgtagtcttagtcttgtaaaagtcttagaatttgtggtggctaaacttaacccgtgacactttgcaagtattgttgggccatgtattgcaacgtgcagcacaacgcgtgaaaaatcctgtagcattaaaacaaagagccagacaatctggagattattatgaagatttttttttatctcgtaccgatttcagccaatccaaaaaatcggattccataaaaccaatcagaaaaaggagatgtggcatttgaatttgttgcaaatgttttcactcaatatttattgaaaaagcaaaactccatattaaatcatactcttaacatttttttcctactatgaatgctactacaaatatggtggaaaactagttatttgttttctctagaaacttacactttattcgtctaaatttgcttgcaatagaactatactaatgaacattcaaatcacaaatgaccttttttactacaatcctaaaaaaatcttaaggtattcaattattttaaatgaacaataagaaaaagacacaaacacggtgggacccaaaaaggtctctcaaggtaggtcccacgagaataccctccattgctgagtgctttaaaaacagctgcaaagcatctacgttttagcatccgaacaaaaaaaaaaacaagttttcttctttttacactcaagaatataaattccctgttctccagatcttttctcaagaaaatttaaagctttaacttaagaaagcttgaacctttctcttccaaccacatcttccttctttttatcctctagctcaacttagaaagaatagaataaagtggcaaaaccgaaagtgaaccaacttgtagtaaattaatagttatgggttcgaaacctaatgccatgaagaatgtggtggctatggcggcagtttctgctctgttccttctagggtttcttgtttgctctgtttctggttctgtctcttacgatagcagagccattaccatcaatggcaaaagaagaatccttatctctggatctattcactaccccagaagtactcctgaggtttgtttgcttgctttttagttgcaatgtagttagatttatttcaaagtttgaatctttcgttccccattgtttgagtaaaatcaaaatctagggtttcgtttcttatctctggatgtgtgcttttgtgtagatgtggccagatctaattcggaaagcaaaggaaggaggcttagatgtgattcagacttatgtgttctggaatgggcatgagccatctcctggaaaagtaagaaaaaatcttatttttgatctttttatgtgtgtgaataaagtactgattcattggattccatttttatgtgtgttttggcttcatctgcagtattatttcgagggcaactatgatttggttaagtttgtcaagttggtccaacaatctggactctatcttcatctaaggattggtccttatgtctgtgctgaatggaacttcgggtaattatagctaatttcttgtaccttaaacctataaatagaaagtttaaaaggtgaagaattttcctagagattctaatatgattgttttgtttctgtttaaatttctcagaggatttcctgtgtggcttaagtacattccagggattagcttcagaacagataacggtccttttaaggtttgacattttcttaaagactaatctaccttcattttgaagttatgaaacttcacacttgttcattgaccattgtttgactcctgggaataaaaacattgacttgttttt

SEQ ID NO: 30480 - DNA, 678 bp, Arabidopsis thaliana landsberg
  unsure (1)..(678): unsure at all n locations
tagtcacacttcaaatcaatgcgttgaataagtgcacatttacttaaaggtgaaacctttcacacaatttttgagcaccaacgaaaaaagcaaatgcattttatacagtcatggtaagtaacagatgcagactttgtccaaacaaacaggacttggatccgataaggtaaaaagaatttaccacacggaaacctacttatgagtttcaattactgtgttgatctgagtattcatatgttgtaaaatcctattttgtnnnnnnnnnnnnnnnnnnnnnnnnttctctttaaccttctctttgtgttccatgttatgtacaacctctttgctttttctatgtatagacacttttcttctacttccttcttttctgcatatcaaagatgaaacaaaacaaaaaaacgaaatggagttagaattcaaaagaaagtaactatttttgacaggagtttcaggttgttttcatggtcgaaattgcttacttttcatttatacatttatacacttgtttctatctgtctatagtgagcctgaaattttttgggttaatgttgttgatgactactatgacttatgagataaaaaaaaaaaagtctgatctagagatatttcgaacatacccatactaggctgattgatctagtgaggccttcttagtctcctctatatcagactcgg

SEQ ID NO: 30481 - DNA, 3467 bp, Arabidopsis thaliana landsberg
  unsure (1)..(3467): unsure at all n locations
agccttgacatagattggcatgtaaaaaccaggaaaaagcggcctatgtggcaccggcaatgctagaacctgcaattaaacaacggaaaactccatcaggagaaacataactccgctaaaatgaaaatgatcaaatgtaaaatgttcacaaaatccaattagtctttgcttgactgttaacaacaaaccactaaatacagattcaaaaatgctctaagcaaacaccatagaacaacatacaatatcagaagcttcaactttctccactaatagaacaacaaagatgtaaagcacctcataagcatcatccactcagttattaccaaagtttacaactttgtaataattccaacaagaattgaaattttcctatacaattagattgccaacgatccaataacgcatatacaaatgcactaacaaatcttccacagagaaaggaacaaaaagccatagttacacaaaccgttaaacaatcttcaggcctagggttagtgggcacaatcgcagacgaagatttggagtcagacacttcagaatcggactccaccgccttagtttcagcttcagccgccgcctctccattggtaggctcagagcagaagaaagcacgatgacccaacgaagtagatcgccgattccacccagtgatttgactcaacgctttgaacaatggacactccactggagaagacccgacgaccctacttaccggagtcaaatggtggactcgagaggcggaggaagtgaagagctttaacatggtgggagagaaagaagatctggggtaacaatttctgcgattgagttttataaagttttgccttttaggcaagaaaccattggagaattctggagaagaagcctgtagacgaagattagtatcaaagcccttcataaaccccgacgaagcaaaaccccaattttaaaggcagcagagagaacaacaccattttgccttcacaataatacgacgtcgttttggcgtcggttcattgaattttccggttatcagaaaaccaaaccggtccggccaactaaagccgtttgcttcaccgccattagtaaaagatgtggcctttaaagttgtgaactttatcttcgattttgttttgatgatgcgtttaaaggtaatgaagagaatttgatacaaatctagatagcattggttctctactgattataacaacaacactaacagagattcttgtcctaacgaaacaagcattacttactactgattctagattactacgagaagcatcgtgattggccctagataagttagttctctacaaatccaataagaacaacaagattacacactttctacagagattgatatgatcaagttagttgaatcatcttccagctcctgctgctttgaggaaattgtcaaagggactagctggaggtagtctcatcatggaccatgaatcctgcaacattccagattctctcccatagatgttcccatcttctactacctgtaacaacgtgtctcaacgtgtaagcctcgtatgataaagtttctacctttctcttaaccagcccatttggtatcacaaagttatgatctttctcactattactaaggaccatagcagattttaacagtttgtagttctaatgtgtttaccaactcagctgttacgtaccttctcaagtgcagatgattcctcaagtgaatttccatagagcccattcatctgacggttctcagtggccaaccaccttgagagcttctctctagtaccagtcccaaaggtttcacagcggttagtcattgtgtcataaggaagcggagaagtagagacagatgacccaaccacttgaccagcgacctcaagcgcctagataacatatcacaaaccaattataagaagacacaaatatatatatcagccagtttcttctttatgtcgaatgtggtctatgcttacagattccatgagctgtccaatgctgataacttgaggaatagatggtgagggagatcctcttggggggaaacgcacagagagttcactcgtcacttcgtcctcaaccattgaaccggcaggtatgtcctgtaataaagaaacataagtgttaacagttctgaatattatcaaaatcccaatggaatatggaacttcagagaatagtttacctcatcgaaggacagcgattccttagagatactttggtttggttgaggttcaatgtttggccttgatccaaacataaaagcatcatcaggtgtaaattgctccaagatttgcatcttcacatcagcttcctcgagcttaacaagagagtacataaaatcaaatcagcacaagagaatcgaacattggggcttaaaaggtattgttcactaagaaacagaaaatataagatttaccttcgaaagtttaggtagattttttgcgacaatatcggttataataatgttggacagttctactttgcttcgcatctcaaacagcattgaagtagccatctggctatcgcttgaggacccaaaatctttcatatttgcctgtggtcttacgtgaagttgtaagtcatctccaatgaaaagataaggatccacctgaaaattttgagtatataatcaagtgatacacaatctccatggataaaataaaagtaataactgaaacaacacattgggaactcacatcaccaggaagttgggccttcaacatttcacaaatatgaggaatctgatatattttggcagcgaacatcagcatacttgtggataaagcaaggatcannnnnnnnnnnnnnnnnnnnnnnnnnnnngaaaaagagaaagtttgactgcacataagcgatttcttaaactttgatcagtttaagagagtttcatcaatcagtaccgttattaaggtccaacgaaagagtcctcaatgagaagagaagctggaaggctcgaacaacaagcccgtcatcaggattctgtaattaaaataatcatgagaagctttaagtatagcgtcatgaaagtgaaaacttcctctatgaaagagaaatattaagagagccagaaaagaggagaaacttttatgttgacctttagtcgcaaggacagaagcaccaagctaaaagaatgagcaatagcttcaatgtttgaaggtaagatatcaggaagtgctgattgtatccaaaatgcagataacagttgcccgatttgatcttccgtaaacttcatcatcgatggtaactgcatcaccaaacagtatcagacaattgcataaacatatgatggtcctttagcacacaacatccaattgtaagcaaggaaaaatgttaccatatcagctagattgataaacccagcagtcctatcaattatggaattcaacttgtgaaactttggggacgatttgtagttcttaagatcctcgtgagtattattgtaaccattcttctcaatcttgacgccatccttctccttcctgagcttgtctgaacga

SEQ ID NO: 30482 - DNA, 3791 bp, Arabidopsis thaliana landsberg
gaatgaaaatgaaggccctattttaaatcaatgcagtaatattcacaaggttatatgtttgaacatttattcatttatactatcaaatgagtggggtgtgattaattgataaactgtgcacacacatcacatgtgcttacaactgagacctaaaagagatcactagttggagaaggatatcattccatatttcggctctctttcatatacatttatactttaataattgaagccattttatctgaaatgttcgttattgataccagggtatatgatgctttaggtggaaatcctcatttagtgaaactaattccagcggttgggattcttgcatttgctacatggggtcttagaccccttctgcgccttgccagaactaccctgtttgaggtgtgatgtcattctctctcgactcttatacatttcttcaatttcggttcatgggctacttgctatagtttattttaagtggatgcaactttaattccagaaggggaatgatgcaaattcacagaagagtagcacgcagtacattgttgtgtcatatcttcaacctttgctgctttggagcggagcaatccttttatgcaggtcaatagtatttttgtttctaactagttaactattatatgtgtttactaacatcaatatggaattgtctttcagaacattggacccaatagtattgccttcaagtgccggccaggctattaaacagcgtcttctgatctttgctcggtccatatcaacggtgttggcattttcctgctgtttatcaaggtaagcaagagtttctgtatattgttactgtaataacgcttttatggtggtataagtacttgcgtaaggatacatgtctccaaaacagttagctgaccttactgcaggttcaccatttagcttgctttttatcagtttgatgcaattttatctccgcccttgtatatatcataacttagctttactgactaccaaatggtttttcagttactgagcatgtttgatgcaatctttgggctaatacaaaatgtcttttctgcagcctacttcagcaggtgcagaaattttttatggagacaaataatcctgctgataccagaaatgtacgtcttcctatcctgaaacagatttggacactgttttcattattgatagttcatcctattacacggcatgaagtggtaacacaacacctgcagctgcctatatgttctaatgcctcaactgtagggagaagtttgaatatgtttcagattgtgtctctcatgaaagaataagcattttgtcctccaaatccaaacttctattgtctttgtgaatatgcaatttgcatttatatttttagttgctctgaaggaataaagtctttcgacatagatgtacaaaaactcagttggctgatgcttgagattagatgatgatatctttatgactctccagctaagggtttattcggaaaaatgtttatctatttattgttatgccagatgggtttcagttttgctggaaaagctgtttacactgctgcgtgggttgctgctgcttcattgtttatggaactgttaggcttctctacccaaaaatggctaacggctgggggtctggggacagtactgctaactcttgctggccgtgaggtgcgttcatctctttgtggaaaactttggcatactaaatcgtttttacggtgggaaaattattccttttgtggatggtgcagatacttactaactttctttcaagcattatgattcatgctacacggccctttgttctgaatgagtggatccagaccaagataggaggctatgaagtttctggcacagtagaggtctgttaacttgtcagtttatctttgttaaatttatttttcttgttcgtgttcacgtcactagcttcagataggagtcttctttttgacatatgaactgtgttccataaatgacacttctttttcagcaagtcggttggtggtcacctacaattatcagaggtgatgaccgggaagcagttcatattcctaaccaccagttcagtgtgaatattgtgagaaatctcactcagaagacgcattggcgcatcaaaacacatcttgccatcagtcatcttgatgtcagcaaaattaatgtaagcaataatagactagtttacaaggtcttacacccctgcactctcttggtcaatgtggcaagttattgtatctttttttcaactatacagaatatcgtggctgatatgcgcaaggtgttgtctaaaaatcctcaaatcgagcagcaaaaaatacacagaagagtctttctggaggatatagatccagagaaccaagcccttagggtaagaaaatatcttctatcaacatccaatatgtctgtttcacgttaactcagatttaatatctatatctgatatttttgcagattctaatatcctgttttgtcaagacttcacgttttgaagaatacctgtgcgttaaggtatgttaaagttaactgaatacacacttttcatcacatgagtgtatctctttggctgctaagttatatcattcaaattatgtgtatttaatcataccacactaggagtagtctgatcaactattttgacatgtctcattttcatcactttcccaagacattgttttgtgtgtgctaatgcatgtgtacttgagtgcatctccgagcatatgttcccgtgggcacatgtgtttatgtgtttgtatgtgtatgtcccaatgtcatgaccttatgtgatagaaatttgtatctttgaacaggaagcagtgctcttggatcttcttactgttattaggcatcacggggcacgtctagcaactcccattagaacagtacagaggatgcgtaatgaggctgaggtggacactgcaggattttcagacatcgttttcaatcaagcagcaatgaaccgccgatacatgctgattgagccatcttataaaatcaacagcgatgacaattcaaagtctccctcacccagcccagggcaaaagtcacccagcccagggcaaaagagtgaagaaagggaccttcaagaagaaccatcggaaaccaaggccgaaacagaaaacaacggatcggtgccggtttcaaatgccaaaaaggaaaaccagaaagcggctcttggttccaactccaatacaggcactaagggttcatcaacctcaacatctgaccagccagtagcacaaaagtcagaagaaaagaagaaagagagcgtgggagatccacataaagcagagaaggatgaagtttctgatgacgaagctacaatagagcagacactgaaatcaaaagcaaaacaagggagcgagaaaaacaatggagagtcgaaagctcgagatggtggtgggtccggtactagttctttactggaggagaatcttgttcttggtgttgcgttggatggctcaaaacgtacactcccgattgatgaagaacacaaagcatctggtgcactaatggattcagaagaacttggtattggatcagaatgagtagacggagaagagatataaagaaatttgtgttctaagcaatttaatgcttctgtagaaagtaacaaacagaaacggagaaatgagcgcgactctctgttaattttgtaagcatagaggtttgcgccatttcatctctgtaaataatactagcgattcaaaaactgaaaagtagtttgtttcaagtgactagtttgagatttttcgtgttttgaaaattcttaaggatcaaatttgattatcttaaatcccacggaaacacttcaaaaagatatatacc

SEQ ID NO: 30483 - DNA, 2157 bp, Arabidopsis thaliana landsberg
attagacgaaagataagaatatttgaatggataccctaaagaatttacgtagaaaatgttggtcaaaaggttagttccagtttctgcccatgacaattgcttaccaaatagaaaaccaaaaagcaatagaaattttaagtaggtttcatacaagagttgcattttctttggtcagttaatcattttaagattaggtgagcaaccttcattccctacatatatattacatatatataattataattctgtcagaaaaggaacacatgaaacagttgatgactacaaaaaacaattatgcaaaaaatcaacaaatgatcagagcacaaaatattgtatattttgcaatatgaaaataattccataattaacctatacatatacattgaatataaatatttataccaaatttccaaattgatttcataagcttaaaaacaaaatctgaatgtattatatttttttgtgatagtcaaagaaacatgataccatagatggctacgaggaggttctgaatttgatttttagaggagattaatttgtcttgttttttttttgtaggaaaaggggatactaatgtctcccacaaattctgaatttgatttttagaggagattaatttgtttcttaaataagtaatcacatcagatttttaatcattttcacttattaattttcaaccacatcatatatatattatggaattaataagacaagatatccatataatattaattattatttttgggttcgagtcctttttaaaaaacacttatgccaatctttaatccttgaaaaaatgagatgtaataacttttttttttgggcaaaaactgagatgtaatatgtaataactaaataaagaaaagtgtacccaattgtaataaattgttaaccttaatcagacatgaatgaaaaattagtcatcaccggtccaagaccttttgactttgggtccagtgggaccatcttcttcaagcacttcacgagggattttgttaatcagatttctgaattttttccgcaaaagtcccggcaatgactttgcgataccttcaaggttcttttgaatgtcatgtgggacaagtggtccccatttcctgaaatagttgagccacggtggctcctgaatccccggtcctgcaaccagctcataagcaacacctgcgtcaaagaatttgttacttcttgccatgtcgttccttatgccgtttccgtcatcgccttgcaacacaagtcctggttttgaaaacattgcgtgtccgtgaagagacgagtagctcacaagtttgtttccaccttgaaactcaagatcgcatgcctccactagagttcccccactgtgctcagagaagtatgctcgccataactctccgttgaagttgctgatgcgcaacgtaacatgttcccagtctccaatatgttcgccgatatcccccagcgacaggctcttgaagaataaaaacttgaggcgggcgttgccgttgaaagggtagaatatcacacgacaatgtcagtgaaagtgcctccacacattggtttgatgtgtagatacactttggtgtgtcgtaagtctcccctcttcacccattcctgtgcgttgttatcagccggatagtctaaccacaatcctccatcatcctgaaccgccctgcaggaaggtttgaaccgtccggttgcacagggacggggttggattcgttgcctttctggaataacagggcaccattggagaaaaaccagtcgacagaggaagaaataaaatcttcatctggatgcaaatatatccaaggagaatacgattgaaacaaaacggtagtttgattatggcttggcatgctagacaagtcaaattttgtgtttttcaagcaaaacagaggagggggaggagggatgttcaatggctggcagctgaatgtccctgtgtgtacacctgttgcttctgttcctctgttggccggtctcaaactagacagagtcatttcttctgtcccccaaacccatgtatcggtttcactctgttccgtaagatcggatcgaacgcagcttatagattcttgacttaaagatggctttataggagaagtagtgacatatagaccaaccgcttgatatccattgggacataggggctgccaaaaaaaagcagccccttcttgg

SEQ ID NO: 30484 - DNA, 3551 bp, Arabidopsis thaliana landsberg
acgatggaagtttggcacacctttctctcctgccaatatttcaataatgatggagtcgccacatttttgcaggtcactcatcatggactcatgaggtcccttatcatttatgtcttctttccatttatcactcctttaagatagaagtcagagtctccttaaattctcatttcagtatttctattcatttgttttataaaattatttgtgtaaaactgtaaagtaaagattaaagttaaatcaaaattaccgtgattaattactgtaatcatactcataggactatgttaaataattggtttacactttgtttttgggaacatatgttaattttgatgaaataaaaactatttcttaaactaggtttccaaatacatgaggtttttggatttttttttatttgtgtttcttaaagttttttgcgaagttaaatttatttcaattttttattattattgattatattattttaaaatgaaattgtttaatgtaattttttttgtatgtgtatatatatatataggataaaacatatactatataaaagcgtataaaagtgagataagagtgtgtatatatatgtatatattttttttttgacagcaagataagagtgtattaagttacaaataaataaataaattacaagcaaattaagagataaaaatatcgtatttattacctttaaatatcaaaattttctttttaagaggaagagtaataaagcaaagcattgaagcagagaagaggaaaaaagctgtgactttcatacattactctccctctccatctctctcgttgtcacatatcagtatatcacaaaacaaattgcagccattcacatctttctcttccatctctcaacattctctctctctttctctctgtaaaatggagaaaccagtgtttgcaccatggcgttccgaccaagttttccggccaccggagacaccattagagccgatggagtttctctctcgctcctggagcgtatcagctcacgaagtctccaaagctctcactccttctcagcaactcctctcaaaagcctcaatcgaaaacaccaccgtcattctcgaagaacccatcgccgccggcgagaccgaaacggaggacaacagcttcgtctccggaaaccctttctccttcgcttgctcagaaacttctcagatggtcatggatcgtatcttatctcagtctgtaagtgtttcataacgctttcctaaaaaacagagcatttgcagacaaaaaaattctgttctgttctgtctcaattctcttaatttcgtcaatttgattctatgtttactcaattctatcgatgggtcattacaatttcatgagttaagcacgattttggtctaaagatcacgttttttttttttatctttcgcaattctcatgaatcatgaattcttcagtgggttcaacgaagttgaatttttcatgcgcaatgatttgtaatcatatatatcatccttaataaaatcgatatgattttctaaaacactcacctttcatgggaccctataacataatcacaaaaaaagtttggagttttcttcaagtcaaaaagctaacaatttcactgttctttctttgtcttctttcttaattcttttgccataactttaaattatgttattgcagcaggaagtgtcgccacgaacatctggtcggctttctcatagcagcggtcctctcaatggttctttaaccgacagtcctccgatttcgccgcatcaagtcgacgacattaaggtctaaaacattctcataatgtttggttctttaatctcgcttgctaatgtgtgactctgtgtttaattagtatagtaatatttttgatatcttcgatgaagattcatggattgttggctgttgcttattaaattattgaagtgtattttaatataaagcattaatctttactcgatttggtttcttcttttgttttatccgttttgttgtgaattaacacagaatctgattttgttgtgttttatttgctctatgcagcaattttgccgatcaaacaacaatttcaactctcaataccgttcaacgggaacaactccgggacctatcactgcaacaactacacagtccaagacagttggacggtggttgaaagacaggagggagaaaaagaaggaagagatgagagcacacaatgctcagatacatgctgctgtatcagtagctggtgtggcagccgcggtggctgctatcgcggctgcaactgctgcttcgtcgagtgctggaaaagatgagaatatggctaagacggatatggctgtggcttctgctgcaacacttgtggctgctcaatgtgtggaagctgctgaagttatgggagctgagagggatcatttagcttccgttgttagttctgctgttaatgttcgatccgcgggagatatcataacattaaccgctggagcagccacaggttcttagagtttgttttagaaattgatactatgtttctagtgaaaacatgtttttgcttgagtgccatttttgttttgcttctggtgtagcgttaagaggagtggctacattgaaggctagagctatgaaggaggtgtggaacattgcatcagttattccaatggataaaggaatcaatcccggaggttgcagcaatgttaatggtaacgggagctatgtcagctcaagcagcagtcatagtggcgaatttctagttgaggataatttcttgggacattgcaatagagaatggcttgctcgaggtggccaacttcttaaacgcacccgcaaaggttaaagcgctaatctattaacagtgtttctcttgttatggttttggatccattttcttaactaatgttgtggttttggtggcaggtgatcttcattggaaaatagtttcagtttacataaacaggctaaatcaagtaagattccttcttgagcattgatattagtgatctgatgaactttggagagaggaaagaaagattaaagtgagatacattattagtgaatcagtggaaacttttttaagtcacctacatgagtgtgattttgttaaaagaatagaaaaaaagaacatgaaaaagtgatttcagagaccaataaaagaagagaaagcaattttgtgaatgatgtatatatctagtaatatgctttagtctctgcttaaaaccatttcttggcatcattcttatgattttgatttggttattgaacatgaaggttatattgaagatgaagagcaggcatgtaggagggaccttcacgaagaagaacaaaagtaagagaaattcttacccttattatgcatacacctagtagaatcttaatatattctcatagtatactaatgtgacataactaaaggtgaaagctttaactttgtcactatctactaatactatcaataatatgagaattcaaaactttgatgtgggtctactttgaatatggggatttgagaagaaaagcaaaagggttttgggactaaagtgatcagaggatcaaaacaaaaggagacgccatctttaacttttttttttttagtgtgt

SEQ ID NO: 30485 - DNA, 3279 bp, Arabidopsis thaliana landsberg
ccttgctatttgcatttgcttaatacagatccatcaagatttagactcacacatgagacatcatttgtccgagaacatgtcaattcttgggctagcaataaatttttcttctacgttgtacgtttatcttaaattctaagtgttattcttgctcaattatcgtctctaatctaatggaactagaggttaattttcagatgtgcttcttccgtcaaatacttagatcagtgaggaagtctgattacttgacaatgcgacatggattcattagtgtgagtgcattaatatcttacattaattctccattaatattcaattgttgttgctctaaaaacctatgcaattaggttcatttggcacctggtatgaagtttgattttcaaaagtacatcaaaagatctttggaagacgacttcaaggtggttgtaggaataaggtaactcatatcctctttcacatttttagtctagtttgctttatttatttctaatgaaatctaccactgatgatgacagacccgagctttgggcctttgtaatgttgtttttactcttcgatgttcacggttagtctttagtttatcgtacttctacattatgatatcttgacttactaataattgatctatatataaaaacaaaaaactttataggatggtatgttactgccgtaatcaccatgattcctcctttagtaagtcattaatttatctactatacgaagctcattcttacttcaaaaagattaaagaacattttatgaactaattgtggtttatgtttaaagttaacactagccataggaacaaagctacaagccattatatcgtacatggcattggagattcaagagagacatgcagtaattcaagggatgccagttgtcaacgtctcagaccaacatttttggtttgaaaaacccgatctagtacttcatatgatccacttcgttctgtttcaggtgaaaattcatataagtgaatgatatatgtgatgttttagtgatccgaatccgacaccatccgaaccaaaaccgaaccgaatagtcgtataatccgaacggataacaaactccctcatccgaattatccaaactgaatccgaaccgaaatccgaatgcctaagcctatgatttagtataattactgattttatttttttggatacttttcagaatgcttttgagataacttattttttttggatatgggtaaacttttcagaatctcttcttctagtttttactttatgttggtactaatgcttctagaaatttttataataatgttataattattcttgttgcagtatgagtttgggctaaggtcctgttttcatcaccattttggccttataatcattcgtgtctgcctagggtgagtaatagtattatcataaacaattttttttaccaagttttcgatcgagtttgtgaaaattgaatatatggtcttggctttagggtgggagtacaattcctatgcagttatatcacattgcccctttacgctctcgtcactcaggtatgcaacatttatatatctttttttcctttgaatgttttcatagagttagttcttttagcatggcataattcttttacaatatatattttatagatgggatccacaatgaagcgatcagtgtttgatgagcaaacttcaaaagcattagaacaatggcataagaaggcgaggaaaaagaatgaaaagtgagaataattggcttctccttttaatctatggatagaccaaatttaacagtctaatagtttggttacttaatagtctatacacaatttttggaaaataggatttagctatgtaattattatttattatataaattccttacgtgggtttaatttttgagttgattttttctctacatgtttatcatgtcctatttatagttttgtacaaaatagttttggaaaggtagaatttttatgcatttgtacactttagagttaatatataaaagactttcttagaaaagaaaaccagaaaaaacaatacataacattagggaaaattagttgaaccaattcctgaaatttaaaaatttggtaaaaagacatttgactaatgtttgttgcaggtaaaatttgaaacccttaaaaaataatatacaaaacataaataaacaaatgcatcttattgtatagtatgaatacctccaagatcaactaatgcaatttcacatcagggttccttatagatttaagccacatatccgccattactctagatgacaagctccacaacatctcctcttcttcttcttccttctccttcttctttatattactcttcttcttccctttctttccctttccgtgttccacaagccattgcgccgcggtaagcctccgcttctccgccgcatctttcttcactcccccaatgtgcaaacttcctacctttaaccctttctcctcctcctcttccgcttgtactgctaccacaactgtccctcctacagcctcatatctccttgtcgggtcacggagctgtactgtcgccaaaaccgttagcttttgctgtgtgcgatgctccttttgccattcttccagcggaatggtcgattcaagtggattcttctgacctttcgcagccgaaacctcgaaaggagcttcatcatccaccatgtcagcttgaatcttaagtccttcaacaaccatttcctctagtttctgtaaagagacggctaaaacctcctctgccgaagtcaatggattctcctccacattccatataccggtcattattctctcccttcttccgctgctcatcgcgttagccattgttttaacagctgcgacagttcgcgctgcgctcgtgttagctctctctttgttcctcccttgtataatcgctgacgctattccttcaaaagccacttgctcccctgttttccccattagctcatctatcgccataagcgaagatatctttgactctagttcctcacccgaacccgccattctatgaaatagctcgaatccagtggctggtccggcttctggtagtacctgtaataaagatttcagattcctgttgttgtaggattcttttgattatgtaaatattaattcaggccttaccacaatctgtttggagatttgcataacaagcttaggagtgtctttcctcatgaccaccgtgtcgaaagggttcatagagactaagtaaccaccgtctcgtgtctgaacaacgcaaccaatgcctttaccgagatccgagaggtaattctccgattcatcgtctacggattcgcc

SEQ ID NO: 30486 - DNA, 1635 bp, Arabidopsis thaliana landsberg
tgatatttcgtttctgggttgttgagattcattcaaagttttatacttttgatcatttttaccccaaaaagagtcagaatctgtgatcctctcctttttatcttgaggagaatctagggctaaaggattggtcttttatggtgcagataatgaatgcattgagacttgtaaaccaaacgttttgaatgtaagtgaaaggagagaattgatccacgcattgtctaaccagcctgaagaagcttcggagcttttgaattcatggagcagaaatgagatcatgaagatcatatgtgctgagatgggtaaagagaggaagtacactggtcttaacaaaccaaagctcatagagaatcttctgaatcttgtgtctcgtcctcttggagagacctcttgttctgaccgtagaaactcgaggaagaaggagaagaagatgatcggttacatcatttgctgtgagaatttagcttgtagagctgcgcttggatgcgatgatacgttttgcagaaggtgttcatgttgcatctgtcgtaagtatgatgataacaaagatcctagtctctggttaacatgtagctcagatcctccatttgagggtgagtcttgcggattctcgtgtcatcttgaatgtgctttcaacactgaaaaatccggtcttggaaaagacaagcaaagtgagggatgctgcttctattgtgtctcttgcggtaaagcaaacagtttgcttgaatgctggaagaagcaattgacgattgctaaagaaaccagaagggtagaagtgctttgttaccgtcttttcttagtccagaaactattgaagagctcaactaaataccgaaatctgtgtgaggttgtggatgaagctgtcaagactcttgaagctgatgtgggtcctctcactggtcttcctatgaaaatgggtagaggaattgtaaacagactttattctggacccgatgagcagaaactttgctcttctgctcttgaatctctagaaactatagcaactacaccttctgatgttgctgcattaccttcacctcgcagctccaagatgcagcaaggtcagaacttttgtacccttcaatgattgagtaatatattaagtttgttgaataatgttgattctctgattttgtttcgtagattgttcttatgtattgagcaatgagatatctgcagatacagcaaccacaggatcaaccaagatcaggttcgaggatgtaaacgcgacttcacttacagtggttctcgcctctaatgaaattccctcacctccaaacatcgttcactacagtatttggcatcgtaaggtaccagaaaaagattacccggagaaatcgacttgcacattgtttactccaaacacaagatttgttgtctctggattagctccagcttctgagtactgcttcaaagttgtgtcctatagtggaaccagagaaatgggcgttgatgaaatcaatgttttgacacgtagcgctgaagaaggagcgaattgctcttcggcagtggaaagaagcgtaagccctctcacaaattgcagcacattgtcttctaatccttcttctgttgaagctgagtccaacaacgattacattgtcccaaagaagccatcttcaaagaacgaagacaaca

SEQ ID NO: 30487 - DNA, 3757 bp, Arabidopsis thaliana landsberg
  unsure (1)..(3757): unsure at all n locations
agcatcccatcggagacaatgggagcaccagataaaagagtgccaagtccaatactacaataaattttacaggattagaaaatcaatttatttcatgacaattaatgtatcaattcaagaatgtatgcaattctttcggacaataaacaagaggaaccaaccctggaaatagatacatgttgtttccctggttgcaatgtcctacatgaccatttcctgccacaagaaaaggtactaatatttgaaaaagcctcatataaaatggcgtatgctaaatgatacagaggtcctcatacataccaaattccacattcttgaatgggcttccactcgcaaaaatcatattttcgcctaatatcgaaaatgcatcttgaggcgtgcattcagctgttattcaaaacacaagtacctattacatctatccaaaaaagaatcacaaataaccgcaaaccacattttatggcaaagaaagaagacaaattaccattttttgtggggtttgacattgcaaatatagcaggccttgtcgaggttgaacctttcattgcttctaaaaccttcaacacaatatcccaacaatgacttcaaaaatcaactaccatatgtcagaatcatgcaagcaatgagctatgctacattctactagctcactcatctacttagcagttaccatggaaaccagattatgaagacagtggtcactgaagaaatactagatttcatttgcgcgctcatctaattagttaaatcactgattctgttgcatagcactagatatgtttagccgtttggcagctttcattacctcttttgagaataaccctccaactgctgataaaccaagaagcacatcaggtttaacttcacgaacctagcacagatgaaacagaaaaccgttgtttcttgtcagtattaagcaggcaaacttttttaagggagaatttctctccaacaccagactcattgccaaattagatttagtatacttgatgaacatattgatagaaagaataacagaccacttccacaagagttgctccttcttttaatccctgacgctccatttctttagtcttcctagcaaaaggctgagcctctgggtcaatattttcccggccttcggtgataagaccctgatttaagtgcaaaaaaaagagttcacaacttcagctccttaagctattggaccaaaacacacgcccaaaaaaaaaatgatgatgaagtgatttcatcagcagtaaaaggaaaccagagggaaatggcttgactggctaaaacgtcttatcagctccctaatctgaaaatcaattactccactatagaataacatacctgcgcatcaaccacccaaaattgactttgtgcactatcaaacgcagtttcagtatttcccaacattcgtgccattgtcttcctcgcagcatttagaacaccaattcccgcactgaagaaatcaaagatttttacaaggaagctcagtattctaatataagtagtctaagctaacttatgcagtgatgcagctgaaagttttcattttaaatctcttcaaacattactcaaaaccaacaaataaacgaaagatccctgaccaacaaataattaaacagtaacagcaagaccaatcttttaccaataccaatttctggtaaactaggaccaggaaagacgagaaaaacaccaaccgagaatggcttaccttcccgcgccagcaacaacgatcttcatctttgggaaatcaatcataggtcgcccctgtgctctaactgctccaagaagaccagcgatagcaacccctgctgtcccctgagcgagatcatgaaaacatagaatgaaaaacaagattctagtatcagcatttagatttcgagttcccttcgtcagtctctttaatgcatctggtcgtataaaaaagattaagaataactattgaacgataagatgatggattgagcacagaaaatatgatacttttataaatagtagtgactaaaatgctctaaaaatagtaaaaatactgcagaaataaataaataattagtatttaatcttcacaagaatcgttctaaggcggaagactcattacctggacatcatcattgaacattcggtaggtgcatctatacctctgcaataatttgaaagcccacttgctctggaaatcctcaaactgtgggtagaaaaaacatttaagtttcataataagaaacatttgatataccagagatctatgaagcatcggttacctgcacaataacatgtggccaccgagtatacactgcctccataaattcatcaataacatctatatagtcgtcatcctctaaacgacgttgttgcagacccaagtctgtcaaaaagaaaacatagaaagaacgattacatgacagataataagctattctcgttcatgtctctgaactattggaaatccctaaaccatgaaagacaagaataacatgtcgtacaaccaaattttatgacagactcctgcagtatacagaatactataaacctttgacctttcaatatatgtatatatgcatacacaaatctcaactacacattctgtcccatcctactaaaaaaataatatgcattctcaacctcaatatgtaaagagacagatgatagatatggttcaccataataaaatatcaaacctcagtaaacagttatactaattatatattttcggaaagaagaaaaccgttattaacctattataatcagctccaataatttgactttaagaaggtaagaggagcaaatgaatcttacacatggggtcgttgcgtagtttttcattgtttgttccaacatcaatcatgacaggtagtacctaaaccagcatgtgcacataagtattgtatcacatcatacagaaaaatggagatggggaaaataagaaaatattagatggtgcaagtannnnnnnnnnnnnnnnnnnnnnnnnnnnnnnntataaatcaagcttccctacagcaattccaattccatgaacacctagatctccaagacccaaaatccggcttccatcggtaacaacaatcatatcaacctaaatgtatagcaaaaacgttacatcagaaaactaatggtcacttaaagatataccagttcctaggtatacaataagagaaagagggtagaacgcattggattagtcagccaaatagagttgagatatcttaagcacagtgtcagatatatcgaagaacctgctcagctggccagttgtaaaccatggacatcatttcaccacgatcttcagcactaaaatacattccccttggcctcctaaacaacccactgtagttctggcagacaagaccaaccgtaggagtatagactatcggcgcatactcctcaatattgttaatcaaaacctaaaagcaacgtaaaaatcgaagtaaataacctcttcagaaactaaaaacaagcgtagtaaccaaaatctttcacagcaaatagaccaaaaaaggaaaacgagttcgccttatagtacatagtctcatttcggtcatgtaaccgattaagaatccgccatttagccaaagcattaggatcagaaggtccatctctagcttgctcctctaatctcttcaggtcagtcactgttatatcaaaatcaatcatgtcaacaactaagacaacaacataaacaataaacaaagtttcaacaaataaaacttactaaaacgaaaaatctgttgctcagagtccataccattaggaggaacaagacctataaaat

SEQ ID NO: 30488 - DNA, 1561 bp, Arabidopsis thaliana landsberg
aatagtttttcatgcggagaaaaatttattggaaagttgaggaaaaaagaaattcggaatgaaactcaccaatatttcaactatggaaccttatctctttttcggttagaacaaaattaaacataccatagaaagaaaagaaaaaacagctaaatacattttcctccttttaaaaaattaataatttattgctcatacatgttaaactatttgccaaattaatcccaaaaatgtccacgatccatcgctaccaaaatttggcctcagtcgaataaaaaggctgagttaatggaatacgcattattgccttagccttaataagttgtgacgatttggtcaaactttcgagaacggcgatgcttattaatagtgtcaaagttctctcctccacattttctctaagactatccatttcttgttgtcattaacaaaaaaaaaaaaaaggaaagacgcctttgctctgaattttgaaatgcattatctgatgaaactcttcttctccctctctctcttctttggtaatttactataatctcatagcgccttatatcactagtggattctgtaaaacctatatgtatgaccggattattattattttgttatttgtgtacatgtagtagggatcaatggagcagtgggttcaaatcagccttcccaagccaataaaaatccaaagctgtttgtgttcggaaattcttatgctgataccggaaacatgaagcccactgcattgtcttggaaacccccttatggtatcactttccccggtaaaccttccggccgttattctgatggccttaccgccaccgattttctaggttctactctcactctcattcttaaaacgtcaattgttcttaatgtttctctacatgataaatataatcaaacataccaataagaaagttctatatataaactttcctttctactattctcacacattagaaatttatatcataacgtctatatcgtttgaacattaatatacttctaaagaaaattagcatgaatttactaaagttacaatcttttatgttcttcctcaaattcattaatatagtataattatttattgaatttgacgtcaacaaaaaaaaaacttacttcgtgcagcaaaacagttgggagcaaaattaccgtacctctggagaactcacggaaaaaagaaagttaaactaaacagaggaatgaattttgcgttcggagggtccgaagtgtttgactctccggttgatcgatcgccaaacatctctactcaggtgggtttcttggttaaccttgcccttgcccgccgtgtctacactatcgacggcgaccttgcttcctcatacgctctcctcagctactccggcaccgactattatggtttcatcgaccaaaaccctaatatggctgtaagaaaacattcatatttccttaaacgacactagtcatgcctatcactacttatgctaagatttcgatagtttcaaacgtaaatttctctgagtttataagtgaaataaaaaagcaattgaaattagatatcccaaaaaaaaaaaaaaaaaaaaaaaaa

SEQ ID NO: 30489 - DNA, 2600 bp, Arabidopsis thaliana landsberg
tagccctctctgctcaatatcgtctcaatcttcctattgttgttaatgaagctaaggtactacctacaacaatataacaatcttcaacaagatttttggaaatgaaatcttcataagttctatattgatatttgatgtagcttgatacaaagttgttaacaagatacttctccaagtttccgcgtgatgatcttcctcatttcgctgataaggtaactgctctgttagtccactatgaatccattaaattgctttcctctaacaaatatataataatctgatatatgtctgtcttgtcccttgaagtatataatattcagacgtgggtttgggatagatcatatgaaagcttacttcttcctagccaaaatagatacaatccttgtccgtatttggcactttctactcaccatcacatggtcagccacctcgcactcttctattgctgtgtgtgtatatatatatatacctcttgaatgcaatcaaaatgcaaaactttagactaagaaattctctgtttcagtttaaaaagacttgtttatgggaagaagattgatgtagggttgtcagagcacattgatattagtattgaaacagagaaggatagtttatacatcgaaagaatccgcatagagaagctcaagctcaggttctcaactaatctttatctaggcttagctgttacaattatatcattgacttgtctctttgtttctgatcactgattcagtctctccaacttgatgaaaaagataaccatccaagagcccacctttgagagaatcattgtagtatacaggtacgaaagcagagcagtagtgtgatatttagagggttgtgagtttttgatctctcatcttgggtttggattctctctcacacacacaggagagtttcagggaagaaggaatcagaaaggaacatatatgtgaaacactttaagaccattccaatggctgatatggaaattgtgcttgtgagcatccattaaaccaacactttgagataaaatgtatcttagtgattagagattaactgattgctcataactacacagccagagaagaagaatccaggtcttacgccactggactgggtcaagtttcttgtctctgctgccattggactggtcagttctgttacattattcaaaagacagtgagaaatgtggtttatcaactctgattttacaggtcacagtggtaagttcagtgagcctcaaaaaagctgatatcagagtcattgcagccatacttagcacagtcgttgcctactgcgttaaaacatatttcacgtaatctacactcatattaacgatacctttatccacttttgtcactatatcctgaatatctctaaagtatatgtaaatacaggtttcaaagaaacttggtagattatcaaagtcttataacaagatctgtgtatgataagcagctagacagtggaagaggtactctgcttcacttgtgtgatgaagtcatccaacaagaggtgctaattatcccctgttattttttatgtcgtattctctttctttttttgcttacaaactgataaaatgcaggttaaagaggtcatcatttcgtttttcatgctgatcaagaaagggtgtcccacaagcaaggtatgtgtactctgcaaatttcttatatgaatatacgaaagccgcatacatgtagaggctgactcaaaagatgcaatgaaaggaggagcttgacatgaaaagtgaagcattcatcaaagaagaatttaacgaaagctgcaatttcgacgtggatgatgctatcacaaagcttgagaagcttggacttgtatctcgtgtgagtcccttgctatacctctcttctaatcagaatgttcctctgaatatgttcagttaagtaaatattgtgagggctggtcaggattcagaagacaagtatagatgcgtggaaatgaaggaagcaaacgagataatggggacaactacggaagagatggtactcaaggcaagacaaggtggagaatatgaagacgaggatacaacagcgacagagcctcaaatgaatcctcaagatgaacttacagcaaaggaggaacgttttcaatctcggtatgatgagtttgagaccttgtggatgtaacaaagatttgatgtcattcaagacccatagatttaatattgtaaaaagacacaaaaaagagagtacaaaaacagtcgaatagacctgtccagcacatatcacatcaaatgaattcttccttaattattgcgtaaacatataatgattatattatataaaacataagacaggattaaagttttgcgtaggtaggtaggcagatagaaggcaagcgttctgtttagagaggaacgctgtgcaagacgactgtctcaacagtgagacctggtccgaaaccaaacaagacaccccactccaacccttctcctgtcgtggccacaccatccttagctgacttcctcctcatctcgtctagtatgaagagaacgcacgcgctcgacatgtttccatactcgctcaacacgtgacgtgtcgccctcatcttctctttctttagtcctagctttatctccacctgttctaggatcgctggac

SEQ ID NO: 30490 - DNA, 1389 bp, Arabidopsis thaliana landsberg
ttttacataactgatgtagatcattcatcatctaatacaacttacaaggacgtgaaataagcttggtggtgggagtctctaaggacttcttaacttaccctttgtgtttgtgagaaacagggttctacggatagctagaatgagaatccatgtcgttgctgtgattttctccttgatcatcaatagcaatgctgagctcaagacagtcttcaagatttgagcctgcaagcccttaaagaaccctaacattccttcttttctccatatggcatacacaacccctggaattgttttccttgttcttcttctcggcttctttgtttcgttttccttcgactcatccgcagcttgaatcatcaccttgcacctgcaaaattgagcccaatatgatgtctgactcagccaaagtcttaaaattatgtgacttgagaagttcatctgagccagaacgttcactagggtgaaatcaagaatactagtaatctttgtccaacaggtaaaatacctgattgctggatatgtgagcacggtggcaacacttttggagaccgcacctaagacaaacgccataaaggcagagagcactaccggagaagaaccattctcggcttttgcatttttctgcttaagaaggtgctgtttcagctgatcaaacactgtatactgcaaagagtatccaactatttcagccagtcatgttgtcaagtgacattgaagtgagctactcgagtcgatagctcatggctttacatgagaaatgtacttataatgctggattcgaggtcaataaaagagaaatcccaaggccatcaaatgcatttccccatgaaccatctgttagtgtcttccacaaccctttagattttccaaactcgcttgtttgcatcctcgatgaagctgtatctagaggctacaaaaacatacaacttaaagttaagcaaagcatatagttttgaagcagagctgagtgcaaaaaaacaaaaaaaacgtacttgagtcaaaacagaggtacaagcaccagcagcagcagcaatgaggagattagcctttgttccaatagacttagaaccaatcctttgggaatgtaacctcttgaaatagctataactatagaaatagatgaaggacgaaataaaagactgcaaattgttagtcccaaggccttgatacaaggagagaacatttcctgatgaaattgcttcccaaaacacatttgacagatatctgtaaacatcacaaaaacagctttaggtacctcaatattatctaatgacaatcacatatgaaccattataatacctaaaaaccttaaccaaaaatagtgattcaaaagcttaagctcattgagcagccttgatcagagaactgaaattttcgatttagacgagg

SEQ ID NO: 30491 - DNA, 227 bp, Arabidopsis thaliana landsberg
tcccatgtaagctattctgatgaagtgccctacataactcccaccaaacttgaattaaacaaactacttaaagagaccaaaatttagcataagagccaaatctactactcacagtctctgcaatcgactaagcttcccaatgctaggagatattatccctcctagttgcatatatggtaagtttctgcataatccacataagaagaacataatcaggtaaagaaata

SEQ ID NO: 30492 - DNA, 2541 bp, Arabidopsis thaliana landsberg
gcttgtgtcactgaccttgataaagctttaacctttgtagagtacgcgttggaggaacgcacaacgcttctcttatctgcttgcttgcaggtgtttctgagagagcttcctcagtctcttcacaatcccaaagtgatgagattcttctgcagttccgaagcaaaagagcaattagcttttctgggttcagagtgtgtgttcctgttgtactacttcctcagccaagtaggcatggaagagaaactcacgacggacactatgctgatattgctagagagaactcgagagtttgctcgtacaaactggcaaaaggctttgtctttgcatcaaatgggatgtgttctgtttgagagaaaggattacaaagcagcccagtttcatttcagattagcttcaagcttagggcatgtctactctttggctggggtatcaagaactgaatataaacaagggaagaggtattcggcgtacaggctcatgaactttctcatctctaatcacaagccacatggatggatgtaccaggagaggtctctgtacaatgttggagttgagaaactaaaagatttagcaaccgccactgaacttgacccgacactgtcttttccgtacaagtacagagccgtaatgaaattcgaacagaagcagattaaagaagccttccaagagattgatagattaattcagttcaagcttagtccagaatgtctcgagctgagggcttggctgtgtttagccactggtgaccgggagagttgtttgagagatcttagagcagtgctgtctttagagcccaattatgttgtgtttggtgggaaaatgagagatcctttggtggaggctctgaccgaacaatgtatagaagtagagagtgaagcggattgttgggtgaggcttttcgatagatggtcagctgtggatgatgttgcgtcgttggctgttgttcatcagatgcttcagaatgatcccagcaaaaactttctgaggtttagacaatctcttcttctcttaaggtaagaagaatatcttttgtttctctggcaacctgattggtgaattcttcaggagttgacggaagctacatttttttgtgatctgtaacagattgaattgtcaaggagccgcgatgaggtgtttgcgaatggcatggaacttggctacttctgaggcagaaaggttggtctacgaagggtggcttttatacgacatgggttatgtggaagaaactcttactaaagctgaggaggcaatctctattcagcgatcctttgaagcatttttcctcaaagcatatgctctagctgacaagaatctcgatgcagacgagatctcttgtgtggttcaggttctagaggaagccctcaagtgtccttcagatgggctacgcaaaggacaggttggcattttgatgtctcgcctttctctttctcttattcacactgtaatctgattagtcgttttgttatgtttctgcaggctctgaacaaccttgggagcatctacatcaatttggggatgctagatcaagctgaaaccgcatataagaacgctatagagatcaaacacactcgtgcacgccaagggctggcgcgagtttattttttgaagaaccaacgtaaagaagcttgtgaggagatgacaaagctgatcgagaagtcgtgtagcaaagcagcagcctacgagaaacggtctgagtactgtgaacgtgaaaaagccaaagaagatcttgacatggccacaacactcgaccctctgcgaacttatccctacagataccgagctgccggtaactaactcttcctgttctgtattaacatcttataaattctagtagttaaagaagtgatcgtatgtgtggcagtgctgatggatgatcagagagagacagaagcagtggaagagctgtcaaaggcgatagctttcagaccagaactgcaaacgctgcatctcagagcagcatttcacgaggccactgggaatctgtcattggccactcaagactgtgaagctgctctctgtttggaccctaaccacaccgagacgctccatctctacagcagatccaaggatcaagcttcttccattgacaacaccatttttggcttagattaatttgaaggtatcaaccatattatcccatttgtatatttcattgggatcttataaatagatttaacttttattttcttcttctatacatggatgctgtaaagaagctgccatttattaatcttaccaatggtttctatgcaaaaccaactttttagtatatacagtaaagagtcttttaatgcagaggaacaaaaaaagatgatcatcacttcacagtgtcatttgtgtatatatacaggggacacctaaaaggacggctcctttctctttagtttccttctgtggatatgatctccagctctgtccaccaccgtggagacagcctcggcattgctgcgtcagcttctattccagttatctctctcgaatttcaccacaacctctctcattgtcggccgctgatctgagtatggattcaaacactgccta

SEQ ID NO: 30493 - DNA, 1274 bp, Arabidopsis thaliana landsberg
aagctcttggagtttaccaaagtagcaatttggcactcggacgaggatgaaaccaatagcccaagaacgagtgtttggtctagagatggtggcagtcgggtattaaaaatggtattggtttattatacatgataaaaattaattcaaccaacgaaaacaaatactgaaaaatttgaatggttataaattaaaaaaaatataaattttgtctaggaggttaaagaaaaacaaataatatgaaacaaatgaaagtgtctaaccatcttataaaaagaagagtatttataataaatgactatagatttgaaaagaatgtacaaactaaccttgagttatagtatcttgtcggaaacatgttggagaacacgtgtaattacgtaaatgtcctttgtaacatgttatttttccgaaatacatgcgataacataatatcctctttttataaaaagtataaattatcaaaaaaatatataatttttatctagaagataaaaaaacccaaagaatatgaaaaaaatgaaagtgtctaaacatcttataaaaagaaacggatgaaatataatcctttctttttgttttacatcagcaacataaatatttgtatgccttaaatttttgatttctataaaaatatcaagaacaaaaacggtattcctgtgtttcaaaaaatatttgtatacattttgtttagtaaataatgataaattctaaacttcaacaatgaaaattgaaatattatttgcttagagatagaaaattgttaatcgcaaaagaaaaagcatttataatcatattttttatttgttcctttttaatatgtgaaaatcttgaaacttggattacttaggaatatacttatatgtaattttaataatttgtaaatctgtaaattttatagtagaaaaatcatatacgtattagtaccagatttaaaatcatcaacgacattaacacaatgaaaagttattatttaaattgaacatttttaagatgataaaaaacaataaaagaaatgtacgtaattacgtatgataggggataggcgggtcaatcccgttttttaagatgtagaattttcatataaatcgattttctcatacgttttaattttattttttacatttcgcaacttttataaaacgtggcaagaaaactcggttttattgaaaagaaacaacaataagagaatgattggaatagaacccgtaatctcttcacgtgcatgcaccctcctagctacttaacagaaaaatccactgtctttgctgacgtgt

SEQ ID NO: 30494 - DNA, 769 bp, Arabidopsis thaliana landsberg
tctaagcagtcgaggatcaatctgttaagctagaaaattaagatcacatggctttacacaaaacttatagccacagagaaagacaaattgtaaaagaatattcttactgcctcaagccagtgctgcaaagccaacttcctagctttctcgtcctttgataagcctttaccaaccttagggataaaaatggtcaaatcattatataaagactggagcaatgggaacgaaaacgggtgcatcaaaccaacatagttgataggcttgatgttaccttagcagctcttgttcttgctctagaccagcgtgaaactgcagtctcttgcttctcaatttcaaaaaacgatatagaacttcttttaagttcagcaaagtcaagtaccttccacctgcaaattccatttagttactactaaacagataattttatcctctctatatataccaatgccaataatcataacaccacgaaccatctttgctcaacgactacagcacaatcagctagccttcttctggttcgaaaacttctataaactttctgtaactttaatgcagcttgatatgttccatcacctaataacaaggctaaaaattcttttgcatgttcgttttcgcaaacaggtttccatatccgcattttatatctatcatcttctttcataaaagttaaaggtttaatagagaaattgttctccacatctcctggagaaattcttgatcgttgtgtccctttaccgctaagggatctgttgtataagcgctttctagc

SEQ ID NO: 30495 - DNA, 2564 bp, Arabidopsis thaliana landsberg
agcaactacatgaacagcaaaggggaataacgtgaacgcgtaagatggatttaagcacattgctttttgtgatcagaagggtaaaagaacaatcactggtttactcaagaacagtcaaaagactttatagaagcaacttacaagcaagtcacaactagctgtcttcttccaagcctcctaatctggtacctggatcataacttataaacagtcggaactcgtttccgagtttgctagagtgatgaggcttaaacacacaagggcgaacacccaatagctcagctgcatgttctctttgcacctctcctgcaagacgtgagatatctcctagttaataaatcataagatcatataaatttgacttgagaaaacaaaagtacccattgtacctgtgagaagaagcaacaatgaatctactgggcttgcgaggaacaaaattgtttgactaactctttccaggcattccctactctgccaagcataaacgaatcaagatcattaacacgctaactagaaggtactcaaagacatttatgctttgaagatagcaagcaatatagcacacaaaaacatcacagattaatgatatcctcacaagtcacaaatactcctacccgggaaatatttcaaatgataatcaaaacgcagcagagagccacaaagtatccatctttaagaagtgacactaagccatgaccataaccaactgatactccattgtaaagcttacactttttttctttcatcttgtctgcttttggactttctataatcttttaaaagaagattaatttataagcaatgcctatctagcagaagcttcttgaatgtcagaagttcagagcagattacacatcagtctctaaacctatctatcaaggggcagctaaaagatttccaaaattcccatgaaagaacagcatcggaaaagttaagaacttgaagaaactttaccaagtagggaggatctgcaacgattatatggaagcaatgtttcagctgaagcggcagatcttctggttcgttgtaatcatagaaagtgaactcttttccatatctctcgaatctcatatcgtactccagcaattgcacctgaagactaggatctcttttctgactcagcacaaatcaaaacccgtcgcacagaaatttagcatcaacgacaacaaaagtatcgatttttagcaaaacggattcgatacaaattaagggtactgaacaaaactgattaatagtaccttgagataaacgtagagagtagggcaagcaatgcaagcgactctgcagcctggaattctttgagagagagtgaccacttcatctgctacagtctctgcagtttcaggttcgtaccagaactggctgagtctccaatcctccgtaaccagctccactttatcggattcttctcctccggcgacggaagacgccggtggcgtgctcgcaacagtcttgttctggtctgctagaaattcccgaagcgccgccaaagcttgagaactcaacactagtggatcgtcatcttctacatctccgtctcgtggagctgaaacttgaccgtttaacttctggagctcatcttctttttccatttaagcttcggcgtcagaattccgggataaagtcagatccttcggaaaagagaggacttagcggacacagcgaattagagagggctagggctttggttctgcttgcgtttatacagaattttcataaaaagtccccaacttttgaatgttttctattgaagacatgaattgtttttagtgtctttgattggtaaactatttacagtatatattgttatgaattagaaaacagtagaaatcccataattagcttctgtgattttttttaatggtactttagggaaattattaaaaattgaagattttcttatgatttttgtttgggtcaaattgataatgttttattttctgggttaacataggaagtttgaatttttatagggacctagttttaaaagcgaaacattgacgccaaaattaggataaactgaggaggagccaacaaaaataacagagcgatcgtggaacagaggactctatttttctcccagccaatggaacagatttgcatcattgagagattgagatttcatgagaatctcttatatcagaaatggccgccattatcgttctctctcacgttcccatctaatcctagacccattcaaagcctcctcatttcctttttggctctgttgttttcttccattaaaagaatctcttctctgtttcatttcgtctcatgggttttgtttgacttccaggttctgcttcttcttcttcaccctttctatgtttttggtgattcgatgtaatgtctcaatgatggaatttggatatttgacattttcaggacataataaggaactgcttgaatctggtttcaagtgaaaatgggttagtatttgtgacaacttctatgaacgtttatttgaaggcattttgatctgaggcatatttgtattgattgtgcagagacaaagaccattcttcgatcaatcagttttaatgacattgactcggattcaacca

SEQ ID NO: 30496 - DNA, 3927 bp, Arabidopsis thaliana landsberg
  unsure (1)..(3927): unsure at all n locations
ctaagcaaattcctccacacctgacaagtgaatatttatatatttatcatgctaaaactcacaaactcagggttgagtagagtttgcgtttgctcaaaatttggatgctgagcacttaatgcatacgatgagttcaaggttgaaaatactgtgcggataaatgcaacggattacggttgaaataaaatgttagagagatacttacaaggtcataacccacaggaagtgcaaacactccattggtgttattgtagacagcagcaacatttgggggatggctaccaacgtgagctacatcacccactgacacgaatctggcaaacaacaannnnnnnnnnnnnnnnnnntcaacggctcaatgcagctacagcatcaccattagggtactaaataaccaagttaagaaataataaactagatttttggaattttaaatctcttttggctatacttaccccgctggacaactgggtctccagatagtgcaaactcctccatcttcagaatcctgaaagccaaaaaggaaataattgtaaagaaaacctcaaaacggttgatgtggggggtgaattatacatgtttcgtctcataaagttataaatcaaggattcttattgacatgtattgatgacaagggtttaagattttgatcctggtctccacctcttagcttaggctagaacccaaaattttcgagtgtcatcaaaagaaataaaatctagaaggcaagaaaatcagaaattttctgtactaacagggaaacccctttctaagctcaaagatatagattgcgatggaaaggaacttacctgctttttacacaaagaacatcgacctttggattctcgctcactactccagatttttgagaagttgatactatgtttgacaagctttttatcatctgagacagagcttgaagaagaaagttctctcgatttaataatagctttgtttttgtatgtttttgagtctcttccatcagcctcattccaagcaaaatacacatgtctctggcttgaaggaacctgcaatgagaagaaagaaaattcattaggtgtgttgcactggtatgagcttcaatatatgcataatttacactggttagtaagttatgtggaatataaaccagaaaacttaaaacatgttttctcattatatttttactataaaatagaagaccaaagcatcttgggagtagtaatttcaaatgtaaatttcacttgaatcatagccaaattatcaattctataactataatgagaatagtgatagcaataaccttgagcacaagatttttcatgttagactgatatgctttccacattttgcgcactactgaacagattcggacagcttgaggttctagtccatttaagtcttctggcacgctgcattttataacctgagcaaaactctctgacttccgaaaactcttcagatgcagtatgagatgcgagggcctttggctacctgcctttgccaattccaacgccataagttcctcccaaggcacatcccacatgatcttgctgggtttcttatccatcttatccagatcagagcactaaatggaagcaaacattcagttaataaaaacaattttgagacgctaatggaaaacctgcatgtgaaatcgtattctagttggttaaacctgtaataacacgactctcttgttggtcaccatgacaatgcgtttgtatggaacaaggaaatgctcttcatagcaatcagacaaagcaaattttgagggttccctgaatatttctgtacagccaaagtgccgacttgcttctgctagatgaaggagcatctgcaaaacgagataaccaacataaatcagaactagtttggtgagtggcaagcgtaactagaagaatgtaagttcgtggctttctggcaatatttcagtataacttacaccatatcgtataaggagcttagaatgtaaaactattagattgaaatattaaacaataggatagccgacttgtaattatgaagttttggaagcatccaaaatttctcactagtagacaagaaaaataagctgagccagtacctggcctatagcttccttctcatcatattccctgagtataccatcagcatgaacagcacgaggatttctaattctttccaaggcggtcctgttgctcaaaacctccaaacatctgctacaacttgctccaattccatcaacagtcaatgagaaaaaatctaatgcaccactcactggttgtacaataaatcctaggaacgcccgtcctaccccatgggcaaaccctagaataccattttctcgggcgctctctacaggctttgtaacaactcctgaaaccccaaaggcaacaccttgtgccagggcttctgttccttgaacaattgcatcacctacaccggtgatccgcctcgaccaaacctgattcatattcacacctcttttgagcaaactgccaaagtgatcaattcaatattttatagcaagaaatgtacctgtttagcccgtagttgcatgaattgaccatcagttgaaagctcggcaaaccctttgctaagagaggccaatgttgagctagtcatacccaaaacatctactgagaaaatcaaatgtaagggattgtggatcagatctctccatatgcgattcccgatggctggaagtattgaacttttccgtataaaccgatctctgtgcattactctccttagatgaacctatatgtacatatgattttgaaacattagcaacatttctcgttctctatttgtcagtactaaattccaactatagcaaaatgatgaattagcctgtggtgtcaggcaattgaaatgctttctagctacaagctgtttcatgagaatccaaggaaaaaagcttctgagctacttatcccctgtgttacttatctcgtgtgctgggagttaagaaagagtatggcttaaacaaactcatgctcaacaattcataatttacaacaagttctaactttttagtagtcagttctcaaatgaagtagactaccacgaaatggaaccaggtatcccaacaattagttctattactaggaagatgtaatcactattccatttcataaatgggagtaacttcaaaggaaaatcaaccacctgaattttgaaagcatttccaacagcggacaaaatggggctccaaacaccaagaattccatgaggcctctgagctggcgctgtttctagtgagacctttagccttacctccgaaacatctatgaggctgaaaatcacaaacaaaatcatccaatcacttaagttagaaaattgctagacttgcataccaaaacggccaaataatgtggccttcgtatctggtaaaaattctatagaagacaagaatactttatatgtatctcaggatcaacttgcgcgacactagaacttttggggagacggtccatctgaagcttattgtagaagtcagctgaagcccaaatgataggctcgtgaatgtttagtcgccaggtattatctgttacctgtcaattgaatagaaaatacatcatgtgcttcagatagtatctcaaagttatgtttgagtactctgcagataaacctgactagaatacatacccgtacatacacatatggatacacttgaatgccatcagtttcttcgttacacattgtaattgtcatcttaagcactggttgacgactatctccagtgttatctggtgccaatagtactggcattaaagttagaggtagctggttatcaatctgtaaacgacccagaatgattttgaacctggaaatcattaaaaagtatattgattatttggttccatcattccagttatacatgaaacagacatgaaaggaaaacattactgcgatattcgagttacctgctagttcttccctcatcatacccagtggagtaag

SEQ ID NO: 30497 - DNA, 12703 bp, Arabidopsis thaliana landsberg
  unsure (1)..(12703): unsure at all n locations
tgagttcaaattcaatcaaacatgaacgagaagagagaaaatcgaaatacctcgagagcttgtaaccactgctttttggcgatgagatcggacaaagtttcagtgacggtgttaacccatccgttagctttgcttctcctgtcaagtttcttcttcacattctttatcggagttcttctctgattaaccggctccgtgattccggggaattcgccgtctttccaaagcctcttcttcgtaacacttcccggagaagatttcgaagcagccaaaacgcatctaacgatgcccacatctctgtgacgaaacctacgcttaccttcggggattctggatgaacatagcgaagaagaaaacgagagagacattgacgccatcgtcttcttccttcacacctcactgtcactctgtttacggataattcccgtcgatactcatttcggttggatatggtaaaataccggtttatataaccgaaccggaaacacatttgatccgttcaaatcccttaaaaaccggatcgtatttttaaatatgatcacataattgatcatttaaaaataatacgaggctatttttttggtgttcaaaaagataaaaataataatatgaagctcgcatctctgtaagtatatatatatataaaactaaaaggaaaatcacgaattatagtatcaaaaatagatttaataataaaaataaggattggtgactggtgcacaaaaggtggtaacaaacaaacacaatcttgactaaattctatagaaatatcccaaagaaaaaaaaaacaaatccagaaaaatattgtatattgattttgatgatgccgatgttgatgtgcagatattactcttttatctattgcttccgttggagtttagttttgtggcaacagtctattgtatgactatctggggatttgggagtttatccggccggcaagcatacattcattggtgttgtttgcaacgtttacaacattgttatcatctatcttttattcaccatagtaagctctctctctctctctggctctcacttattgatgaatatatagataagtaaactattaaactggttttgataagtttttaatgcgtgaaacaattaggacaaaatgccgccggagactaagaccttcaagtacatgccgttttggctatcgttagttcgtttcatcaacgctggaatttggactgcttattctttgatctacataattgatatctacgtccttgtaagtccttttttgtttttgttttgcttgaagactttatgtattaaatttttgttttttgtttttaaatttttgttttgatctacataattgatatccttttttgtttttgtaagaagggcgagctaaagagtttgaagagcttaaaggcgagctgaatagcttgaagacgagttggagagcttgaagacgagctgagggacttggtgaagagaacgagttgataagcttgacgaagaggagcgagctaacgagcttcttgagaagggctcgctgacgagctacttgagacggacgagctgacgagctatttgagacggacgatcttcgtgagacgggcgagcagacgagctactctgtgtctgcgtgtcaggcggaattcccccctttgacatgacatgctattccgtatttatagcactacgcgtgtagggcattcatcgagggatttgacgaaactacccttcgccttaatactcctccttggtttggaacttattttgggcttttgacttgggtttgggcattggccaagtaggcccaatccgacccctaacagttgccccccaatcctgattcatcgttgatgacgtggatcaggatttcaggtgcacgaaactcaatcgaaggaagtgaaaagtcgcgcatggggaagacgcaatgtttggtttgtctttcatgattctcaaggttcgaggatcgaaacgtcgcgtggctatcaaagtataggctgctattacggcaatgtgctgtctcggtgatagtcaagcgagacgacaaggaaggttaaaagggtcgcctcggctgttgcgtgaccgtcgcatttctgaagagcctcctggatcaaagtggtcgtctggtgttcgagttgggatgttcgagtcattcgaaagtggttctttgagggggagagggaagagacgagggtcgttaatcatgatgaacaacgagctagcgttccgaactcgtccgatgcgttttgcgtgccaatgatcattattggagttatcgtttcgtttgaaggaggcgttacttttgctttgaactctggtgtttgtgttgagctcgctgtttgagaggcaagattgctcaagcgttggccgatctagacgaaatcttgagccgaggttgagaagatgagtggaaaggataacttagttgaacgtgcttattcagggagaaaagagcttcgggagcgtcggttggagtatgtcgactttgttcgaaggtcggcggttgataagatggcggagctcatcgagaagcgattggatcgtattaaagctcatattgacgatacgaaggtggcggagccaaagtttttgaattctatcgtgtatggaaacatcaagactctcgaggcgttgattgaaggtggcgaggtgaagatgaagtcgaacgagatgatgtcaagattggtagcggatacagaggaattggaggccgaggtgaaagcttttggtatcaccgatcttatggnnnnnnnnnnnnnnnnnnnnnnnntatttgccgagctgagtcctgataatcgtaattccgttccaccgccgactgaaggggaagatctcgcggatggacgaggtgagtgcgaaggccaagctggtgaaagaatcgttggtcaaactgaagttcgagacgagatcgcggatgctagagactgatattccaggaggctaagccaaagggaagaagcggagctcagatgcctaaagagatcccaatatggcaaaacaaaaaatattctaaaaactgaataatcaacgaattttatattatgtgaccaaaaaatgaaaacagaaactatgtaacaatcatcaaatacagtgttttcagcatttatttttttctaaattttccagcaacatacaaacataacgttactactagacataaaaatactccctctgttccaagttatttgatggtttggatttttttatttgttccataagattgatgttttgtaaaaattaaatatgattattaatcttgtttgttgccaatagtgaaaggagcgaggtaatagtaatattattaaactattaaaatagtaattaaaattaaatagaaaagttactttttcttaatttatgtgcgaaacttaaaacatcaaacttacagagagagtaatatataacatgatatgagatgaaactgtacggtgtcgttgcataattacataaactagtaataaactcacacactgccttcatttcaggtcgagacagaacttattgtgtgatttaaatcagacaaaccttcgaactttgactttttcatcgcctcctgtcccttcgccgcaaaatactagtctaaacgctcaactcctctctcctgtcttataaacttttttttttagaaaatgagatgatcaatcgaattttgttgtgtgtgacctcaaactgacaacttccagtaattgtaatattaccaatttttttataaaaaagatgaacttcactttagagcaatagcaatccctcgagtctcccctatataaagattccaactccttaacgattcatctaatgaaaaaacacacacaccaaaaatatcagatatctcaaacaatgtcttcagtttttggatctgtccatatcttggccatgatagccatacaactcctccttacacacagtgtttcatctctgaaccttaccaatgcgtatctgcaccacaaatgcagcaacactcaaggaaaatataagcaggggagcgcgttcgagaaaaatctcaacttagtcctcagtaccatcacctcgattggaaattttcgtgacggtttccgctacaccgaagaaggtgaggatcccaataacgtctttgtcatgttccagtgtcgcggcgactcctactggtccaagtgccccccttgcattagcaccgccgtctctggggtaattgtgacttcaatattataaattagcagtcatatagttacatgtaaaaattacgatgagcacacacgtcggttaattttttctgtcaaatcttaaatatgtgggcaatgatcctgatactttatataaatgattgaattgagacaaaactgatagacattaaaggctagttaaaaaatactgattaaacaatgcaatattgttcttgatatatatgtacgtatatgtatgtgacagcttcgtaggagatgtccaagaaataagggagcaataatatggtatgaccaatgtcttttaaagatatcttcagttgcctccttcaataagatagattatgagaacgatttctatttgtccaacccaaacaacatgagtgatcgggggttgttcaacaaggagacgtcggctctcttggagaagctggcatataaagcctccgatagaaacaacttggatggtaaacaattggtgttgtacgcagcaggggagaagagaattgggacaaagaaggtgtatgcaatggtgcagtgtacgaaagacttaatatttacaaagtgctttgagtgtttggaagggattttgaggaagtttccacagtgttgtgacggtaaacgaggagggagagttttcggtacgagctgtaactttaggtatgagttatatccttttcttagaaactaacagcaacagtacaatgagagctccatattaaatgaaagggttctagagataaacagtcttataatatacactgtgttgcattttagtacgtgaacttgagcgaataaatgtactttcctctttgttttttgtgaacttgagttattaagaggaaatcttcaagtaaagaatttatctaatagtatatacatcccacatagaataccaaatagctcagctcatacaaactctctcataatgagagaaaaaaatcctgaaataagggtaagaaaaactcttatgcctcaaggttttagtaaatctcataattttggccgaaccacaaaaagagacgtgcgaaacaaaatagtagaaaattgatttcccgaatcgacaaacatggactaaactatatgtatgatacataactggtcgtacttacaatgatgatacttggtttcacgaagacgagggagcctggagatgaatgatggtgataaggccatgtgtcatcaccaaaaggagggttgctcctgaagttttcgccggagcggccaggaagtcgatcgaggtatgctcaccttctgggtttgattccaattttttctttgaattgcattcgcttgacacgctctttgtccaggcgatcgccgaatgggatcgtttgacttatttgtacgagcgttgtgttcggagcctttccgtagaggctactaacgcgaaagatgcccatgaggctttggccgttgaaaaggaaaaagtagctcaggcgctggccgacctggcaaggtctcaagacgacgccaaggagatgaagaggaaatatgacgagttagcttggtcgcgctctttcggagatgaagaggcttcgagaacgtcgacttgaatatgctgaatttgtccggagatcggcccttgataagatggcggagctcgttcagaagcgattggatcgtattaaagctcatattgacgatacgaaggcggcagaaccaaagtttcttgaattcaaccaagtatctgggaatatcaagactctcgaggcgttggtcgaaggtggcgaagtggagatgaagtcggatgacacgatgttaagattggtagcggatacagaggaattggaggccgaggtgaaagcttttggtatcaccgatcttatggacggcgacttcgatgttcgtactttatttgccgagctgagtcctgataatcgtaattccgttccaccgccgactgaaggggaagatctcgcggatggacgaggtgagtgcgaaggccaagctggtgaaagaatcgttggtcaaactgaagttcgagacgagatcgcggatgctagagactgatattccaggaggctaagccaaagggaagaagcggagctcagatgcctaaagagatcccaatatggcaaaacaaaaaatattctaaaaactgaataatcaacgaattttatattatgtgaccaaaaaatgaaaacagaaactatgtaacaatcatcaaatacagtgttttcagcatttatttttttctaaattttccagcaacatacaaacataacgttactactagacataaaaatactccctctgttccaagttatttgatggtttggatttttttatttgttccataagattgatgttttgtaaaaattaaatatgattattaatcttgtttgttgccaatagtgaaaggagcgaggtaatagtaatattattaaactattaaaatagtaattaaaattaaatagaaaagttactttttcttaatttatgtgcgaaacttaaaacatcaaacttacagagagagtaatatataacatgagatgagatgaaactgtacgttgtcgttgtataattacataaactactaataacataacactgccttcatttcaggtcgacaccgaacttattgtgtgatttaaatcagacaaaccttcgaactttgactttttcattgcctcctgtcccttcgccgcaaaatactagtctaaacgctcaactcctatctcctctcttataaactttttttttttagaaaatgagatgatcaatcgaattttgttgtgtggccagaaactgacaacttccagcattgtactattaccattttttttatagaaaaagatgaacttcactataagagcaataacaatccctcgagtctcccctatataaagattccaactctttaacgattcatctattttaaaatcacacacaccaaaaatatcagatatctcaaacaatgtctttagtttttggatctgtccatatcttggccatgatagccatacaactcctccttatacacagtgtttcgtctctgaaccttaccaatgcgtatctgcaccacaaatgcagcaacactcaaggaaaatataagcaggggagtgcgttcgagaaaaatctcaacttagtcctcagtaccatcacctcgattggaaattttcgtgacggtttccgctacaccgaagaaggtgaggatcccaataacgtctttgtcatgttccagtgtcgcggcgactcctactggtccaagtgccccccttgcattagcaccgctgtctctggggtaattgtgacttcaatattataaattagcagtcatatagttacatgtaaaaattacgatgagcacacacgtcggttatttttttctgtcaaatcttaaatatgtgtccaatgatcctgatactttacataaatgattgagttgagacaaaactgatagacattaaaggctaattcaaaaatactgattaaacaatgcaatattgttcttgatatatatgtatatgtatgtgacagcttcgtaggagatgtccaagaaataagggagcaataatatggtatgaccaatgtcttttaaagatatcttcagtcgcctccttcaataagatagattatgagaacgatttctatttgtccaacccaaaaaacatgagtgatcgggagttgttcaacaaggagacgtcggctctcctggagaagctggcaaataaagcctccgatagaaacaacttggatggtaaacaattggtgttgtacgcagcaggggagaagagaattgggacaaagaaggtgtctgcaatggtgcagtgtacgaaagacttaatatttacaaagtgctttgagtgtttggaagggattttgaggaagtttccagagtgttgtgacggtaaacaaggagggagagttttgggtacgagctgtaactttaggtatgagttatatccttttcttagaaactaacaacaacagtacaatgagagctccatattaaatgaaagggttctagagataaacagtcttataatatacactgtgttgcattttagtacgtgaacttaattgagcgaataaatgtactttcctctttgggatttttgtttttttttgtgaacttgagttattgagaagaaatgttcaagtatctactagtaaatacatcccacatagaataccaaatagctcagctcatacaaactctctcataatgagagaaaaaaaatcctgaaataagggtaagaaaaactcttatgcctcaaggttttagtaaatctcataattttggccgaaccacaaaaagagacgtgcgaaacaaaatagtagaaaattgatttcccgaatcgacaaacatggactaaactataattatgatatataactggtagtacttacaatgatgatacttggtttcacgaagacgagggagcctggagatgaatgatggtgataaggccatgtgtcatcaccaaaaggagggttgctcctgaagttttcgccggagcggccaggaagtcgatcgaggtatgctcaccttctgggtttgattccaattttttctttgaattgcattcgcttgacacgctctttgtccaggcgatcgccgaatgggatcgtttgacttatttgtacgagcgttgtgttcggagcctttccgtagaggctactaacgcgaaagatgcccatgaggctttggccgttgaaaaggaaaaagtagctcaggcgctggccgacctggcaaggtctcaagacgacgccaaggagatgaagaggaaatatgacgagttagcttggtcgcgctctttcggagatgaagaggcttcgagaacgtcgacttgaatatgctgaatttgtccggagatcggcccttgataagatggcggagctcgttcagaagcgattggatcgtattaaagctcatattgacgatacgaaggcggcagaaccaaagtttcttgaattcaaccaagtatctgggaatatcaagactctcgagactatcaagatttgacgtagccgcctctccgtccaaaggccgagtctcttcgatgggagctgggggaggtggcatatttaaaagcccggcagcaaagctaatgaaggatttccggaccttccccattatcctgttgacgcgcgacctcgtgatgtctttccacgcgcgacgccgagctcggtagatcccctctaaaactccttcgtactcaacgggaaactccggactaggcctgtaccgatctgcaacaaaagaaacggctatgagaatctagtacggatcgacatgtctttaccctatctatttaaaagaaatctaccaggaaactccgtccacatccttttcctccccgagaacggacgctcatacgattcgaggtcgaccctgacgtagaagtaatattcttcccagttcttgaagttactgactttgggaccgggaagaaagttatgctttgggcggttgttcaccacctaatagccgagcgacctgatagctttcaacgtcgtcatttcctcaaaacaacgaacgtttaccaggtaaccttcttcagcgccgaaggtcagagcggcaacaaaattgcagatcgccgccggagtaagctgggagaacgccatatgacggcgattcagaaaggagatgatcagagacgtaattggaaaccagaggtgacattgtctgaagtagacttcatacatacagacgtaccctcgagggggattccatggacgctcattttctccgggaatcatgtaagtgagcgggcgatctccgtagccacacaaggcaaatacttccgcgactgactcagttgttgaaagtgtctttttcgcggtgatctcggtgttccagctaaccactgggtcgaggtcaaattcaacatgatcctcatgaagtaatcgcgcattaacttcagcctctgtatactgcggctgcttgttataagcatccaccaggtcgatgagtgggtcgaactgagctaataagtgagcgggcgatctccggagccacacaaggcaaatacttccgcgactgactcagttgttgaaagggtctttttcgcggtgatctcggtgttccagctaaccactgggtcgaggtcaaattcaacatgatccaaatgaagtaatcgcgcattaacttcagcctctgtatactgcggctgcgtgttataagcatcctccaggtcgatgagtgggtcgaactgagctaagaaatccaccggatcttcaggagcagcgagatgtccaccggaaccttcccgatctggctcatcaagcaacgtcggaatctcgatccggttagatcgactagactgagctaggttacttggattcccggttaaccgagagtttcggagaactaacgacacttctctctcgggaaaaaaaagaccgagagacaagaacaaccttacccattgccggatcaatcgataaatgaatcgagagtactcagtaattcgcagaggagagagctgagagctaccttagattcttcttgcaagcggcggaaaatgatttcccgagggtttaatctaatataaatagagtcgaatgggcggcaaacctacgaggtcatcattaaacccacgagacgcttcggttcctgagcttcacgcgcgcgtacagacgcggcgatttgacacgtgtcagatacgttcgaaatacgaatcgattcggaaatctaatgattaattcacgctttccaagatttaaatcgaatattcaatttctaagttcggaaatttcgaattaagcaactcggattctccgaactgggggggggactaattgttggtgcaggaattagcacctccgacaataccaatttaaaccaaggaataacgtgaataaaatcgagaattcgattgaaccggggaatcccggctagcccgttaatgggcctaagtcatgagctcgccagaagatttgggtcgacaatcgagatcctcataggcggcttctcaggtcgtgtaaaggaaaacttccatttaagaaaggaggatctcatgaagaatggaagtaatgaagatttagacctaggataattagaatatcatattttgatacgttcaacccattgtataaatagggggggtcaaactccccaaggacccatcttgaaccgaaaagaagagactacaattatagagcaaaccctagcttttatttcaagcaactttgttctttcccttttattatttgcgagctaagagaggagtgaatttgtctaaatcccttagtacaaattcattgtttgattacagaatcaacagtagagacgggctctataagcatgtgagatgtgctattttcccaaaatgatagatgttcaaggtgtgtttttttatttgtacaatgagattaataaatcatttatttttagtcaagaagcatcgaagcaagagaacgaaccatttgaaagactcataaaccaaattgagtcaaacaaaggaatttcaaagaagtagtttggtatggacggatctggtaaaccggtttcggtacgattgtctggttatttttggtttaaaattgattgggtatgttgcagaagctttgcctcagatggcaggtctctccaaattgatcatccttcgatattattattgatacagaggaggaagactcagaatcttcatcctcaaaccctagattccttaacgaaatggcgatggagatctcggtagatctgataaaccaactcaaggtctcgcttcgaaaggaggccaagctcacctccgtcgacgattgctcggactcatccttccccagccttcccacatccgaggaggcaatcgcagaacttgatgcttcagctccgtaccttcgttgccgaaactgcaaaggaaaacttttacgaggaatcgagtctctgatctgtgtcttctgtggaaatcagcaacgcacgagtgataatcctcctgatcccatcaaatttacttccacttctgcttacaaatggtttctcacctctcttaatctcgatggatcggtaaaagtcgatacctttctcactaatttgtaattacttgttttcctagctgattgtgtattagtcagatgtagaatgtggtgtgttgtgtcttcaaaaaaacgaacttttcatctgtaggagatggtagagccactaaaggaaacggatgggtcaagcagaggagctactaaggcaccgccttcaaaaggaattgctttgtctaagtttcttgatttggaaatacaatggtctgcattagaggagaagtctgatgatggacaatcagtacagaagaaaaaccctctgaatctaggcgggattaatcttgatgattatttcgttgagcggagaggagatctttccaaagtggagcaggcagagagtaaacctgtggaggatgatgattttaaggatccacgtagtcttagcttattcgatagtgtaaagagtcagggagttgttggatcgcaacagcatgataatgttggtttgtttgataaaaaagatgcacctaagagtgttgtttcttctggggaacatgagaatcttagtttgtttgctggacgagatgaacaggaaagagtttctttcgcagcgcagggaaactttgggttctttaggagaaagatgctcggaactc

SEQ ID NO: 30498 - DNA, 3798 bp, Arabidopsis thaliana landsberg
  unsure (1)..(3798): unsure at all n locations
tggacgtgttcaaactcaatttccacctgcacctctttcgcatcatcattattcaatgcttgtttgtcaaccattaccatagagttgttttttgttcgtatgcgtaaatatctggtgaagctacattaccattaccaactctgaagttttttcttatatgtttgcagaatcagagcccgtcccctgcacagcaaagaccagtgccatcttacattgcacatcctcaaacttttcatgtcaactacggagagaacgctgaccaaagatggatgccgtcttccattgcacatcctgaaactttacctgttaactacggaggaaatactaaccaaagaccgataccatcttacattgcacatcctcaaactttacctgtcaactacagggggaatactgaccatagatcgacgccatattccattacacatctccaaacattacttaactacggagggaacgccgatcaaagaccaatgccatcttccattacaaatctccaaactttacctgccacgtacggagggtacgcccaccaaagaccaatgtcatcttccattacacatccccgaacttcacctgtcaactacggagggacccctgaccaaagaccaatgccatcttccattacacatccccaaactttacctgtcagctacggagggaccacagaccaaatactgaatcctggtggtgcaatgggacagttctcatcacgagagttcatgaatttgactcctgctaacactgagaattggcgcccacaaagccggatgcgaggcagcgtagcacctggtacgggatatgaccatatgatcattcatcctacccgtccagttcatccacaagctcaaacacctcctgcgcctctttcaacatcttatgatggagcagatgaaattcaagcatttatagggcacccaagctatcccgttagtaataacgaaacacaagcgggtaccagttcgttgccagtggcagagggtcttgggtattcagggtcgttttggtcaatgcctcctgagacatggtgatatctgatggcttagagattgtagcacacggtcactaacacaatcagtcagtagtaagtagtaacagtatataactaaggcctttctttttttggtacttacagctttagtcttcgggtacatatatggggctaagttcttgatgtagcgtattcgtgagatttacttcatgtgaaacattagggtatcttttggccgatttactatcacaatatagcaggttcagttcgctttcttctgctccgagaaactttttagcttcactagtggcttttgttcattgattgatatgtatttggtttatgcggaagaatgagaaagttgttgattttcacgaaataacaaaacttgaagaaaaaacgcataacgaagccgcaaccacaatacactacattagtattgcttcattgtctacaatgacatttatcatttttctgatatgtgagtcagtcgaacacatgtactacaaagttgattttgatttgtgtaccgatcagatcggatcagtacaatagtaagaattactcaaccaaattaaaaacctaaacctaacttaatagagttgatccaagtcgtgcatcggtaggtacgctgctcatcatactaaacacgtgaactactgaaataaaaaataataaactcatttattagttttcttttagaacatcaaagctcattctttttactagtatttttataagctagggaaattattgaaggaatattaatataccgacaagagaacaggatatgaatgcataggtcaatcattaaagtcatcgtcatttacaaatgaaaccattcgcaaacgctaatgcaagaatgtngctagcctagggtatggagagagttatgtntggtatgcaagtaataaagaaagcaatatcaagacaaattcaaatgcgaagagtcttcttctagttcccgcgattagttaggttgattctcctatacgtcaacgttttcttgatcaatcgattttatggatgactttaaggatcatacaaaatccttttatatcggaacgaacgataggccacacaactcccccgatcaacatgataactttgtctacagacaagataaaaagaaagctagaatatgcccatatcaggggtcctagtccttatcctgacattaatgaagataccgttccgatcctgttttgtcctcacaagtttggaatgaatttccaaatattttcgctgttccctcatttatcatatagcaaaatctcttttaaaatccattgttttaatatttgtcgtttatcaatcaagtccgtctatgttggccctaatgtttgtagagctctaaatctaaacttttttttaggcttatgaccgattttaccgccagttatttacttttcgattcttacaaaaagtggtgtacttttatataattgtaaataaatggattcattagtcttcctcaccttctttaacaagttggaaactcatcgagtcatcatcatatattgtaaccataaaagtaacgtttttttgtttgttttttagtaaccttaaaagttacgtttttaatgtctttcttaggtaaaaataatattggacatctgctcataattttttcggacctgaaaccaatgcatgttaatgtacttgattttgtggttatgaaaactttaacagttaaaataatccgtaatattccaactatgtatgcgtgactcgtcttcaatatcattttcaccttttttttacgtgtatgtcattaattagaatatgtattccaatggactcgatctttaaatgatgtaccgatcagtatatcggatcagtttcataggtagaattcatcaaccagattaaaatcctaacctaataactcaaatatagatcgaagtcgctttggtaggtacggtgatcatcatactaaaaacgtgaaccaattgaaatgaaaagtaaactcatttactagactttcttaaatatcaaagctcatttattctataatggtatagtatagtaaagtatttgagggaaaatcaatatataaagacgatcaaaagatcatgaatgtatagacaacatcgtggtcatgtattaatatatacatatcgcatattggacatatgaaggagagagaacggatccaatgtaccacgctatttattccaattaaacaagtacataatactcaactcacttttttctacaacaaatattatatcaagctccacttgtttgtaacactatatcacttttgtacaatattcccatgattgtaaaatttctttatattttaacaaataagtcagatttcatacaacagacccatagtagcacttcatctctatccaaataaaaaatgtttagtttagttagtgtgatcacatacacgtaattccgactacaaaacaagatgtgttggtattgctgtacaagattctgtccaaggaagttgattctttcacgatccaaaatcactcgattctcctctaagcagccttcacaaacatcatattatcgagtagtttttaataattgtctagtttaccataactactgtggctatgtggtttattggaaaagttgtccatatagagcaaaagttataattattttctattatatttcataatttaattactagacaaatttcagaattattttcaagattcctggatttttcctatctcttcccattcccaatacattctttgcgccgttcttcccaacttgaacatcatagaatctcaaataagaaactaatttgttaatatgattatcactttagattttgc

SEQ ID NO: 30499 - DNA, 2149 bp, Arabidopsis thaliana landsberg
  unsure (1)..(2149): unsure at all n locations
gactttttttgctagcaattctgggttttttttaatttaacaaaattgtttttatctaattgtattgtattttcttgaaaaagatttctgctatttccattaaactgttttgtattttgttgattatttaagtttaagcaaatttattttaaaaaaacttttttaatttcggagttgtctatgataatgtgaactttattgataaattaaatgttattaatagaaataaatacttaatgcaggaatggagagcgtttagaactattgtggctgtcttaaatatatgagatttacacgttttaagaacgtccatatataaatgtcattgtttttacccgttgaacttccttgattacactctagatttcttacatgaacaaagttcacggattcgatctgttaagaatgttatcatcaaactttttcttctatttatttgttgttttgtacaaatggaattttctttcggtctctgagataagatttataggatcctttgaatttgtatcaatcatttagttaggaaagaataatgatcccattgaaatttatgtgcagaaagttaaatcccattccaaatacaacgttcttattaacatttctcattagtgtattccacgtaccaccccctttgttgcttttgtagtaacttctattttaagaggtttgaattaaaatgtactttattcaaaatagaattgtgaacagaaaacagaggaatagctagtttaattatttcccacttattgacttcaattaaattcagacctagaaattcattttcaatggaagaaaataaagatcaaaagagcaattttgcaataagttttttttaggaattggtgggggaaacaccataccattcccactatcctctcaactttttaatttagttccatatcattatttttgctaagtcatatacaaattttcctatagttctattgcaattattattcaatttttcttctccgtaaatctttttgtttcctcactttttatagttatattcacggtaacgagtaattaggcctacgagtaatgacttccatgttaggtgagaaagttgtatatgactcatgtagtagatgttacgagacacgaagattgtgtatgaaaatttatacagtacgtagataagaagagtagatatacgtaagcaaattcacatagattgtaggtagaaatatagacaaatactgaatgagtatatttattgtaaaaataggtaggtctcgttagcgggttccaaaaccttattatgtgttcggagatttttgtacccttttaagttttgatgtatacaagaaaaattgaaagcagaatccgatgtatcgtaaaccatccgaattataactgattatccaattggatgaaagtggaattatactatacaatatgtaatatgttaagaaaaaaaaagaacaacaatttactaatttgtactataattagtcttgaacaaacttaaaatcaaataaatatttatttatccatcagcaaatgaggctcccatctttatatgtttctggtcccttttttgacaaattttttaaaaaataaaaagacttgtatatataggcgcatggctttggagccgagtcattcaatatataggataattaattnttctattatagtattaatatttataagactagatgtaagaaaagggtataaaaccaagaagacgcaagatccaaaatctgcaacttttatgtgtatgttagtgaagtatcagcagcatttgttcgatctcccccctagatacaagtaatattctcacattacgtattttacagattatttttgtatttcctttttttaacttctgacttggattattgggcatttctatgtatatatataccatgattacattatgttacaaatttttttctgagatggttggatgtagtcaagatgagggaccaatttcacaataacttgaaaaatgcatttcatcattttagaatttagatgatgtgagactgcaattgccaagattggaccgaaattagtaccgatgatgatgaatttgcaggatttttttttatcacttaaaaacaggtttggggtcgtggggctatctctttgggagaatatctatgtaaaatttttttttttgggagaaacaaaattatttggg

SEQ ID NO: 30500 - DNA, 1669 bp, Arabidopsis thaliana landsberg
tgtaaattagattcaaaaagaaatggccaaagttgttacaacaagtgctactgagagtttaagatttttaatctaaatcgcaataagactttatgatagagtttcctcgcttaagatattatattctctctttctaccttcctataaatatgtgaccttaaatgtatacatatgttccaaatagtgattttacgtataactataagatatatcgagatgggtaaaggcaagaaaatgtcaacattatcagtgataagagctttattaccgtgctgttcgaacagtggagatgattggagcgacgaaggagtgatcataaggtcaagaatcatgaccagtgatgaagatggtcggctttggatcgctgagccaggggtcgatagacgagccacttcttatatcgctaggttctacgaaaaccgagtttctgatcctaactacaaaaccctctctccttgaagtgttttccatgctcttccttgtctcttttttcttttcttcatgttttgtacgtattccttcgctcttcatgtttttttttatcttgtgtaaagttcatggtaaaataataacttattatacaccctgtgtttgtagaattatgttttagtttctgtttgttgatatatatgagatctagaaggagttgatcacttcctccgtctttaaaaacaaaaaaaaaaacttattctagttattttcacatatatgttttcatttttaaagttacttgatttttacttcaaatttcattatatatcatcacatatcactatttgactaaaaaaaaaaaaaaaaatcatcacatatcactatttgactaagaaaaaaaaaaaaaatcatcacatatcactactttatctaaagttcctaattcgatacaaagagaaagaaaggttgtatacacaagaaaatgagagaaattgatcccaggacatgaggcggtgctatcctatgtacattttttccattttcgattttgtttatccttccaaattcataaaagaaaaaacaaccacatttcttatggaaaaaaaatgaaaaaggagaagatgctaagagcaaatccagtgattagtttctaagtaaggtttctatgtatttttttattaataaattttgatagttttatagtttagagattttatagagtttttgaaaattttatggttcatttgtagaatctttaagtgggtttctaaaacaaaaaaaaaaaaattaaaaagaaaatttgttaatattttacttgagcataatgtaataaaaagatcaatcataacattgaatcataacattgaaacataagacaaacataaaccgaacaaaaacaataagtttgttccaacactttctgagaagaataatgtctcgattgtgctctcaaccacactgagactatgagtggtgtaaatcatttggtttagtcttgattgaacctcaattaaatatagggtttttttcttttcttgtttttactaactatgttcgaagagtggttaaaagttgcaatggcttgtgttaatcatatggcggtcatgtatgatggttataagaagatggatctttaggtattgctctaattcaaaaataagagtgattcaaagagtgatcaaaacaatgccttttgtctttaagtgaccgaagaaacctaaaacagacatgagataga

SEQ ID NO: 30501 - DNA, 2190 bp, Arabidopsis thaliana landsberg
ttattcggcataaattatcaatataacgaaagtttgttgattttacaatagttatttgagttttagaatggttcggtaataattctaattaactgctagatttgctattcatatattttctgaaaaattctttatactcaacactttaatctatttgatttataatttaattttattcacttttttgtcttttaattaacgttaatttctggtttagggtgatttcaaatactaataatttaattttgtggaattcaatctttttatttgagaaaataagtttaaggattaatttgagaatataatggactttagaatccagtctttttcttctttatttcttatgcgtcgtttcattgatcttacccgtctttttgtccttgcttatttttttaagacaaattttgtatatttattttttcatacgctattctttttggcagctactaatttcacctcggaaatataaaagattatatgatactaattatgattaaacacatttaattatctgtatgatatcatcttatagtaataatctaaacttttgtactaatgcaatcaccgtgttataattaagatgatgaaaattcaaatatgaatgtataaattgtcaacgacaatgaatgtaccgaaaccgaagaatacatgggatacatatcattatggtggctgctttagtattcttgttttagttagtttaattttgataaatattcttgtctttgttaatcattttaacatattattcgatgcccaccccatcccatctaatcgcaattttaattattgaaatgtgagccaatacttggtacttgttagaacgacgttaacagataaattgttagatatatagactaaaaacccagtctttattttctttttcttaaccgtagactttattttttgttaatttctaatttcatgttggcaagccatattaaaaaaaaaaatcccaacatgacattagaaattgaaatactaaatacaagcttttttttggtgccactcacacccttagcaaagactttttgctttcgaaatactaaactcaaagttgaagtttgtttttattttccaaaacttaaccatatcatttctctaaacccttataaatagacaacgataccatcctcataattacaaaacagaaacaaacacagaaagcactttgctaaagaccctcgaccaaaatggctgatcaaactcagtttctccgaaccaactcgatcgtaaaagcttcctactgggttgtgaagacggaaaacgacttccctgccggaaacattgactcaactcgcttcacccatcttttctgcgccttcgctgacgtcgactcttccacccatgaagtcactatctctgccgcgaactcatgccaagtctccagctttacccatatcgttaaagacaaaaacacggacgtgcaaactctcttgtcgatcgggggtaaagatgcagacaaagctgtgttagcgtccatggcaagtaacagcaaaaaccggaaagcgttcattgattcctcgatcgatatcgctaggaagaaggatttctacggcctcgacctagcttgggagtatccaagcaatgacgtggagatggccaactttgggaaactcgtgaaagaatggcgagctgcggttgtggaagagtctgacagaactaatcaactgcctttgctcttgacggctgcggtttactactccccggattactatggtgaggagtacccggttcaagccattgccgacaatttggattttgttaacataatggcctacgatttttatggaccgggttggtcgccagtgaccgggccacccgctgctctatttgatccttccaacccagcaggtataaaccataactaaacccgtaacacaactgcagtttttccttactatcaacatatatatatacatagacaatgaaatcaaaattgatagaaaataaatgcttaacatcattcactcattcatctacgacttcaaaatttaaaaccaaatcatgaaatatattattatggtgtgatttaaattacaggtttctgcattattacctcttatttctaaaaaatttattttagacagaggttgtgaaatttgttaaaatcatatatattttacattttactttataaatatcattttacttttacatatatatttagcactcaaaagctatttatgg

SEQ ID NO: 30502 - DNA, 1875 bp, Arabidopsis thaliana landsberg
ttttgggaaaacacccattaaggaatgcactatctatccctattataggcctacatgtgttcttccaagagtctctttgcgatttaaaacagatagagagtcgcaaaaaccttggtaagctgtctatggttgttcctggagttgtctcaatctcaaatttggtctcaggatttgatcaaaaaatctctgcttggtagtcccaaatccgagcaaaatggtcatcgtgagtagctttcctttccatcaagatctttgtcttcgcctttgaacattgatcttctgtgactacaagattatactccctatgaatactaaccatctcttgcttagtaatttttggattcttcctcgcagtcttcatcgccgataacctcacaatcatctccactcacacaatcgcgatcttcttcttcttcgtcacgactcttccttttttttcttcttctctttttgttcatgttgtttctgttgaggaactgggttttcctcttgtagaatcgacaccgcctcaatcactgtttcttctggagttcgattagtcactgtttcttcacgggtttgatttatctccatttcttcttggttttgattagtctccgttaattctgggtttctattcgtcgcggtttcttctgggatctgatttgtcgcggtttcttttgggttttaatttgtctccagttcttcagagatctcaaaaacttctagtggtcgattcgaaatatttgctctgttagcttcgccaacaacagccattagcctccgtgaccgacgaggattcacatttcctccccgcgtcttcgccatcgggatcaattgacaagagattgagagaatttgagaattttctcttttagggttagggattggtttctaatcgatttgggaaattttagcagactgtgaatcaaacgacgacgtttctctcgtttttggctcgttttgtttttgacaaaacgatgtcgtttaggttcaacgatgcccgttaacgaagtattaaccccgtttctcgcgtactaacaaagacttaacgcgatgactaatttggctcggtcaacaaaactttgatattttttggagacggtcaaccaaaagtatgtgattaaaacgacgtctcgtgagttggcaattttttcgtctcatttttgaaagttggtgatttttctgccatttttcccattaaaaaacaacactacacttacttacccttcttatttctcattggctgatcttaaatgacaaggaacacctaagggccatcttacaccgtcgacaaattctatccaacagactaaatcatctcaatatttcctttctctctcgctattgtttatgttattttctataatcaaatttttctcaccttctctctttctcaatgtatcctctccatcaagttcatgtgaaatcatgaaacccagaagactaaatcatttttcatttactcaatgattactagaaggttagttctctctttacacaataaatttgttatgtgttttgattatttctttggcagatcgaagaatttgttatttgtattttaggtttcatcggtagatatgaagaatcaatttgttatagatgattgcaaatctgaagaactagcgccaccagtaccacatctgaaagtctccacaaattcaccaccaacacatgtcaacttgaatcgtccactggcgcacctcaaaacctcttgacaccatcgcatcccagaccctctggccaccgccatggttttgttgccccacgcctatcgtcgctccatcgctccatcaatgtcgatgtcaatatttaataaatcaattgatatatgttattgtatttatgtgtttgttatgatttttaaaaatagaaaaatatatttatttcata

SEQ ID NO: 30503 - DNA, 2651 bp, Arabidopsis thaliana landsberg
acattatagtccagtgggcttacaatacaccaaggcatcatatattttagagcagctactgccgctaaaaagtcaaagtggtatttacgtaaataagtgcaatctaaggggcatttgtaatcaactcttcctttgttgtcaaaaaaaaaaaaaaaaatctcgtcttcgtcgtcatcatcatcaagctgattttttctatttgtcccattcaaattcaatagtgttaacctgattctggtaaaaacccttgctttatagcttttgacgactccaaccttggaacagatgttgtctctgtagacagtgagacctgtttctgtttccattaccagagttctgagtcgatccaaaatccggagacgatgaggaagcgtcatccaaaggcatcagatttaacagagccatcttcttcgagtaaagaaactgatgcttcttctgataaagatgctctcgataaggaagtgcaggctgatgttaaaagatcagggaaagtatggttgtcagtgttgattttgatcacttactcatcttggtttgtttacaattatcagcttgggaatttacctaaacccttaaccgcaaaacaagctggtaaaaggggtttctctgaaattgaagcaatcaaacatgttaaagctttgactcagtttggtcctcatcctgtttcttctgatgctcttgtccatgcccttgaggttttgtttctttttagttattttttccatttttttcttgatttgggtgtgtactcagaatttgttatttgttcgtctctgtagtatgtattggcagaagttgagaaagttaaagaaacagctcattgggaagttgatgtgaatgttgatttctttgaatccaaatttggtgtaaatcgtttggttggtggtctttttaaggggaagtcacttgtgtattctgatataagtcacattgtactaagaatcttgcctaaatatgaatcagacgctggagacaatgctattcttgtctcttctcacattaatactgtcttcacaacgtatgttgcttcatctcctatccgttgattttggattattgttcaccattttgctactatcaagtgtgtgtgttaaatttgtttgtgaatgtatgaagaggtggggctggagattgtagttcatgtgtagctgtaatgctggaactagctcgatctgcttcccaatcggctcatggattcaagaattcgattatattcttgttcaatactggagaggaagaaggtcttaatggcgctcatagctttataactcaggtatatatgatacactgaccttaatggctttgagtttgatgtgattccctctctctcttaactttgacttggtcggattgatcggattagatatcttaattcctcaacttatggtttctgattcacattgtgaattactgatgcagcatccatggagttccactgttcgtttagctattgatttagaggccatgggtacgggtggaaagtccagtatttttcaggtataatcttatgcactacctctcgttcatcacagtttttaatataaactataagagatacttagtaagaagtacaatgtcttttcatcatgtgagtttcccccttccttgtaaaacatcaaaaggaattggtatgaaaacaaattgcatgtgaagggtttttgtcatttttactcaattttggctatggtctttattcttttttttttgggagttaagttcttatactgaacgtaattactattgtttggtgccttgtacgtgaaagaggaacccggttttcaaattgtttctctttactccaagtgtgaattccgaccttctgattgttgttatcttcccggtataggctggcccgagtccgtgggctattgagaattttgctttagccgcaaaatatccatctggtcaaatcatcggacaggtatgtactttcaactgatgtttctttcccctcttactggtatatacagtatctatatgtcaatgctaatgctttactatgacaggatctgttcacttctggaatcataaaatctgcgactgatttccaagtatacaaggaggttgctggtctctcagggttggactttgcttttgcagataatactgctgtctatcacactaaggtttttcccttttttgttttacatgatgttcttcacttcttcttgttttgatcccagtttagatgtctaatatgtcattgcttgcgtcgcagaacgataagatagaactgataaaaccaggatcgctccagcatcttggggaaaatatgcttgctttcctccttcgggttgcttcatcttctgatctgccaaaggataaaacgctccagggagaggaaagatccaacccggactcagctgtctattttgacgttttggtgatcacagaactaactctgttgttataatctattaagatatgtacttacatagctttttctttgtcatgtcctaatggcgctcctttatttctatgtcaatttttaggggaagtatatgattgtagaccggcaaagtttggcgacgatgctatatgtttcagtgatcatgcaatcgattcttatatgggttttgtctgtgttcatgggtggttatccggctgttgtgtcgctgattttgtcgtgtttgagtattatcctcgcatgg

SEQ ID NO: 30504 - DNA, 1075 bp, Arabidopsis thaliana landsberg
aatgtattatttctttgttttatcaatcactacaaatgacaaaaaaataataataaaatggttggtttatgggtttaaaaggccggttggtggagttggttggaagacacggttggctcgtatctgtaaataaaatatgttttatgtttatccggttgagccgtggcgatcaaggttaagacaatacagctaattcgttaatcgacgtcgcttatttaattcgtattcattagccgattaaaagacaaaacatctaattagttacctacttacctatacctgatcgtgggtaacagccttacaggctcatggcaaattgatatttataaataatatataggtcctttatttaaggataatcatgtgaatctcgacatcagtgaccttgtaatttgaaatttaatacgtttacctacaaagtttgagactggatgacaaaaaaaaaaaaaaaaaaaaaaaaaatttttgagactggtttacatgtgtacagtatcgtgccaaggtcaataaaagtttaaggcaaattttataaatgttgccttttatattcttttttctcagataaattttttattcatggtatatgtgaaaaaggaaagctacatttttacaataaattttcattaaaaacgagatttagtgagttaatgttataaaatgcaaataaatattttttagatgttaatgttatgttttgtttttcaaagtaaaaagtactaaacctactcttttttagatgtggcttattattttttttcaattttgtgtggcctagagcaaatgcccttttttctccatgtaaacagggctctgcatgtgtatgataaactggtatgttttttttaattctgacaaaactttgaatagatatatattttttatgtgctaaaatttgggaatgtctataaagcttatatttttaaattatagacgttaaattctcaactttttgatatatcgtttaaatatttaagtttttgttaactttataattaaatagttaacttattcttattatattatttaaaggtcgatgttaacatttttttttttttttttttttttgaacaagatc

SEQ ID NO: 30505 - DNA, 1749 bp, Arabidopsis thaliana landsberg
tacgtgagcccagttgtatccatccatacccgactggtgagctcgggcgatcagctataagttgtttgtgtgattgaaatggtcagatatatcctatggttactagatgacaaaagagaaaagtctagttcaacacgtgctttaagaacagagaagatcaggactgtttctgagacgtaagacttgtaattacctgaccaaatgtatatccggcaccccgaggagagatgccccatccacatcggtcatcggggtcagaccataataagtcacacatcggcccttcatggggcacttcatgaactcgatcaaaaattccttatgttgtcaagggtctcgatagatggagataatccaccatgaaggcaaaatatttctgactcaacctgcagggaaaaaacataatgatttgatgattcccaaaaatttgtgtagaaaacaccaacgatttagtcagataaggcatacatgaaatcttccatatataacagatctccattctttgcatttttcagaatactaacgtcttgcaattgatgtgacactagcaaaagaaatacgacagcacagtacaaaagtactactttggttccaaataatactgccagcacaagacaaagaactgatcatctatattaattgactaccggacgaggatagacttatatgtgaacccccactaacaaaaaaggaagaaaaatgtgagacatgtatgataggtactaaccaaggctgtcagaggaaaatagtcgaagaggtctgtaaagattttccaaacatttgcgttgccgtacctaaaaaggaaaacatggtttgttaaatttattgcaaaatctatatcccaaataagctgcaaactaggatgtgtaagattatacaacatagaacaatactataagcaagtaatcataagcccaaaggattaacagaaacaggaagtaaagaaagaaaagacaattttggacaggctaccatacacacatacaatgcaacagcaaaaatataaggacaatagtaatgctaataataattaaaaaaattgtttgcatgcattagaaaataaggatattttttccagtataaggattttttccaggagactcactttcgcagacattcatcataaaatccataaacctgagtaatctgcgagatggaagaaaaagaagaaaagcctgtgtcagattaaaatagtaagatgataaaaaaatgtgcacaaaacgaattttgtagacaaaacagagacttataaaaaaggaaattgtgtgtcaaccaagatctcaacgatggaaaagactggatacacaatgaagtactgtatttaacatcagaaggtgaatttacaagtggaaccagagtaataaaatcataaagcattagtctacctgacgactttcatggtttcctctaagaatagtgattcgctgaggatatcgcatctttaaggcgactaacagctggaaagagaataagaaagagaaacagtatcagcatacttcatagtcacacccaaaatatatacattgtaaagaaaaaaatatccgtcaagttaatggtatcttgttaccaatataaaaagacaatgactggcttgccaatcagcctactcttaaatgaataaaaaaaggaagtctaaatatttcatcttcgtaccgtaacagtttcaacagaataataaccacggtccacatagtatcccataaacaggtaattggtatcagggcactgcaaaaagagaaaattatactt

SEQ ID NO: 30506 - DNA, 6174 bp, Arabidopsis thaliana landsberg
gacgttcttatcaaatctatccaaggagacattaccatgagtaacataatcaacctattacaagacattcgcttttggaggcagaaattttgacatgttcttttcacatgtgttaagaaagactgtaataatgtagtccatcatttaggtatgctagctcgtagtcagcccttatttttggttggctatgtctttccgccgatttggctttatgaacttctgtgtattgacgtttcaaattaattcaataagttcttggatatatatatatatatacatatatatatatatatctttaggttgtcatttatatctgaatatttgattttgtttggaatttgggtgttttgcccagtaatttcactaaatccaaaaaaaatcataattaggttaccaaactcttaaaaagagggtttgagggtcacttactccaatgatacaccttcaaatttatttttaaaactttttgtatttacattatagtgcttaatagtaacaataatcacttataatgataagagtttcataaataaatataaaatatacattataaaaacaactatgtcaaataacattaaaaacaaaaatttacatgatagtacaaaattttttagaaattaaaaaagaaacataacataaaacataaaaatgatttataaaattacatgtaaattacaaaattattcaatgtagttatgtctataatgctcccatagatgctcaatgtattatgatttttgtataaatttgtttttaaatgttatgtgtttttatattttaatatatttaaatttatattaataaatttctaataatttaatgtaatggatttttgggtatgatatttaaggactaaaatgaaatttagaaacatttttgatggtgtgaatagtgcaccctcaaatttgaagatttgagggtttgttagagattcaccaacacatgattcttcataaataaatttatacgttttttaaatgtcatgtgattttatggatattgtgaagtactacaaataaatattgcataatcactcccttaaaacccgacgaaattcatctatactattaagagagaatgaaggacagtaaacttacaagccatttaagccgtttgataaaaacacgttacaagaaaaaaaaaaaaataaagggtaaaatcgttaatatcagtactcttcgcagccgatccgagccgatcactaacccgacccgtaaaaacacacgccgatccctttcttttatcctaatatttaatattatctctcggcctctgtctctatctctcttgcctccatttccatacaaagatcttttgaagcgttttcctcaaagcttacgctcttgcagactctacgcttgacccggactcctcaaattatgtgattcagctccttcaagaagcgctgaagtgcccctcagatggtctccgtaagggacaagtaagtaaagagttcaacagttttcatttatgtaattcaatttctcaataagtcaattccttttctagagggtttgttggatcatccttcagactgccatagtatcagaatcccaatgtaaaactttttgttcttggtgcctggaataacttgttgatagtggaatgtggtcgcatctcaggagccaactctcttaaaaaccgtttagtatatttggtcaaaaggttatcctactaaatcatatgacattcaatatcatgaactcccgtttggtgtatttgcttgcaggcattgaacaacctggggagcgtatacgtggattgtgaaaagctggatcttgcagctgattgctacacaaacgcgctcaccatcaagcatacacgagctcaccaaggtcttgcacgtgtttatcacctgaaaaaccaacggaaagctgcttatgatgaaatgacaaagctaatagagaaggctcagaacaatgcgtcggcatatgagaagcgctccgaatattgtgaccgcgagatggctcagagcgacctttgcctggcaacacaacttgaccctctccgaacctatccttacagatacagagccgcaggtatgttaatgacacaaccaagttcttgtttatcctccttttgtctgttgtttataattggatgccagaaacaagacaacaatggctgatcctttctgagggattctcccacgtataaaagtgttagaaaaacgtagaacccagcttatgtggtgatgaaaacggaaatgataatttgtgaccccaacacatgaaagaaatgagatttcgatcatctttctggagatagaaacagaactgcgagtgttatatacttctgtacttataccgaattgatatgcagtttctctggtttggttttggtgaatttgaatatgaaaaatagttttgctaagaccagagtatcaagttttctttttaagtttcgctttgtttaacatgaactcttggttgcagttcttatggacgaccacaaagaaagtgaagccatagacgagctttcgagggcgatatcatttaaaccagatcttcagctattacatctacgagcagcattctatgattcaatgggagaaggagcgtctgctataaaagattgtgaagcagcattatgtattgatccaggtcatgcagatacactcgagctctaccacaaagctcgtgaaccaaacgaccaaaagtagaacaaaactatcaatttggtttgatgggcaaaaatatttctcttcttccctcctggtatggcttctacactgtttcattttccttgtgcaaaacagaacttggagcaaatcaaagaaagcttggtttgagtgaaccagggaaaaagcaagcatagccatgtaaatagaaacttttttatatattattttttttctctataattttggttattggggggtgagaggatactttataagtagtgcacagagtgtttcttgctgctaaagataatacgttttctggtcaacaaaaaaaagggaaaaccacgaagaagaacttacctctggtgaaattggacttcttcttctgtcctatttctagatgtattattgcttctttctttttatttatttttttcatcactggaattatgtaaaattgtatctgtaacttcttcacctttttttttttacatgtttcttgtattgattctccaaaagcatccggggatttgttttttatcctcctgaaacaggaaaacaaagaaactattcattcttcttacatttcaacatgtttcaccaagagtatcctcaatatttcaacattcttttttatcacttgatgaggaaatcatctccttacttctagatttgggtttgagttcttgtttggtttcatgatcgattttatcaccacatggttggattggaaactcaactttttccaaagctctcctgacctgtgaacacaataaagaggccacaaatatcggttttgcatacacgagaaagtttcaaactttcaacaacttctcattaaatttcaactttcagctaacaaactagaaaagaagagtgtcaacacaacaaagatctctcccaaactcacaattttgccttctttgagtcgcaaacaagaacatacccttcccactcagatgattttgtatcttacggttgaagaaatgatggatattaaccgatcccgaagattgaacttcaatgctccattcttgtcgacgaagcgccatgtcacccaagagaagcttccgggccagtttccggaagcttctgttccattttgctgggaaaccgctcccgggatgcccaagaactcgtctcatttgaaaaatgacgctgaatctgaaacgccccggctcaaactacctcctggaagactgaaggttacgtatttttctctgttttccggttttaggtttttcaatccattcataaccaattcgttttgtcattctttccacatcacaggtgcacgttactggtgaaaatgatgatcttgatgacgcaagtgagagtttacaccagctaaattgttgcatatgaagaacgcaacaatcaggaatatttcatcaaaccaccaagatgcggtcgatgtcttgtctctcacgcaagctatagacatggtcgaactcccaaaagatagcgtttcagaatcagatgatgatagaagcagcgtaggaggtgactcaaacgggtacttaacaatggagagcacagagcgaagcgaagatatgtcaccgagttacataatagagcggtttctaccggatgcagcggctctagcagccgtgacatcagcggctagccaaaggaggaagaagaagctctcttatttgagtggtgaaacggtgagacagtcttgtttttcaccaaaagcttgtggattacatgtattgctgccttggagcactaagcatagaatctgtggcgtcaaaaacgccttttctccatcttcacacgtccacttgcaacccaagtttattacaaaagataactagatgaattcaggtacttgttattacagtatttagactatatatatgatatattgttgtgtgacaccccttttttggtttcttgtaaaatgcggtggttaataataacacactaaaaaaaaagcatgtacaaagacaaggcttatagccaaaattgatgcagctagctctaaaacaattatgtagtatgtattttactatatatcatccacaatttatgttttgaaatgtttttgacctaagaattgtttttccagatttcatgttttcttataatagattaggcttgcagattggttcaatttgattgatggattttttttttttttttttttttttgtattttgttaaagttgaatgatttgataagatgtgcaagtgtaactatctgaagatctttttctatatttgtaatgtaaaataaaaaaaaaccttaacaaatgactttgccttttgtctgaatttcttgaaagagaaaactaagcaaatttttgcaaaaattaggaaagaaatctgagattgcaaagagatgaaacttgacaatacagagtggcccattgtgatgggctttagctttgggtaccaaatctgctgagcaacatgacaatttttttaaagattaaatcgtaattcttcttttcatttctttttcctaaaaatccctacctctttaaaaaagtaaaaagtaatacccatactaatgctagttttttttgttaaataatagtggctagctgcaataaataaataaaataatgactttttttttccttggggcaaaaaccattatgactagttgctatatacataaaaaatatatattggaaaatggttgcgacaaaagaagtacacttgaaaattggtaaaattgcacaaattcagatctattcgaataaagggacgcgtggatccgttagaatcagaccaagaatgtaaaaatgcttttttagacagtttagcaaacacgtgtaattaagtatatggtacaacaacaagttacgaggtacgtgtaaaaaccacatgaccgcttgtcggtatcagtggacgtgtcacgttcttttctagattttcataatttccaccgactaattacgtattagtataactttacataattaaatattaatattatctcattgtttgcctaagacaatattagagcattattacactgtattatatttttggaaccaatggtaaggaaagaaacaaaaaggaaggagatatggaagaagacgttccagaagcagagaagctcatgtgtccaaaagaagtcgtagaaaagatcaaagataaacaagaagaagaagaagacgagaaaggagctaaaggtgggattttgaacaatctgatatccaattttatggattgtacaacaacaacagtagagggaaaatctagtgaaaacattcagaaatctctatgtgaagatgaagatgagaaggaacaagagagcccaagtgttggaatcttagagaagattatttctcatctgccaggtacggtgctctcgattttagtgttaaaggcgtaaatttgcaataatctcggatttttccatttagtgttaaccttcgatctgtcccagtgttttttgggcaaagagaatgttcgctcttgagattagttggattagttagacgcttcgaaggttaactttcgtggtaaatcttacgaagatagtgttaaaatatggtggacttgtattaaatctaatggcttaattatattatc

SEQ ID NO: 30507 - DNA, 4369 bp, Arabidopsis thaliana landsberg
ctattgcattttaaagtgtatttctgtcttgacaaagttgaatttacgcactcactcttaaaatattaataatgattactataaaatccatttagtcattatatatataaaatgtaaaagattggatctcaaatatctaaaaacgttgcaagcacatgaactatataagatggttgattgtacaactgattttaaaaaggaaaattaagattatccaaattcaataggcccaaaaggccgttgtacctaataacaacccaatactaaacgactaatagtctaatacatgatacatgtatgtacccatgataaataatcaaggagatggagaagaagaagatttgaaattcgagtaagaaaatataaagatgattttacaagtaaaatggttataggtaaaacggttaacaggtaatgtatattcatcctcatccctactttaacagttcaataattaaaagaatcttatacttcataattgaatcgttttatctaatatcacttccttaatatagtggggtatcacatttcacctcaacaaagttaaggtaacacattacaaaactttcaactcctagttctaggtacacagatctaacatgtctacgtttagcttaaacttttttaagggaacatagttagacgaaaacatttcatagatattactaaaaagctttgccataaacctgaatactagtccttacatgtacgaaacatgtctaaacggctatcctcaagtcgtagagagtacgcaagtttcttgtactcgccccaagtaaatgtttggtacaaccgtggctgattcatcgtcataaccatcgccgaaagaggcccaatcttcgcctgaagcggtggtccggcaaagtacgccgtggatagccggctttcttctccgtaggtcaatgctctatgccttacacttataaatctcccgttcgtcatcaccttaaaatccaagaaccaattaatataaggtccacaacattgataaatgacagaaaaaatgttaaagtaatatcttgtgaccaaaagaaagataaaaacatgtttaatgtttagtttaggtttggcttttatggtttcttgtttgatgattttataaataaatggttatagtttagtatatgttcgatttttacggtttctgatttcgtttaggactaacaatttttttttttaattacgatctttaatcaccacaaataaaaatgatgtaataaaaaaaatgtaatcaagaaagaaagaaaaaagaagacattgacctgtaacaagtctcctacattgacgcagaaagctgaagggtcaggggagacagaaacccacatgccatctgaattggacacttggagccctcctacaccgttagatctaagaactgttaaaatctgagggtcggtgtgttctccgaagccaactcttgtcagtgacacagattggtcagaaagattggcttcaccaaagaattgatcggacggtggatgaatgattcactctcagaacggagtcgccatcgacggagctgattaacctactgaaactgtgaggtgggacatgaagtccctcagccgtcagatctaagatctcacgagccaactgcttaactgcttctatgtaacaattcactgccgagctgtcaaacatatacgtcacacatcagcacgagattcatttatttttggttacttatagaaatatacgaaatatatccacgtaaccttaatatttctactttcagaaagaagttgggtttttttctatcaaagaaaaaaaaagatagacaaaaatgaatcattattgagccattattgagttaagtacaaaaaaaaactgttgaaacattagtacgaacaattatacaacttcgtaagagttagtatatttgagaacaaagactagcagattgtagtatatataagtttttctaaaagctcaaatataaaatagtacatgtcatgtatcatgtagattagtagatacacaattcttatccatacactgttattgagagagactattacatttttttagtttactacatgtctggtacgtttggtttctccagactctagtattgtttaaaagcttccaaaataaatgaaaaacaagcctatatctatttaaatacataaaaggtgaactgtttgtatttagtatcaataattaatgcttccatgagctataacggtctccttttacataaatgtagacctacaagttagcacttaattgaatttatatatccggttatgctggcatattagcacgcattagaaaataatttacataaacgtgcacttggcctacatataataatcatgtgcatttatcacattaatatttttgaagtttggtagatatatagtataagcttttgaacgtatccaagctatacatgcagttgtatattttacatgcaactatatataaactatttcaatataatttcattaaaatattaataatgattaggttaaaatgagaccaaacccgaaccgtatatatctagaaatacagttactatacgtctacctgaaggagagctgagagcgaaaggcagggtcgttagtgtgaaacagcaaatactcgacctcaccagagtcaccgttgagtccaatgtctctaaaaccataccggaaaggctggttaactggtcggacagatttcttctcgtgagccggtttagcaaagaagtttatagactcttgctccattcttgagatggtggtttggtcaacgccatggttgatgactttgaagaagccgagactctcgcaggctttgactatctgcatcgacacttgtgatctctcctgcgacatgtctattattggtatgtcttgatctacggccacgattttctgggaccctttcaccatttttagagaaagggagagagggattttatgagagaagatgataaggaagaaattttcaacattagtgtatgtatgtgtggctatatttatatacacactgcacacaagagagagaattgttggcaaattaaaattggttatcacgtgcatgtattaggcaccaacgggtattcgggtaatactatgtttggtggagtactcttataaatttataaggactaaaggtagataattaacgaaaaagagtattgcatgatgctttgttacgattaaagttttctaaacgcatcagaattaagacttcaattagctttttggtttttcctttttcactgaaattttgctttcttcttttcttacacaaatcattttaactgatgatgaattttttagcaatacaactacgaccactttacagaataaaattaagaagttactaactgatagaatttcatcttcttctttttttgtgaattttttttatctattgttaagatgaatttgttaaaatcctttatactttcaagtgtaggtacatatatattaaacataaatagtcaaaacgcgtgttctctatgtattatctcatatgtaaatgcttaatatgaacccatcattcaacatctaactcaaaactcaatttcgtgttagatcattgcacctaatattattttttgtcaccccatcatgtaatatacttcccctaccttttaggtaagaatgcatagtactattcttcggatattcgtcgtaaacctctttcacatatattaatttgtattcctcgggatattcagctgatcaaagacttctggctaaagtagaacccgcaaattcccaatttgcaaaagaagtttgacctctttatactattcaacatccacaatacaattttattgttttctttttggaatcttgctttcctctagttgaataaaataaaagataatatatgtgagatagtattataataaccgaccggtcgatataatattctagataattcccaacaaaatacttgaatgatttacaactaaaaaaaagtagatattggcggagatatattgtgacgagtttattcgcttatgataattttttattccgtgggtttcttgaaactgcaaagagatggttactgtttcaataaaccagaattctttttaaaagaaagtcaaatataaattagataaaaaataacatgggtttgaatttggtcgggtcaagtaatgaaccagtggtacattcatatatatggaacatggttttctatatatatacaaatttattgaccaccaactgccgcattttatatttatacatttgttctgctttgtagccagacttttatggttagcttcattgactcgaatttatattagtttaaaaatatagtccatttattcgtgttcgaatgtatgtagtgggtttaacgatgagatcggcggggatttaatgtgatcagtatgtggtaaacgcatttagaatactaaatg

SEQ ID NO: 30508 - DNA, 3177 bp, Arabidopsis thaliana landsberg
gtcctttcatcaattcaatggcagacccaaggttcatgcttctctctctctgtctaacctcggcttgaaatctttttcagattttgattgttcctttttctttttcctgtttgtctccagagttgcagttgttactggttccaacaaagggattgggtttgagatttgcaggcaactagcttacaatgggataactgtggttttaactgcgagagatgaaaacaagggtcttgctgctgtccaaaagctcaagactgagaatggtttttctgatcaagccatctcctttcaccctcttgatgtctccaacccagacaccatcgcttctcttgctgcttttgtcaagacccgcttcggcaaactcgatattctggcaagtttctcttttcttttcctattatcatcaatctagatctactaatcgtggctttaatcagtttcactgtcggatcttattaggtagctgcacttccctttccatgatcacatttcttaactaagatctgatcctttttagggattgagatacttcttcaacaacttcttgtctgttgcgactaggatacatacatgttaactagaaaggatataactcttaagcgagcattatctgaaaatagcaattctgttctgtctactcttttctgatttcttgtttggtatatatgtcttcaggttaataatgccggagttggaggggcgaatgttaatgttgatgttctcaaagctcagattgctgaggtacactttcctactttctcttacctttttgaaatatatactgcacaagcttgagaggtggtcttacatataaatgactactagtgcaggctggtgcgccaactgatatttccaagataatgagtgatacatatgagatagtcgaggagtgtgttaaaacaaactactacggcgttaagcgaatgtgcgaggccatgattcctctccttcaatcttctgattccccaagaatcgtcagcatcgcttccaccatgggaaagttagaggtaccatcttgatttcttctagtcaataaacttaaaggaagggatcgtttatgaaattgactctttggctggttaattctcgtattttggtgttgggtaaaggatgaatcttgtttgtgtgcagaatgtttcaaatgaatgggcaaaaggagtgctgagtgatgctgagaacctaacagaagagaaaatagatgaagtgatcaatgagtacctcaaggattacaaagaaggtgcattacaagtcaaaggttggccaacagtgatgtctggatacatactatcgaaagctgcagtgatcgcattgacacgagtattggctaagcgacacaaatcgttcatcatcaacagtgtttgtcctggtttcgtaaacacagaaatcaatttcaacactgggatcttgagcgttgaagaaggtgcagcgagtccagtgaaactggctttggtccctaatggagacccatctggtcttttctttgatcgcgccaatgtctccaacttttgattcttcaatcttatgtgttcggttgggtgttggtttgtatattttattatctcatcaatttagcagaaaataaagtgaaccccaaactatatatcaaccaaacttggttatattataaagcttcttcaatatttatgtggttttgtattcccaaaataatgtatttttcctcttgaatcctatcggcgtgtttccccacctaggttcagatagtttgcctgtgcgcgttctcgtgacgcaaaattgttattgggctgctagaaggcccattttaagtgagtctgtgagactatataaatgccctaagtctcggaaaagaaaaaaagtgtagccgtaatttgtaattgatcataatgaagccggaaactaagagaagcaccgccacaacaagacggcggaccaatgacggtggttctccgttcaatttcagctctctcaagcaagcgatcgaggccatagatgctgcaaaggatacttcaatcaatctatcgtcgttgtctgtggcgttatccgccgcgagtcgtgagatgaagcaaaggaaggagaaatctcaccgtaggcgagaaaccaggaagagggacaagaagaagaagaagaagaaggatagtaacaacaatacgaagctagtgatcggaacaaagccggaaacggatgcagaattgcgaagatggttttcatacttcgacaaatcctttaaactatcattgccgagaaaggtgaaactaacatcgccgagaaagctcaacgatcataataaaaacttgaaggaagcgccgatttgtgagttgaatacagatttctcgatgaatcactgctctgaatcctttagatactaggaacaacgcttagcttcatttttttctttttcctactctatgaaaatgttaccattctatttgtcctctttattcaatgaaatgttggagatgatgagtgcatgcgttacgcgatcataaataataatgagaatcatatatatgcaaaatacgatcatggtgtcataatattacatataagaatcacatgggttccgagacaacgtgggggttcttcatttactagagagcttctccagcctttttttttgcactctctgttgtgttgactcataattcaaatttaacacctcgtaatgcttatctgttcttattattctacagagactgcaatgtttatcattatcttatataccatagaatctaacacaaacattaaagtagtcaagcaagacaaatttaacaccaagtaatagtaaaacagacacaaactatatatggaacatgtggacaatgaaactagttcgcctttccttgtttcccttttatcagaccatcttggacttgggatgtgacggcaatagctgcacaagcgagagattgatggcttttattcattggtttgatcccaagattgcaacacacacatatatatataagcaaactgttttcttgaaatgagatctggtaaatatacctgataacaagagataagtgatgaggcgaatccgaaagcacctgtgactcggggagtgactttctttggagccaattgaagcaatccgaaagcaacaactacatccatccctgctttgatcagagccaaagacctctcgttgatttctgtacctttgacggtattgctcaatctggttactgaggtattttaaaa

SEQ ID NO: 30509 - DNA, 2617 bp, Arabidopsis thaliana landsberg
gagaaaatatatatatgtaacacttccttttaggcttatatttcttcttactacctttactctccaacatctcaaacaactcaaacgccatctgaaatcacccggacagattaaattttaacgtggaaagactgttaggttgtttgtgcataatttaaaacactttaaagcccaatagagagaactcattctaaacaaaaaataaaacagctcgtgaggagagatgttcgttagagttataagccattgactaatcataggcacaaataggaaaattttgaaactgaatccatacatggtgatagatatagcaaaggcactcgggcatgaatctaaggtttgcagcttctccccatattaaaagatagagtcctgtatatagtagtttcctctgttgtacctcttgctgaatagtaggcaaccttcaaatgccaacaagaggataagtagacaggaagtatgaggcatttagtatgatgcataagaactcaaatctttcttttattttggttaagatacaaaaaaaatatgaaaactctttgaggcattacaataaagaaccctcaccaaaggctgcttttccgacccaagtatttgcaccactttttgtagtttctgaaaagtttcttcatcactatggtcaaggcacgatcatccaactagagaagatattgtacacaatcccttagcacaagtacaactgcctaggcagagagagaaaaaagaaagaaatcatcacattcaagtccaacaaaatgcatacctttggttgttggtcaggttttggaaattgtcggatgtggacattagcaagtaacaagatcaagtgctctctttgattcaaaacattatctttctgaaattcaaaggttgaataacattcagtacagacaaaaactctttaagtcaaataatcaaaacaggatatttgctttacatcacctgaaaaccaaacatagactgaagccagtctagaatgtcttcatcgagtttcttcttgtgacctgctgaacatggtaatccccttgtatttctaagagcggctacagcagcttgtatctacagaacagtattcaaacatattatgtggactgaaagacaataaaacagaaaaatagaagacaagctgagaatctggataacctcaggcaatctcattattgcctgattctgactatcagggtcaaggggaagtatattgtaaggcacgtaaatctgggtcttctcttccaccttattgtgcgtttccaaaatctacagcaaaagagaggatgatcagaaacaattttggttaactagatcatgagagtttcaagatgtttggccaaagcatttgtaacgactcgcacaagaatgagactataagatcaatatctactatgagacttcacctcatcagccacttccacatcttctgtttgattaacagccttcaagacttcaaagagaacggcagcagtttgataggcctttgtaagttgagcactaaaggtaaaatattgtaaatgagtggaaaacacagtaagaggtcaagttgcaagaaaaaaaacagcacatttgaaggaaaacatttagtgaaacacaaaccggtcagctttatccgcagcattcagcaaagcttggatgtatttcttgtagtagtgttgatagaaactctgcatttcacgtgcatcactcttttgccttcctgccaaagttgtttcattctcctgaagaagtaatcagaaacgtaaacggcatgagttcaacacttaaacacaacatgttagtcaaatcaataaagtgtatacattcatatttaccctttctaatcgttgaagaagcgcggtcttaaactggcgaacaccacgaccacttgaagttggatcaagcctatgcgccttctcaaatgcgtagaaacgacctggtaattttgttattcaaagctaatttaagctgagaaaagaagttattttatgattcacaatcaagttaatgaaattgttacaactcacataggtaagcaactcgtggattactagcttcaacttcattagccacacgtagaatcggagcaatctcaactaaagaagagggaacaacttcactatcaagcatagcctctccgagactaccaacagtctgagtccgcagaatccgcctctgcggtggaggcggatcaggttcccttctttgagccatattttccgacaatcaaactcagctaccaaattaaaatacttgttaaaaccttgagagacttgtgaactcaaacataagcgatagagagagactaggatccaagataatatccagaacagtaagatttactttcacagagaagcgaatttcggattcatccacagaaaagcaaacatcactgtacgcgcaataaacgcgaaaagctgttttctttctataaagaaaggtgaaagacccaacgaagtcccccaaaaaccagtaaagtagccgacgatgtaaaagcaaaaaacagatattttaactacccaattcgacaagacaatccatagctaaattactggtcctagaaacagagaggattaaactttcgaaagccttaaaacaatctccaataaaaaaaaaaaaaacgaaattgggttacacgacctagaaaacg

SEQ ID NO: 30510 - DNA, 752 bp, Arabidopsis thaliana landsberg
  unsure (1)..(752): unsure at all n locations
aaggtatcgacactttcagctcaaaccttctttttaccctcttttttattaccataggcgaatctagagtaatattgtggtgttactttaacaaatatacccgggaacacccatagatcctatatatccactccaatgatgcactatttttagagaaacatcccaaatatgaatacactatctccaaaatatagtgttagagttgggtttcgcaatgtgagttcatagaagttgcatataaagcataaatatacnccgtaaagatagatggctcactatccaccagcaactttcaattaaaaagtaacattttgcagaattcatatttctctctttgttcncaagctttatgtcacattgtttcacatgcatgggcagaatgggctgattggcacatatgtgcacttacatgtccgtgcgctgtgcgcatctgtaaatgttcatgtctacatggtaaacaagtacgcgtattgaatacgtacacatacatacctctaaaatggcgtattcacgagaaatccaaaatacaatatgggatcaatatccaatatcagctgaattcttcggataacttagaatctatatataaagcaaaaaccttataatatactattaactttatctcaaaaaggaaagtggttaattctgaatttggtcagtctttttaattttaaaataaatagaaaaagggcggcgcatagtagaagttttgtcaaatgtcaggctaacacgcatccttaaattgtgcaaga

SEQ ID NO: 30511 - DNA, 3495 bp, Arabidopsis thaliana landsberg
ctaaaaattcgcaccaattcttgtagttcttaaagagctttgacatgacagtatcaacggctctgtcatcgagctgcatatatagaataaatagatcaagaatctgttgctaaaggaaacgtttttaatagatgaagatatataatggaatattgagataatgctttgtttttctatcaacattggacaattctgtttaagggtcttggaaaagaaaccccttgatataaatgaataaacattggaaaattctattatgttgttcacaaggtcgatgaacgttaatcagacaatagccaaagctctgaattaccactctactcatccctagtgttggtgggtgtcaaaacacatcccaaaatgctatataggtgaacgggtagaactatcaaaaggtaccttgttcagaggttctggcttgggagtcaatcttatgtgattatcagcaaataaacaaaccagatgttccctctggtttctgacattgtctctctgtgaaaatcaaagaaatgaaacgtaagaaatatgtctcactggtttaacatcaatacatcagatcttcgtgttactctttcccgatcaccaacttgcctggaatccgaacatagctcttaaccagtcaagaagatccagatttccggttttctttcggtgctgctcaaacccagatggccagttcaatccacgagtgttccccaaggcagctacagcggctttgacctagtcatcaaacagcgtaaagaggtataagaaggcagatatcagaattgagtagcgattagtttaaagaattggaagaattattcaaacagtaaatacctcctcaagctgcataacagactgcgaggccccagcagaatccaaaggaagaatgttgtagggtgcataaatttcgttcttttcttggacatctctagcagctgcaataatctactcagaaacacatatgggaacgttttaaactcccatctcaattaactgaataagcaatattttatagctgttctggttgctctgaaaaaatagtatttggacacaaacctcaggagctactgcttcaactttctcgctcttgttaactgccatgagcacttcaaagagcactccagccgtctggtatgctttaccaagctgagctctgcaagatgttggttcaaaaaaagtccgtcagaagaagaacactgcattatttatcatcaaagtcccatgtaatccgaatatgccaacatggccaaagtttggaaaatacatgagtgtatatatacacaacaaccatctttacctgtctgcttgatctccttgatcaagtgccctgacatagtgctcataatattgttgatagaagctctcaacttcccgtccatcagtttttttcaccctagaagcaagactggaagcattgtcctgtgttgataaatttgttattatctctactcaggttagaaaaatatgtcattatctgtatcatttcaaatggatattctcaaagtgtaaaacaaattctactgtgtaatccccatttaagaggaattttgcaaactaaagcttgtcaagtagctggactgtatcatatgttggaggtctgagatgatgacatattaaactggaatttgaacacatccttaatgaaaactaccgatggagaaatccacaagttaatacttgctatctatgtgtagtgtctatatgataaaagcctgatataaagtcccatatgacaatatttactgtgttcaagaaaacagatagaatagtaagagatgattaccctttctaatctttgaaagagaagtgtcttaaactgcctcacacctcgaccaccagagcttggatccaacctgtgagctttctcaaatgcataaaaccgacctatatacaaattacaaggaaaatttcaagtgagtcacacagcaagtgaagtatatcagcttaattctgcaaacaaaacaacaaggaaacgcaaatacatacagagataggcaacacgagggcgctcatgttcaatctctgcagcaacacgcagaataggagcaatggtaccaagggaggccggaaccacctcatgatcaaaaacttcaatagacactgttgtggcagcactacgagatggccgtctcatgagcccctgagggcctgagtcatgagatgtactactctgtgccatctctccctgttacaaaacattgaatcacaatgttaccaatcttctcaataaacaacaaaacacaaaacaaaatcgaaggattatattcaccaaaaacagctaatttttgtcaagcgattaagatgctacttttgaatttaggtatataacagattgattagaacaacactaggttacaagctcttgcgattccgcaacaaacaaacatgaacaatcaaaatggagctcgagcgaagcaatcgaacagagatttcacggaaactcaatcgaaatcgtacggaacaacaaaaggacctcgaaatcagcgcagacgataaacatggacaaaaatcaaaatcaggagctcgagcgatggagaagaaatcgaaaacgaaacgaaaacaaacatcgattcattgtttctcgtcacatttttcaaaacaaaatctcacggaagctgaatcgattcaatatacagtatcgaacgtaaaaattctacgaaaggaagaactcacgttagatgcgaagagctttcagatccccttccctgaagattagaagaaaacgaaaccaaaagtgagtgtaatttcgagacgatttacaaaaacggagaagtagcgacgaagattcacctgaagcagagacgaggtgactcagttaggcgtcgggcatgaacagatacagaggaaaaaaaaatggcgacgagaggaagaagaagaagaagaagaagggagagagagagagatcaaaaatggaggagaaaatgttgctttacggttttaagagggaaatgagagaatattttcagttagagagagatgccacgtggcgaaagaagagaggttaataaaatagcgattgtgggactgggaggtgtgtgtctctcacaaatggaggtccgtgtctttctcctttattttctgttatattccaagtttttctgtgacataattaatgtaactatgaacggattaacgaattattgttgttttacttgttttggtccatttctcagtttggtatcttttaccaatactacgatgttaaattaatttgtttgctttatatggtattatatcatgcatgcatggcctagtttttagtatgtatgaatctttgtagacattgctttttatggtatcatatcatgcatactcgatttcggatatgctcggattagcaagtagagattgtttggagaatgaacaagaattaaggaaattctcaaaatacgtgagatccaatctagaagaactatgtgtattaaaagcttttgaacttatttgaactcatcgttgattgtgtttattctttctacgaaaaccattatccattcgaacatatgtgtttaa

SEQ ID NO: 30512 - DNA, 2711 bp, Arabidopsis thaliana landsberg
ccaatcaattattaccgatcatgaatgataaaaaaaagaaaacacaagttgggaacaagctagctcacagagtgaatcaccgatgtggaagcggttgctgctggcccagtggctgtaaaccgctgaatcattctggagtgggactctccacccgaactcgtctccaaccttgaaatccctaggaccttccgccgccatggaagccaccacaagggcacaaatgcagagcattagtgttagattacaagtagatctcatcatcatcatcatcatcttcttgttcttttgtaagtatatagtatgtttgagaggaattcgtacgtagctttgatggttgtgtgtaaaaatgaaggtggctggctctgctttatataaacaaggagaaggaaagtggcggttgagctctccgaggccgaggagtcgtggagatgaatttgaaacggtttttatttaattcattcattctccttcgtgctgcaagtcatgggccacttcttcttcaccacgtcatcctaattactgacgtggaccaatcaccttctcctctgcgattttctctctaaacgctgcgtttcgactcccctgttgtcatttacaaatgatgatgatcggaactagaaactaggtagtttctgatggcggcggcggcgatgcacacatcggcggaattcatcaatctgaaacccaacatgtggaagaagaatcctgttcgggcctcgggttcttgctgtctgggcagcagcagtggtgatgaaatctctcggaaaaggaagcttccgattctcctcttcgacgtcatggacaccatcgtccgtgaccccttttaccaggacgttccggccttcttcgggtgagaaagtgaaatcctcgaatttatttctcgattcatcaatgataaactgaggttgtggatcagaatgccaatgaagcaactactagagtgcaagcacccgatggtctggatcgaatttgaaaagggtttgattgatgaggtgaggtaccaccactctttctttctttttttcttcatattatctcctctgacttttggttttaggaggagcttgctagaaacttctttatagatgggagggattttgatttggaaggtgagattgccatatagatagataggtaaatacacagagagagggtttcctcgtacctatttcaatcctctttattgcagggcttaaggagtgcatgaggtcaggttactcctacttagatggcatgcaagagctccttcaaactttggcagctgacgacttcgagattcatgctttcactaactatcccatctggtttccatcccttgcctttcactctttgaaacggagcttcatgtctctttgtttactcttgtcgtgtttccataggtacaacattatcgaagacaagttaaagctttctgcctacttatcatggacgttttgctcctgtattgctggtacatcacacatctcttgcctctttttactacttattgcttgtcagatccaaaccattcctactacatacaaagctcctcatgtgttatatctttcagggaagagaaagcctgatccagagttctacctcgaggttgtgggacacctcggagttgaaccttgcgactgtatattcattgatgacaggttataacatgaactcaatgcctttataacttaaaagaaagaaaccattttgatctgaaggagtgtctgatacgcaggccaaccaacgtcaagtgtgctatagagatagggatgggtgggttatgctttgagaatgcagattcgctcgctaaggatctctcagatctagggatcaacgtctctgtacccaaattatgattgtaatttcatcacaacgcatcatcttaaatgtattgcatcagagaaatactcaaaagagaaatacattgtttttgggattgcaagtagagtctttgttggattatataaagcagcgaaaatattgagactagggagtggagagcacaaggacagtaaagaaggaagaggaagcgaggaagatgaaggagaggaagactaagaggagagacagggcgacatgattgcagaaagaagaaagggtcttgcagaagtcggggagaggagtgtgcctgatgccggttttgttgaggttggtaactccggaaccggctgatccagcgctcatcatcaaataacaaaagagctgcgtgcacacagtaaatcaaatgggttacattcggaagaaaagggaatggagaaaaggagacgaggaacctgatcggaggtgaagcaaagccaagcttgcaagcgggaaggcgtgatgggagatccggtgacgagtctgtaaacaccgaggcagagctgtaacagggagtagagcacggtccctgcgcatgcccccaccacaaaccttaacaccaaacaactctttcttagtgagatgaatgaaatatacactatatataatcacaaagtttaaaactagctaggacacacaataatgtcatgttgttgtttggttcacggatgtgtttctgttcaccggaatatctgtcatccgaacacacacattctgttttgctgcttttcttttattataatatatatatatgcattcagataaaaagaaaattctaattgctatgtctgtccctaattataatgcacgtaagaagaagaagacgaagaagaagaagactgactggtaggagggagagaaagaccagtggagga

SEQ ID NO: 30513 - DNA, 1987 bp, Arabidopsis thaliana landsberg
tgtgcagaaaacggagaaacgcttcaagttatcaattattaagttttgcagaaatttgagcctcactttgacggatttcaaagaattgctacggttcttatgtatctgtatgtaaaccctttataatctttctcatcagccatgtaaaaattttacaatatttgcataagttaatcttgttttcttttctcatcgtatgactaattagctcggacgttgataaaggcggcgaaacagttttccctgaagccaaaggaattaaaagtaaaaaaggagtctctgttagaccgaagaagggagacgctttactcttttggagcatgagacccgacgggtctcgagaccattcgagtaagcatggtaagaggcattgcctttctctaaacttgttttaaatcgtaataaacccttaattataacttgtttgagatcatgagatgtaaaacaaatttctcaaaaatttgtctgtttgatttaggtgggagtccagtaatcaaaggaaccaagtgggcatcaaccaaatggttccgctctcataagttcatcaactctacacaacattccaagaggtaatctctgaccatcacttcgaatgtgataatcaatcctttggatcatctcagattttttttaatgtttttgtacaaccttcacaagataattttcatcctctagctctttagattactttgtgtatttgtgtttattttctaatggtagagtatacttctatcaatgcagcattgacaatgcttatgaacaacaacaacaaaaaaagagctcgcatgtttatttgaaagaaaaaaaatgactcgacagtgataatgtttccaattgactagcacgaagcaagagacgaagaagaacaaaagcaaaagtttaaattaaagtcattctcgtcctcctccctgcaaacatttttattgcaacaaaccttgggatatataactcaagtctctggtgttaccagatttattgtttgatcaagttcctgataacgtattgcaaaatccctccgtgatcgaaataagccaactccacctgtcgattccaaattcctcttacttatctcatctcattttgttttagagctaaaaaaaaaactcaaagacgaaaagacgaaaatatatcatctagagataacttacctctgtgtcaaatcggagtgtacatgtgaaagatttgccattgtttgtgacgactgttacatcttgtcctggtttgatctcactaacattgtttgggagctcaatggtgtaaagctcctgacccgttaggccaagggtctcagcatcttctcccgccttgaagcacaaaggtatgattcccattcccaccaaattgcttcggtgaattcgctcgaagctctttgaaatcacagctttcacaccctgttgtcacaattttttaaagaaaccgcataaaataagtgtaagaacgtgtttgttaaatacagaaaatgtaccagaagcattggacccttggcagcccaatcacgagaacttccactaccgtattcagcaccagccaaaatgattgtgtcgcgtccctcgttcctatatttctggtacagcacgaggagagaataatctgattaaaacaaagctatgaactgctattctaattccaactgaccaaatcagagaatcaaacaacaaaatttccacccccaagacaatctgctgagacattattattacctcagccttcagtaactgttctataaaccaactcacaacagctctaatctactacattcagtcctaggctagatacagtagacctatagctaagagtagagctgtactgcttattcaaagcttatcgtaatcctaccccaacctcatgaccaaagagcttgaatttgatgttttcaaaaggataaaaaaaaatgtgagattataccacgccaccctcgaaaacagaaagcttctctccagagagaatataaactgttttgggaccaacttctcctttccagcgtttg

SEQ ID NO: 30514 - DNA, 4036 bp, Arabidopsis thaliana landsberg
gaatagggggaagaggaaaatcaatgtaagataagcaaaagagattttttgtattacctaaaatcatctacatcagcaattctctgaactctccacttctttatgggccattttgatagtatggcgtttccatactcaggcgcccagctctctgcaaacacgtatttcatacctaaggcggaagccaaatctgataatggtttcataagtgtctcttcctctgctttcacgtcttgtaaagccaagatgtctgcatccaactctcttaacaattcagctatgcttcttctgctgctgtatccgttaaagctttcttggtcccaccaacaagagggaagacacacgggagatctcatcgagagacttcctctgttttccttcccgtcgttatcattctctaccatactcagaaagctgtagctctgtgctaaggaaatctcattgtctgggagattaatgcaaacctttggtttcctgactgcagaagaatgtaatggagactgcttcagaatcccttttggagaagggcatgtgatgttgctgctatctagatgaccaagaaaagctgtttcctccatggtttgcacaacaggcgcaagtgagaacatagccacgttaaacgttgcaacccgaatatgtcttccagagtttgagctcagatggatagaagaaacttcagattccggactctcttttcttcgagctctccaccttgctttcctgaacctcctgactataactctagccctcacccgtttcttgataacccatctaagtcttgaaaaaaggcaaccaagcttccttctaaacacacacaacatgtaatctctctgttattctgcttcaaaaaatggaaacagctacaaaagattaacactttgagagctttcaaaacaaagatttgaacttttcatgagacaattaaacaaacaacaagactataatatcatatcaatgaagagatgagatgattaaaagtatttatgaagagaaagcaatgagccaactgctccaaatttggtgaatagaggataataactctattttttgttgagcgttaattaactctattctaaaatgtcaaacaatgtaaacctgctaccagagaaagaaagaacaacaaggaaccaaaaccttacctgttgatcaaccatctccacgaaattctcccaagtaggttaaacagaaaactgacaaaaaaaaaatatattctgtacacaacttgacttctgtgaagggtttagattgtgcatgtgtagatagagtaccatattttatgattaaaatattaatatataaacaagctattacttgactttatcaaacaaattaccaaccctgggaccaaaaaaatttccactcagtttggcatgctcttgaatgatattttcaagcaaaccttaagcaggaggaaggatgctaaaaacttatcgaagaacttgatgagactattgaaacatgatattaatttcctggtttagcggatcagtatcattcatcatgggtactaggaaagacctgtaacgccaaacaactagagcaacaaaatgtcaaaattgagaccttagccaaaaatacatatgcaaattctgactccggcttcaactgaaaacaaaagcaaatatctcaagtgtcacttccatgtacttagtgtcagaggtttaacttaccaccatcaggtctactaaattgtgcattccaggaagaagagtagtcatctttctctgtgtaatcaagagacataatggaatgaggcatagtcacttgcattgaagcagaactcttaacacaaacaactgaaagtagtaatcctccacaagaaattgcaaaacataaaattcaaagcttgtgtaactcaggaatgaacaataatcacttgatgatatattgcaaggggtttgtttctgtaaaattgacccaagatgaaatttttatttcctttatcataaacccatttcacacgcttttatttcactatatgagtgagaatattttcagaaatcgaaatccaaattgtaagaaaaaaattcgtgtaatgctcataatctcgatcgttttgtgtgtatatgtatattgtatatacggagcagagaaagagaccttgaggtaggcgcgagaatcaagtaaaagcgacggtgtccgacgaaactcaccattcgatcaccgtcgccgtcatcactgttccgccattgcaaagacctttacgttaaccggaaattagtggagctcggaattaaaccagactggtttaatcagtcttaaaccacaaacatatcatttattcacgaatggccctttaattttaagaaatgtacaattttgaccctttgtaaacgaaaatttatattttgaccctttcgtatatgaatttcacgtttgacatttgacatttccacatttgagccacatttgacatttccacgaagtgatttagtaaaacattaaatggaagaaaaaaaaaggttacaacaggcaaaattggatttaaattaaccatctttaaaagttacatcctcagaacaaagcatggccatgttgtccttcctctaatttcttctgcttcttctttctctttttctccatctttgtatctcctcgtgatgccatacgttttgcttgctgtgaccttatctccaatagcttggcctttgcatctttgaagggagcatcagaacttgcatccatcatttgctgcaaaacaccacagcttcactttaaatacccacaaagatgagataaaatgctaaaaatgaacataatccaaagtgcgaaatgtttttaccttgacatgatccatggcggccaaattgaaaccgattgtatctttgcatgcctgataagttccagattcatatcaaaaccaattcagaaataaaaagatatacaactcaacaacatttttcctctttgctaaccttgatttctgagtaaagaatgtccctgagaacgcttaagattggtctggcagatggtgttgttaccaactggttgtgatgtgtctgtaatataatggttgcgattctgctaaccaactctacctgcaggatttggtaacaaacattagagatattctaagacgagaaggatggatctataatctgttgtaagaatataacaggttgatgacccagatcgagtacattctactttacaacacgacgctatatctataagcccttcagagctaaaatctagaatctacgacacaaaaggagtatataatttaccttttcgggaattaaactccagtctttcatgtagcaaagaaacttcaaagaatctgagaatggtagagcctacataaaacccaaaagaggaaagggtattgattaacataaccatggatctagtacgagttgggtgcaaccaagtaactagtaaaacgatggtttgatggaagaaaggcaacctaccagcaaagtctgctcaagatcatttgttctcacatttgagatggccctgagaacatattcggacggagaaagcccgaacatcacagcgttgggtaggtattcaggaacttttccctttgttttctcctcctgaagattggaagaaagaaaaatcacgatgcaaagaacaagtaggaaacaaagtagcaaccgtagatattggcataaccattttgtgttaaattcaactccaaattagccaaaaacgaagtaccaactagggggatgtcatgtcgatatgtatagataaacaaacaaagtaacgattcccacctcataagcagcatgacgctttgtttcatcttctgctacttccagagcatctataattgaatcagcagctgatagaacatctatcgtcttcttgccagctaatgctgcaacaccttcctctggaatttcctccatgggtccatgcctgtcatctgctgcattatcaatctcagactcaaaaagctcttctaacctcttttccttctcttcctgcattatttccagtaaaattacattaattaacataaagtcacataaaataactcgtcaaaatatacttgagatttatgtagacatgacagtatgacacc

SEQ ID NO: 30515 - DNA, 4324 bp, Arabidopsis thaliana landsberg
  unsure (1)..(4324): unsure at all n locations
tacttctctgacattttggcctaattcttgagaaaccagtctgttgtggctgcagcaactgctattgcttttgaaaggtgattagcctgaacctttctcttctcaattcccctaaatatactcagcttatgcaatttcctgaatatggtttggcttcaggggatttgctgactccatttttggtctaactgtggtttatgctggccttatcatgtatgatgcccaggtaaaatagtctatagagaaaagcttaggctggcttttgttcaataggtctttgttggttattctcaaattctcaatgtctgattctagtgttatcttaatgtctcactgattgtaacattgcagggggtgaggagagaagttggaaaacatgccaaagtgttgaacaaactaacagctaatgctcgtagaagtgaagtaatgagtttaaagggcaacgaatctaacaaagctttgacatcagaagagatcagtgaggagattgctcctccattgaaagaatcaataggacacactgaagttgaagtcatagcaggggctttgttcggtttcttagttaccctcagtgtttattccctgatgtaaaaaagctcccaactttataaaaactatatattttttgtgttgataagaaagaaagagaatttaataatgtgcaaactgcaataaaacagagaatcagtggtaatgtcaaatcaagttttatggatctgagaatttttgttctgtttgagttggttgtaaaccccacaaacacaacaattttgataatttgtctgacaccaaaaaagtagaaagctttttcctttagggtttcctttatcgatcgaatggcacatcgtcaattgtatagcttacgcccttcaaccttcttatgctgctgctgcctccaccgtatctccagctcctcctccgccgcaacaaccactgccgccaaaaaccggtctttcttctctctacggttcttctgctgaccattactttccggataccacgtatcgtttcttagctcgtgatggatccgaagctttgagcaactattcagggactcttgcatcgtcttcctctatgtaccatcatttgcctaacacgacggcatcgcatttggcgtatcctcagctgcttcagcatcaggaagttgcttggccacctggtgtggaggttcccggtgctgcttccgccgtcgagccacttcctcctggtgtcaaacgcacctctgaaggtaggctctttgtttaccttactatttatgggatctgcatcattttcttatttattgcttggagaactatgccgcataacttgaaaagttaaagacttcagctttcccttttctctgctcatcgtgatactctagttctgtagcggaaattagtgtttttgattgtttgtttcttcaattgcagcataaaaaactcagctttagtcatggtctctagcctgattctttctaggatagattttaatttacatttgctcaagcacaatgatgttggtttgtattcctctgtgctttctcgttagctgaaatagaggttggattggtttggccaattgctttgttttgagtctggacaacgcgaagcttgaaagttagaatcatctttcaggagatgcttagggattgcatctataaactatatagcttatggtagtgttcttgattaagtctttgttgctttaggattgcctaacgataattgtttttagttttgaccttaatgtttattggaacacttggtgattttgcagaattgattgatgatttatgttttgttgtaactctatggtttccaatagattttcagacatgattgtatgtaagccagaatttcttactgtaagtttaactaaagatacaattgattattgatgctatatcttggtttttgctatagtatctcccaaatttattttcaaattatacttatagtcagtatatatcttctcatttcgttgtatattattgtttattatgtaatttagcgctctactatccgactctgttgggtgcccataatacaattggtcaaaccgaagcttggtatactacnnnnnnnnnnnnnnnnnnnnnnnagttggagagtacaagccatttgcctatatatccacagagggcaggagagaaagattgtacccactatatgcaaacaagaacatgtaaatttggagaaagctgcaggtttgatcatcctatttgggttcctgagggcggaatcccagattggaaagaggtgatcgtttactactatctaagtatttcttatgccctcatatgatttttacattattatgataacgtttttctatattctgttatgtacttatatgttttatactgtgggagtttgtgcctaattactttgtaactatatatattgtttttgtttggtatacgaggttatagaattactacattatcatgatagtgtaggtataggtatgacaaatggtatcttattgttattcaagatttgagcttcccgacttctgcaaccgtgtttgttatccttgcttttccctttgtcagatcattccttgacttggaagagacatcatactcattgtctaggcattacatgataaaatgatatgattgctggcgcttatgaatatctcggtaattcaggcaccagttgtggcaaatgaagagtgtcctgagagaccaggagaaccagattgtcctgtaagctgttcgggaaaacttctagagctattgtattggtgtttcgcctgaagacctgagactatctttcttttattttcactgttatccagtactatattaaaacacaacgctgcaaatatggttcaaagtgcaaatttaatcatccaagagaagaggctgcagtaagtgaattttccttttccaaataaaattatccctcgggttgtgtatttgcctgcagacactcgcataaaatcttgtgcttgtaatatgtactgctttagttttttcttgggctgtgcatgcacctagaagcttgatgctcttctttatttcaggttagtgttgaaactcaagattcattgcctgagaggccttctgaacctatgtgcacagtaagatataaacataattgattgacctatcctatttttataaatgctcttacatatgaaactaatatcgattattaatttggcatttctactctgcatcagttctacatgaagactggaaaatgtaaatttggtttgtcatgcaaattccaccatccaaaggatatccagctaccatcatcgagtcaagatattggtagcagtgtggggttaaccagtgagcctgatgccacaaacaatccgcatgtcacatttaccccagcattgtatcacaactcaaaaggactacctgttagatcggtaatgaattcatcttcactttgcataagactgacttataatcatataggcacaatttgtgactttctactatcttattggcactatacttagaactgattatggtttgctagcattgtatgctgacctgttctgacgtctgagaatgaagtttcactaattagattgtagctttttcagggtgaagtggactgcccattctatctcaaaacgggaaggtgaatatctcttgtataatactattttgttgtttagaacattgaaacaaagaacgtgacattaacgttctaacttgttttccttttccataatcagctgcaagtatggagccacttgtcgctacaatcatcctgagaggactggtttgtgatcatgccaaaattttgtggtttttagaacctttaacgtattacttttatccctaaattctcataatgtgcgatgttttgattctgtgcacagcattcattccccaagctgctggggtaaactattctctagtttcatcgaacactgcgaatttgaaccttgggctggttacaccagctacctctttctatcagactcttactcaacccacggtaaaagcctttattcatgttgtgagaaatattcaagagcgcttccttagttgataggggtttaattagagtggaaattgtttcagcttggagtgatttcagcaacttatccccaaagacctggacaatcagaatgtgacgttagtatccttgtttcttttagagattgctgagctttttctcccacatgttagttgaaattttataccaaaagctctgtctttcaatattacagtactacatgaagacaggggagtgcaagtttggagagagatgcaaattccatcacccagcagataggttaagtgcaatgaccaaacaagctcctaaacaaccaaatgtaaagctgagtcttgcagggtatcccagaagag

SEQ ID NO: 30516 - DNA, 4003 bp, Arabidopsis thaliana landsberg
gccgaggaccagatgtagctgctgctaaatactcagactgggttaggtattgtgcttgttgtgctcatttagctgattcttgaggatactgatagctcaatttttcagggatttagcttgtggattacttgagttttgttgtttctttcttaatctcggtatggtttatgatttaggcaggcttaggaagcctctggagaagtttagacctcctttgaccactgaacttcttttgtcaaacgatggtgatcatttgcttgagggctgcatcacaaactttttcgtagtttgccgcagggtactaacaaaaatttgatttttttttgttcaagcacaagtcacctatgttgtgattaggatgtttattgtcttcatttatgttgcattttagaagtttgaatttcattttaccactgcatgatttactgtttgatctcattttaggtgaagtcatcagagaatctctacggcgggagtttgagcgagtttgaggtgcagaccgcgcctataactgatggtgtgctagcaggagttataagagaccttgtcatcgagtaatatgttagaccattaagaatgttgattatattcgtctgtgtttatggcctgatcaaccaataagatttgcttttctgtcagagtgtgtttaagcgaggggattccataccgcgagagagcaccttcgtggtctgagcgtgagctttgggaagaagccttcattacaagtagatctttccatatccataatctgttttttcatcttctcgcatatatattggcctgaacactttcaatgtgttgtgtgatgtttgtatattttaacatcccaagaactcactgggttcaggtagtctgaggattttgcagcatgtagggacgatcaaagtacccgttggttcaatggagggattggcttgtaacaaacctgaggagattcaatggaaggagaaaaggtttaaggaaagacctgggatgatcactgaattaatcaaggtaaagcttgttacttttattacccttagaatcattggttttgttcttgtcttttgagtcaaatcaaagatagaaatcactttaaagtttttgtttgtcactgatatgttggagtagaaagcgataatggagagaggtattaaagaagggttcccgttgaaggccttttagtgctcttcatgattttgccaaatagctgaaatgttgattcgtctatggtttgtaattgtattgacgccaatatcttcccaaatcatcactcattataattttaaagaacctaatgtttaaaaggttctcagttatatatatctgtataattgatcagtagaacatattatttaacggattttatggagatactccggtaacttattaaacagatctcatgaaagtaatcagtgtcaagaaatgtcaagactgtatacatatgttaatatgctaaaccacaacgactatcacttcccaaaacatggttatgatgttgatatgaccctccaaatccacaagtgtgtatgtgtatcaacgtcaaagtattgaatataaagagttgtgagtactaaaaataaaagcaaactaaaaatatagtccgtatggaatgcctttaaaactgcttgtagtggaggaaaatagaaatttggaggacacaaaattttcccccttttttttttttttttctagtaaatcaaattaattaatatcagaaaaaagattagatgatatataagcatcttttttttttccgtaaatcaaattaattgatattataaaaaagataatggggtgattgacatcgcattgtcaagactttaaaactatttaacaaatgataaatcacattaattgataccatgtatgttttggatatgtttgataaaaatagtttactagtgaaaaaaaaaagatgatccacacccgagggagtagatttaattttttttttcttcagaaaatcagctatacattaattatgtattctgacttaataattggtcgggtttgcaaatcttttatttttttggtaaacatgtgaagaaaaaaatagaaggtttgtaaatctttcaatattgtttgtacattttccataaatctttcaatattgtttgtgcttcatcaacatatagtcaacacaaacaatggtacgctcttatgaggttctgcaatatgagtagcttggacgacgtttctgatcaatagatctgttataatattataaaacatatcgattctaacagattttcaatggatatataatccgataactttttagacacatctgatgagtgatcactgtaaaaaaaaatacaaaaaaatcaaaaccatgtgtatatatgctaaactacaaatataaaattaccacacttgtactatatataataaaaataaacatcataatactaataattacgacactattggtcttggtttggtttatatgcacgactccggctttaaacaataaatccaggagcatgacacttccacgtccttggctagatctaagtttaagtcaacgatgactcatagtggacacgtgtcactcgttcattcgagttatccacgtgacttcttattacagtcttcttgactctttttttttttttttttttttgctgaaaattataaaaacccaaaatccaacaaactttgattacacacacttacatacaacaatggcttcgtcatctacaagtatctctctccttctcttcgtctctttcattcttcttctcgttaactcgcgtgcagagaatgcgtccagtggatcggatctcgacgaagaattggctttcctcgccgcggaggaatccaaggaacaaagccacggcggcggttcgtaccacgaggaggagcacgatcatcagcaccgagacttcgagaattacgatgatctcgagcaaggaggcggcgagtttcatcacggcgatcacggttacgaggaggagccgttaccaccagtcgacgagaaagacgtggcggttctgaccaaggacaatttcaccgagttcgtcggcaacaatagcttcgcgatggtggagttttacgctccgtggtgcggcgcttgtcaggctttgactccggagtacgccgcggctgcgacggagttgaaaggccatgcggcgctcgcgaagatcgacgcgacggaggaaggggatttggctcagaagtacgagattcagggcttccccaccgttttcttgtttgtcgacggagaaatgcgcaagacctacgaaggtgaaagaacaaagtaagtgtacaatgtttctttctccaactgttaggattgagatatgaacatagctcatcaggtttagctttggatcttgagagattgtttgatttggaatccgagaagaattttttaggattattcaacctttatgaaatggtacaatagagagaggcatgtcacatgtgatctttgattttattctctctgctttggtttctcatctgttagttttccatacgaattattggtcaaaaagtacgtttcaccattactggtgtcctcattgcagggatggtattgtgacttggctgaagaagaaggccagtcctagcatccacaacatcactactaaagaggaggctgaacgtgttttgtccgctgaacactaaacttgtctttggttttctcaactcattagtggtatgcatcctttaaatccatggtgtttcttgcgttctttcttggatttagttctcctttttaacttctcagagctttaaacatattgtcaaccaagttggttactgtgggacttctctaccatagaatttcagaaaggataagaaatgaaactattatcgttacgcaaatgagtgcctctggtgtttagtatgtcaaggatacgagtggtttcccttgcagtatatgtaaggttgctattaggtcttgtatatcagatcttcttgtctagtgtgttttactttgtgtggcggagagttccccgctgttggattatcaacgtctgcccgattttgcttttaatatctgatttaagct

SEQ ID NO: 30517 - DNA, 657 bp, Arabidopsis thaliana landsberg
gaacgtatccgaaccaaaaattcaaaatttatttaaagaacaaaaaattgatattttttaaccatagacctatgtttctaaagtaacaaatcaaaccaaactgattaacccgaaccaaaatctaactgataaactttaatgcctttcctagtttcctttcgcttttccttttccacctttcttcttcttcttcgtcttcttcaaatcattggtagaagaaacattgtgtttatcgtcaccatcaagttttctacaagtagaaccctccagctccttggttttgcttatctcgacctttctattctcaacaaagttaactactccacgaaggacaacatcagtatcatcttcttgcatcaactcttcagctaactcagccggagtcacctcagtggaatcgatcagcgcctcgatttcctcgcaaagaggatggtttaagccacctaaaccgaggtaattagagaccaatggtctaaaccctaaacctgtacagtaatacatgttgataagcatagccattcctacaggtgggtacggagcagggtcaagccgttctttgtgattcgtcgtgaaccccataattctctcatccccaaaacttggccacaacccatcaacgaaattcaaaagccctgatagagtcgcctgcatggcaaa

SEQ ID NO: 30518 - DNA, 1661 bp, Arabidopsis thaliana landsberg
  unsure (1)..(1661): unsure at all n locations
ccattgacctgacattaaccttatctcatctttcagttttgtaatctcttcgtcttttacttcaactagcctattcatcctctcaaatttcattggagacacatcttctagaagtttctggagctcgctgtccatgccacctattcccgcttttgcaatggcctcagtaacctcacgctcgattctcctaacttcttctctaagctgcttttctgagcactctctcaagctcagacctctctgtagatcatcaagctgatgaccaagctgagtcatacggtcttcttgttctctgagagaacgtgttttgtcgtcaagttgttgctttagcattgagcattggatctttgtagattgagcagaatcagcacttgcctctgcggtttgcttggttgtatcaagctttaatctaaattcctccaactctttgataaactgtttcctcaaaaacaagatacaaattaagtaagtctaactaagagtatatatcattacaataacataaatttgttaggtaacaatgcattcgaccagaaaataggactaataaatcttaagcttatatcactaatacatcaatggatcacagctaaagttgcataattcatcctctagttgaatcgaattccaaaagactcaaagagctataggatcttgtctacttgatccatataggactcaagaaccatataaataactctctgaaccgatcaagtatttataagtcaattgatatagcctactcatagattggattcataactatgaagagaccaaattgatgtgtaaggataaaccttatcaggagcagatgcataagcttcaagctgacaattactttcttgcaatctcttgtgcaacttacaaatctccatttgcatattctttacccttttctctgcttcctggacaaacaaaccgacaacagaaataaaccaaatcattcatttcaatctgattcaattattacaaaacttagaaaaccagcaaccaaataatatttgaccccaccatttaattacatgaacataaggaagagaatcactcagagaataaatgggattccttcaaaaaaaaaaaagacttacttttctagtaatggtctctttaagaaaagattgttcttgagaaaccaaacggcccctcacttgcttcagctccgtagccagagacaccacgtttcgccggaaactctctttcttctcatccaaatctctcagaagtggatccaccgtcgttttttcagaataagacatccagattcggctaattcagctcttgcatggaggcaatcacaaatctcaaaactctgaagatgaggagaagaaaaaagaaaaaaaattagtttttttttttgggggtgcatgtgaacaatggtagttgaccattaatacagagaaaattaaatgaagagtctttcacaattcaaatctatataataataatcaaaacaatgatcgtgactttacatgagctatgacttgaagcttcaaaaagaaaggtcttctaagttttcaaaatcagatctctctgattatggcatgaatctaaattaatatctcatttctatataaggatcttacaagaacangagaaatcaaagcgaatgcatttacccaataaatgagaaaataaattgaaattgggcttaattttgggcc

SEQ ID NO: 30519 - DNA, 3117 bp, Arabidopsis thaliana landsberg
accaccaagtattgacgtgatcagcataccatgaagcttgtcctctactgcacatacttgatcgagtgattttttaatttgagcactcttgttaagttgctgaatcgccattagctgttcttcaggcatggagtcgtcaatgggtacctcgtcttcaattctcatcctagacagatggtcagctacaccattttcaatccccttcttatcaactatctccatgtcaaaatcttggagcaataagatccatctcaacagtctgggtttggtatccttcttcgcagaaaatcatgtcaccttagaacccaccaagtagcttctaaatttctcgaatgcgaataccacagccagtaattccttctcagtggtggcatacctcacttgtgtatcatccatagtcctgttggcataatagatgacatgtagcttcttatcaatcttctgcccgagaactgctcctacagcgtagtctgaagcatcacacatgatttcaaatggatattcccagttaggagcttggactattggagcagagaccaaagcttccttgattgtcttaaaagctgttagacattcttcatcaagtatgaattatgcctctttgcacagcagtcttgtgagtggtctagccagcttggagaagtctttgatgaatcttctgtaaaagcctgcatgcctaagaaaactcctgatgtctttcacagtctttggtggttgtaattgcatcataacatcgaccttagccttatcaacttctatccctttctctgagattctgtgccccaagacaattccttctctgaccatgaagtggcatttctcccagttcagtaccagattggtttcctcacacctcttgagtaccctgcacaaatttaacaaacaggaggagaaggaggaccatacacggaaaaatcatccatgaatacctcgaccgtctcctctatcaaatcggagaaaatagaagtcatacaccgctgaaaagtagcaggtgcgttgcaaagcccaaaaggcattcgcttgtaagcaaaggtcccataaggacaagtgaaggtagttttctcttgatcgtttgggtggataggaatttgaaagaatccactgtatccatctagaaaacaatagtagggatggtttgctaatctttctagcatttgatcaatgaagggtaatgagaaatgatcttttctagaggctgcattaagcttcctagagtcgatacacatcctatgtcctgttatggtcctagtgggtatcagttcatcttcagaattttttatgactgtcatacctccctttttgggaacagaatggactggagatactcaagtgctatcagatatagggtagattatacccgcgtctaatagtttaagtatctctttctttaccacttctttcaggtttgggtttaatcttctttgaggttcaatactagaataagattcgttttctaaatgaattctatgggtgcatagggtgggtgagatccccttgatatcatctagtgaatatcctatagctctcctatatttttttaattcagttaataacagaataacttgatcggtgtttagctcatcactaatgataacagggtaagtagagttttgtccaaggaaaaagtaccttaacctttttggcagcggtttcagatccacctttggtgccttgagttcggaccagtcgtcggatgtcagatcggcgttagagggaaggttgtgatcgagtagctcggtcgagtggacagtctgttgaatgacgtgatcgagtatattctgctcctttgcatttccgaacaaatcgtcatactcctctggattctcaacttctttatgcatatctaacaacttccggtaccccaaagtttccaagtgtaaatcttcttctttcccatcctttgttagagcattctatagatggtcttcttctgctagctcttctagcagttcatcagccaacatatccgtctcttcaatccagaagacctttccttctattgtaggcttcttcatggtgttagtgatgtcaaaggtcatcttgagttctttgccaatgttaagattgatctttcctttcttgacatcgatggtggctccaactgtagctaagaagggtcttcctaggatcaaagggtccctgggttcttcatccatttctaccactacaaagtctgtagaaacctccatagtgcctatccttactggtaagtcttctagcaaaccatgaggtattctgatggatctgtctactagaatcaaagaaatgttgcaagccttttatttactgaaaccaagttgcttggccactgagagaggcatcaagcttacggattcgcctagatcgcataggcaccggttgaatggtcaagggccatgggcacatggtatagtacacgagccgggatctgctaattgattaggtgtgatcttatgtactatgattgcactacactcgtgagttaacgtcaccgttccttgaacttctctgatcctctctgtaatcatgtccttcacacgtttgtgtgagtccgatattagctcaagacagtctactagaggcattgtgatttcaaggtccttcaaatgtttttcaaatagagcttcctacttctttatcagttgcttcttgaatctccctggaaatggtagtggaggcttgtagggtggaggaacatagactttatccttggttttagtagcggcatgctttttaagagaaggatgtactacttgagcttgggatcgagtactacgatcgagtatgggctcctctatagctatttcagctgaaacttcattctgaacgaaaacctccccttcttgaacttcactgtccctagtgatagaggtagaggcatgtcgagttggcagctctcgatcatggcagatagtgatggcgtgagcggtggcatactccttagggttttgtattgctttccctggaagctggcctgggttgttggtaatagatggtgaagtggggatgccttccagatatcgtatcctggtgctcaaggattcgtacttgttgttaagttcgaaaaagtgtcggtcaactttgttgtgtaattcaccaaacttcttaacgatttccattgctcttgtggcttggcct

SEQ ID NO: 30520 - DNA, 3810 bp, Arabidopsis thaliana landsberg
atccgcccggatcaaatacttggtgctgctattaacagcaatagtgtaacagtttctgattccctctggaaaacttctgacggaccacatgctctgcttcatattttgtctattttcaggcgcaacgaaatagcttgtccctgtatccgtataacttgaatccgaaacatacttaatatcggtcgatgtttccgtgtagctggaattttctggttgtaacccgcaatctatgctaatgaaccctattcagatgtttaaaaaccaggttttaacttaaaatttctctgttttttcatcatgtagataaaagatcaaagaagagcataatctataatttgaccaaacctgattgatcctgggcaatggcaagattgagaagagccacacaacaaatgaacgtaagcgccttcgccttcgatgtcatcatttcggttcttcaaacagcagaaacaaccatcatctcctatttcttaaaactggtttatccatttctgagaaacaccagagttttttttgggttcaaagtcaacaacttgaagacaatgtcaactctttggtagatatcaattttgtgtgctcacaagtcacaacgtataaatcattatctaacagcaagtagaacactaatcaacaagaaagccaacttgttttttctttagttgatttctttagataacttgtgtatatgttaatgaacaagtcaacgatatgtgtagacaaaaaccagagactttcttaatttctttggtttgaccaaaacaaaatgcttatgttcacatgggttctctactctgtaattgttctgtaaaaaatgggtcagaaaatctataactttgtaacctaacaagacaattgggtaaaaagtgtcttgcaccatgatttgtttgaacaaaaccacttggtaaatggtgtgtaaatcagaaacttgtgtcggaagaatcaatataaagggagattgttgctgagaatttgtatcaaatcgatattctgataccgaaaatagttaaaattgtagtaaattaagggttattttgaagtgattagtttattttttgtcaattcttgcaaatttcctttttttgatagaaaaaagttgttatgcctacgactagtacaaaagagaaaacctaattaagatcttcacgtaagttgacctagctacacgcttactttttttttccttctcctgaagtctgtcggaataatggcgaatttgcaacgtttttggctgatgagaaaggtcttcaccaccggttgtggtttgacttcaccagcaggtgctggagttatgtctcataggattcttcgtacatccttaaacaaccattattctcacaatgtctttactaatttcacaagaggctttgcaactaaacctaaagagaaagacaataaaaaacacaaaaaagttaagaagacaagacaagtagaggagaagaagaaaaacgtggcagcgataatgaaaggtgcagcagtattggatccatagattcctgaacgacttccatgttataaaacaggtcattcttccacttggacgtcctgtgaatgtaatggctatcagggtttctcatagttttcattgttttcagaattgcaccctcagatttgtttcatacctttaggctaatattttctatttccgttttgctggcagggttgtttatggcacaacgagtccattgtctacgatgtgggacagattagaatgcattatctcatccatgtcaaaatacaaccttgaaattaaagtctcctctcctcctgttacttgatatatgcatattaagaaagtattatttattgaatcatccatgattctgatttataattaaagtacatgtacactgtacagtaatacagtatgatgatttttttggtcaaaacctgttttttttttttgtttttttttttcaacagctaatgatatgatttttctttacttcaacattttctactaaaatgctattatttctaaataagatattttatactagaagtctagaagtaagaaactaaaagtccataaacaagatttcgcgtcgctaagcaaatacgcataatcagttctaacatacatttatagaatttactttaaattttgttttcaggaaaagaaacaaaaaacgaaaagtcaacggctgacatcaaaacaaaccaaagtcaacagtcaaaccttaataaggttaggccatgtgcactcgtttcttctcgagatatttggaaatcggatatcgacattcgccgatcatgtccaaaagtatactatttagaccacttgattttggtttttgattttttctttccttttgtatttatgtataactatatattcttttaaacatgttgataataaatgtgtcgttttggctgaaaatttcttaaataaaattagagcagtttacggcatctaaaaactactagctagtgcggaatcagtagggtttagaagatccaaatctttttttctttcgaacaaaataatccacaaatttttaaaaattgattaatctatcgatttaaatcattttctcaaaaaatgtagagataccaacttctttagaaaatagattcttcgcatgatttaacagttcgtaacaaaataaaaattacttttttaccaaaaaattaaattaaattaattacttatacattagtatatgttgaaaaagatttcactatagaattaacaagaagataacatatgtagttaaacatatcgtaataaataaaaaattaatcgatttttaaagttcgtatatttgaatttttgatattctcatgactttttttttcttcaacaatattctcatgacaataatacgtttaatggtgaattttgagaatcttttactgtagttaattttcaataataaacaaccaattgtggaagcctctttgatcggtactcaagttttagaggtttttacattagagagtggttacaaatgctagagataagactgtttatcgttggtatgacacatgtatataataatcgtcagtaaaagatcacgttttgctgagaaaactgaacatcgtggaattgtttgaaatccgaatgattgatcctactatatatagtaggattagattaggatatttatgatgataatatagtaaagaagaaaataaattacaaccaaaattataactttcgagtgctctaaaggaaattatttaaattaagaaatattttctatttatgtaatattttcaatataaatacaaattaatttacagcagctttatactaaatatcaataattaacatgagacatttacgaattaaaaaactgtttcaattgttacatgtctattaatatatagaagatgcatgtatatcgccccattaggctgcgattcttgtaataatgatgccaaattgatattgaccatatatttttctctcattttttttttttttggttcagtaaagtcgtggtcgtctctccataatcagagttgttttattggtgcatgtattattagctcctcaccaagtcatcaaccactttccttctgacttctcaaaatttaatgtttcgtttcgttttagttttggtaaaaaaattcaactgaattatggttataacttataaactttcattaaatcaaaacatatttataatgtttttcttgcctttttttgtggtgcacaatcaacatatatttttcagtaagctccatatcctcgtcagatttattacagatcaatcaagtgtagcttattggcagaaatacaatcttctacaatgccttacccagatgaatattcagttacgacaagagtttaaatattttaaaatc

SEQ ID NO: 30521 - DNA, 779 bp, Arabidopsis thaliana landsberg
tggagtggcaatctatgatggataagtctactcctaatatgagctatcaagcttggcgtcatgagcctgaggtacatctaagttttaaagactcttaactttatatgacttagttcctgaaaggtggttatgttggttgtcagataggtcctgttgtttatcgtagtcgaactgtttttgaggatgtaacaccagacattgttagggatttcttctgggacgatgagtttcgacctaaatgggatactatgcttgcttacttcaaaactttagaggaagatcctaagacaggaacgaccattgttcattggattaaaaaggtatttttctgctttccttcgtgattcatgaacatgttactaatttcttttgtctgcagttcccattcttctgtagtgaccgggaatacatcattggtaggagaatatgggaatctggaagaaaatattatgctgtgactaaggtatgatcttgcttttacttccttatggatcaaatctctattggttaggaatagcagaacgctggtttgatatagtgttttggcctatatcaatgtttgtagggagtaccgtataaagatttaccaaagcgtgataagccgaggcgagtcgagctttatttctcaagctggattgtcaaagcaggtatgtcctcttaaattacttgacagcttgctacatgtctaaatctaaacgaaacaatccaaaaatgcagttgaatccaggaaaggtgatgggcaaatgacagcttgtgaagtctctcttgtgcattaaaag

SEQ ID NO: 30522 - DNA, 2005 bp, Arabidopsis thaliana landsberg
aagaagaataagggcctttaggtttaaggctttgaactttgtttcagcataaaaacttaataggatgtttaggataacaagatgttggatactatttgatcaatttttttcactgataaagtaatgatgcaatgaaacttaatagaactagaaactaagagacaatggtcccatgaattatctccagacattcagaattgtcaaacctaaactttggtgttttgtcccctacagaattctggcgtaaacatttagaattctccagacatgtggaatgctacacacttgttctgtggaaggcaaaaacaagttcttgtagtatgacattacctttgtgacacaataatacttcttcccagactcccatattctccggccaatgatatactctcggtcactacagaaaaaaggaaactgcaagcaaaagaaattagtaatgacaacagtttttaatgtgggaattgtttattaagatgaccaaagtatcaaaagtccagaaaccttttttctccactgaacaatcattgttcctgtctgagtgtcctcctccaacgttttgaagttggcaagcatgaaatcccatttaggtcgaaactcatcatcccagaagaaatccctaacaatatctggagttgcatcctcaaacacagtccggctgcgataaataacaggacctgtctgataaacaatacgacctatcaggctacaaacacaatttgatcaaatgtttctatcatctagtatttaagaattccccatttcattatagcaagaacacagtttcaagtaaaatgtcacaaaaatgccacacaaaggggtaaatgcaacaacgcatcacatcgtgcccaaaaagaaccaaagctaaacaaagaaacacaatgtatactactagacacctaaaaattgatcgtctatagctatccttagaaacatatctccctcgtcattaccaataaacctaaaagcagtggtctgattcagatgtcattcaaattactctaaagaattcattttttcgactattccgcctactactcaatgacttagcttgttccttgagctacatcattcaggcgtagcataaggaaacggatacaaagcaagagtataaaacttagattacctcaggctcatgacgccaagcctggtagctcatatttggagtagtcttatccatcatagattgccattccaaagctgcatttccaacttcaagcagctgaagcagatgctctaaatcattctctgtcacaatatcctctgtcaccgtccggttatcgctacctctgcaaatataaccaatccataaatcaactaatgcaaaaaaaaaaaaaaccattcttttgccaatgctattgcgaaactaaaagataatgcaaacactatataccttatctagctaaattaaaagtaaacgttacgttttaaaacagagaactaaaacttctacatcttccaataattaagcattacactaaccttgaggccaatcctgattcatcattatcctcaacaggcgtctgcgacgaagctgaaccggtcgccgatttattagctctggtgtcattccttgaccagatggttcggcaaacggagaaagcagagagagcggtgaaagcaagccaaagccgacgagcaccaaacccaggcggtgcggtccataaaaaccgaagcttagaacgaaaccctaaatagatcaaaccggtccatcttggacgccaagaccatccgattaataacccgatcataacggcgagccaaatcggaactgcgcatagtaagatgtcgacaaatgtctctgtaaaagagggattcttaaagaaattcaatagatcaaaataggtctcatccatagcggattctctagattcgatactttactccgatttggataaaaaatttcccgagaaaaaatgtcagattcccgaaggaaaatgggattcgaagatcgctaaaaatttaagcgacatgaatcaggagaatcaaagacgaagacgaagaagaa

SEQ ID NO: 30523 - DNA, 1741 bp, Arabidopsis thaliana landsberg
aaggtactaaaaactgaagaaaacttctatggaactaaagctttacacttgtcatagatttatcagtttggtattatgattgataaaaataatataaaatgaataaaaacttcaaaccaaagaaaatatgaaatgcaaatagagcaattataatttccactgcaaaggtattaaataataacgaaagaaatgaggaaataatttaaattgtagtaaagaagaagacaaaataacatttcaaaatagattttttatttcccaaaatataaaaatagtagattcgattacaaaattcttaaccaaaatcataatctagccggtttaataaatgaaagaaaacaaaattaaacagggttatctaaaaaacaactataggaataataaataatacgatgacgtgtcataaggatagattttagaatttaatccaataacaaacaagttcgctgaaaataaaccatggttaagagatttaaccagaggactcagatcagagttaaaaagcgttcctttgagaggtgaatcaacgaaggagacaacacaacacacacacacacagagcaagcaaaagaggcggctagggatcagagagtggttccttcactgaaagtttcttcttttcattctcttcttctccttcagattccttgcctcttcttcaagattctcctctcttccatgtgcgtttctgtgcttttgaagacgacgatgatgatgatgatgtctttatattgaaaccaaattcgtctccacgattgtttcttctgagttttgatttttcagatctcgcttcttttccggtgagtttcacgcttttttctataaagctcattgatttgttcttagttttgtttctcttcaatttctggaatcgatcaagatcttaatttgatggattagtgagatttaagatctgtttttttcttttgcagatttgttcaatcatcatggcttacctgatgtagtaattgggatcaaattcattcacaaagctcgagtttttattattagtggctactgttatctgtgtatagaagaagcttgtgtgtgtggttctctacgtttcatgatcggtttaggtatctgttatatccggctcgtgttggtttcagatttaggcactggtctagaaggtctttcttcggctactgcttcttctgttcaccaaaagaagccttttttggtttcttcttctgtttcatgtcgaggaacttagacagtcctgttcagacacaaatggcagtggcagttttcaagactcctcttactggagctagtaagatggaagggaagcagcatcataagcatcagcatttacagaggcaatcatcggggaggagagttttcgtgcagactgaaactggttgtgttttggggatggagttggatcgtagtgataatgttcatactgttaaaaggaggcttcagattgctcttaatttccctactgaagagagttctttgacttatggtgatatggtgttgaccaatgatttgagtgctgtgaggaacgattctccgcttctgctgaaacggaactttatgcatcgaagctcgtctactccttgtctttcgcctactgggagggatttgcaacagaaagatcgaagtggtcctattgagatactaggccattcggattgcttttcgattgttaaacatatggttaaggacattgttaaggcgatgaagatgggtgttgaaccgcttcctgttcatagcgggcttggaggtgcttact

SEQ ID NO: 30524 - DNA, 3457 bp, Arabidopsis thaliana landsberg
tgctactgtcgattactgcttctacaggatgaagttccccctctcttagaaatgcctgagcgtaaagttcccctgtggttttatctactagttttataatgcattcttctcctttgctcaccactttcaaagctccttcccatgcccatttgttcacgtcccactcatctgctctgcaaggataaaatttatacaaaaaaagtatcagctgatgtctatctccatcttccaatggattacttgatgcactttttcaagtatcttttaccaaagaagccaagttgagttgatacaaagcgaatgtaactagataatgaccatcttgatgcaaattaaggttaagctaccattcatagtcatacatacttcacgattggttcaataagattcgttccgagtttctgatcatttgctaagccgaagggtttatcgggaaaaggggttttgtaaaaatctcctaactacatatatcagaatgactgtttctatcataaaggtaagaaagaacctgtacgaagctgcggttttccttggaggtatctgcatacacaaacaaaaagacaatgaagaggttactttgcctagcatccccgtaaagtaacagacacagaagaaagcataaacgataaaataacattgatacatcaagctccaatgttgtccattacgaatgagaattttatagttaaacctaaataacaacagttcacaatgtctatgatttcatcaaggtagccaatttggaatctcatacatcctataacacaatgaccatgtaacaatttcacgagtatctcaaaagctagtatgatttcagagagaccccatcaagatatcacttagcatgatattggttaaaattaatgtactcttttatcacaagccttgaatctatcatacgaaatctccttgaaaagatttttcgctgatagttacatgtgcaatcgatcaccattgcaaatccaaacaaaatttcgagtgatcaagactcaacgtcaagttttcaacatatgcaaattaagacaacttcctcaataccattgcaagaaatctataacaccagattgaatttacgttataactaattatcagatccaaaacatctcctaaaatcaccaagtgaacttgcaaagaaaggatgtaacttgagcataaaagacacaaaactcatcaaaaattataaaatcacatctcatgataagccaagaaaagttaccaaataaacatagcattcaggcacttggaacagagcaatctctatagcttctctctcctcgttatcatcgacattcacaggatcagtggaagacttcttgtcttcctccatagtcgaagaagacgaagcttgatccatctcagaaacaaagaatttaacttggagaaaaacccagatgagactaatcgatcaaacaaacccgtaaatcttaaatgttaagtctttcccgaactgtgattacaacaatctcacgagtcgcgaagacgaagaaacgtagaggtttcgcgttaggtgtgtgtagtgtataccattacttcaatcatgagtcttcttgaaaaccatcagatctaagctacctctgctaaatctgaaccgtctattacgttgactatgaaaccctgatatagactagacacctatgtatcctccaccgctgggaaggcaacattgaagcagttgatggaccaacaccaaccaatagaaagaacgtccacatttactttaatgggccttttaaactaataggcctaggcccattataaatacatggatttgttttattttatttttctcatatctgtctcttggtggtgatgagtaggtaaactgtgtgcgcttattaacttctctcacactgactctgcgaccctaatttgtgagctctcttctctttgcgcagtcaatttgctacaacttagaaaatggcggcggctacttcatccatcgctccttctctttcatgcccatctccttcttcttcatccaaaaccctttggtcttccaaagccagaaccttggctctacccaatatcggtttcctctcgtcttcttccaagtctctgaggtcgcttactgccaccgtcgctggaaatggcgccactggatcctcccttgccgctcgcatggtttcttcgtctgcggtcaaagcccctgtttctctcgattttgagacatctgtcttcaaaaaggagaaagtttctcttgctggttacgaagaggtttatctcatttaccctcttattcatttctgttctaatttgtgcttattctataatcattttgatgtgtattgattttgttagttgttgctaatgtttggtttctgctgatctttgttttagtacattgtgagaggaggaagagacttgttcaagcatctcccagatgctttcaaggggattaagcagattggtgtgattggctggggatctcaggtacttaccttttttggtctctttatctgtagctactgtgcttcttgtttgattgctttttaaattgcttacgttggattgcgaataaggaatcttggttctgtgttgtgatacgaaattggtcagaaaaaggatatgaataaagtgttttcattttcatacttttgatgcatttgagttggtggaatgaacaagattaatatattgtttcatattctttttattcagcatctcttctcttgtaataaacgctttatctatatatgcagggacctgcccaggctcagaatttaagggattcacttgtggaggcaaagtctgacattgttgtcaaggtatttcaactgcagagttggcttcatacttgtatttgtttgctttctgttgttacgtgaaggctctgttctgactttgttttcgttttaatatactattacgtagattggtctcagaaaagggtctcgctcatttgaggaggcacgtgctgctggcttcactgaagaaagtggtactttgggtgatatatgggaaactatcgctggcagtgatcttgtattgcttttgatctctgatgctgctcaagtaagtgcacttttgttatatatttccactactacttgttgaggtattagtcctaaggtgtatacatcgattttattctatcctgtttttgcaggctgataactatgagaaaatattctctcacatgaagccaaacagcattcttggtttatcacacgggtttctactagggcatttacagtcctcgggactcgatttcccaaagaacatcagtgtggtcgctgtatgccctaagggaatgggtccttctgtgaggaggctttacgtccaaggaaaagaaattaacggtgctggaatcaacgccagttttgcagtccaccaggttttctatctctttatctctactgcaaaagctatctttactgaaaagctcttatacctcatgtgttcattttttcaccactatttctgctattctgttggcaggatgttgacggtagagccg

SEQ ID NO: 30525 - DNA, 3144 bp, Arabidopsis thaliana landsberg
tcgatgcttatgcagattcacaattttatgagaaattggacaaaaccctgatgtcggattccgtcaaaacgacggtggatccgcttttgaaagatttggatggtaaaaaagagagtttccggcggaacgttgtgtctatggcagctgagttaaagcaagtgagaggtcgtttggtttctcaagaacaattctttgttaaagaaagcttttgtagaaaagtaagttccttttattaatttgttaatcttctcactgttccattgtttttgattctctgtttgatttcttacctttatgttattgttactgctttggtagggtcagaaatctagtttcaatgttgagaaatgatttgtttttttggtttcttttaggaagcagagaagaaagctaagaacatggaaatggagatctgtacattgcacaagaagttggaagatagaaattgtgagcttgtagcttcaacttctgctgctaaaaaggtttgtttattctctcagaacccttttcatcttataatatagtatgacttaaaagacttccaaatttgatattgttgtctgaaaagtttggggctttgagtagtgttggtactgaaaagtgatcatcatagcttggtaatcaatggcccttttagatcttgattaaagtagatgaagctgagtgtggaaaaagaatctcaaatttattataattaatgtccaatgaagcttgaccttttcaaaaagagttccttgaatggttttggaatgctaactgggtcaatgaagatgaaaatgggtctctagattggcctgaaaagttatattttcatgaaatgctagaattgagaatcattgaggtaattagtgaatggattatttcatacattcattcattctaagaacgttttgatcttgttttgggaaaacagtttctagaagaagtggacgatctgagatcacagctagctttaacaaaggacattgcagaaacaagtgctgcttctgctcaatccgcacagcttcaatgctcagtgctaacagaacaacttgacgacaaaacacgttctctaagagaacacgaagaccgtgtaactcatctcggtcaccagcttgataatcttcagagagatttgaagacaagagaatgttctcaaaaacagctgagagaggaagttatgagaatcgagcgtgagataactgaagctgttgcaaagtctgggaaaggcacagaatgtgagctcaggaaacttcttgaagaggtttctccaaagaactttgagagaatgaacatgttattggcggtaaaagacgaagagattgcaaagttaaaagatgatgtgaagttaatgtcagctcattggaaactcaaaactaaggaacttgaatctcaggtgcagcatccatatctctgtccttattcttgtgttctgtcgcagaaactgataaatgaacattttcagttggagagacaaagaagagcagatcaagagttgaagaagaaggtactgaaactagagttttgcctgcaagaagctcgtagtcagacaagaaagctacagagggtaaagtcctcaagatttataaagcttttcttgatttagtataatgagaaaactaaatgtttttattgtatgattgatgaatggaacgcaggcgggggagagacgagacaaggcaatcaaagagctaagtgatcagattactggaaaacagttgaatgaatcggtttcaggggagaaacaaaacttctgggattcttcagggttcaagatcgttgtgtcaatgtcgatgttgatattagttattatctccaaaagatgagttcttgtgtcttgaactctctttctttttgttggtgtgtaaatgcagtagttgcagatagtagtcagataatggtgcatattattactccttgaggtttagcgaagagaaatcttgcttccctttgttaagttataagtttgttcatgtgtatttgaatcatttctcaaaaagaaaatgggaaaaatgtcattcaaataatcagtttaccattttcgttggttttaaacatgaattttggacctggtgatttaaatcctcaatattatgttgacttttagtttaaacacaaattttcattgattaacagacattctcagaaattccctagatcacataccctttatcccaaaaccgatttttggattccctcttcttcttcgaattcgaagtaatctcttgtctggaggttgaccgatggcgtaaaaaaagaagaatttgtatctcaattagtttagtttacaagaactcttcttcttcgaattcgaagtaatctcttgtctggaggttgactgatggcgtaaaaaaagaagaatttgtatttcaattagtttagtgtacaagaactcgtgattaaattgaaagtcaaaataaaaatgagaatttaaattaccaaatcaagagttttcatattttaaatggtaaactgatgacattttccctgttgaacaatattggcccataatgtaacccaattactcggcccaattacgtgaaccgcctttcacctggcttaaggaataagtaaggaccattcatgaactcatcacttttagctttctggcttctctgcttgagctctctcgagtctgcctcaagtgtttttgggggaaattgatttcgttgagaaaaaccctaaattccgaacttgaagcaatttttcaatttcgtttgcagaaaaatggcaaaggataatgaagcaatcgccattaacgatgcggttcacaagcttcagctctatatgctcgaaaataccactgatcagaaccagctcttcgcggcgaggaagttaatgtctcgatcagattacgaagatgtcgtcactgaacgagcaatcgctaagctctgtggttatcctctttgccagagatttctcccttccgatgtttctagaagagggaagtatcggatttcgttgaaggaccataaggtttacgatttacaggagacgagcaagttttgctccgctggttgtttaattgatagcaaaacgttttcggggagtttgcaagaggctcgtacattggagtttgattcggtgaagttgaatgagattttggatttgtttggtgattctttggaagtgaaaggttctttggatgtgaataaggatttggat

SEQ ID NO: 30526 - DNA, 2119 bp, Arabidopsis thaliana landsberg
  unsure (1)..(2119): unsure at all n locations
gtatttatgtgccttttgcgagccagaaagcttggagaagaggaaatgcttgatagttatggaaaacagataatacttgttgatagacatggtcgtgtccatcattgctatgcaggtccaattgaaaaagcattatgccatgtacagagccatggaattccaagggatgttgtcaccaatttcctttgcacggattatcatcccccaagtgcagatgaacctgatatggaaagaagaataattaaaggatttcgaaaaatcaactcttggaaggatgttgtagaggcgcttcaaaagcagcagatagtgggggcagatttgcttaattacagtcaactgatgatgacttcaggaaagtatatttacaaaggtcccatgtcacgaatgagtgtttacgtcggatatcacggcgtagtaatagagcagattaaganaatgaatggagaatgggttgctgtttgcaaaatgagcaatggcacgttggtggctgattatggatacgcttatgtttccatagaagttcagtacatgcctgttggtgcatctgatctgaaaaggaagaggatacgaggttcagaccatccaatgcatctccttaccaatttcatcatcgtagacatggtggaggcagatgagaatgatagaaaggatgcagaaagtgaagaatcagaagaaaaagactcagaaagtgaggaggaagaggattatattcctaaagcaaaaagaggtcttactaaagatcctaaaccaaaaagaagtcgtactgaagatccaacaatggtaagcatcaaagtggcaatctcacttcatcgtttgctccatgattaatatgcagatgctttttgagaattattgttggcttcaaaagatatgcaatgactaactaactgccatgagtagcaggtaaaggaatctgatgcagtgggcgttaccggggatgccattagtcgccataactcagattcgactacaaaagtgatggaattggttgctctagtgaagctgttatctggctttccttctatttcaaagtatgctcaaatttgtttaatctcgttgagctatctgtttttatcttaactcgttcatctaacatccattttcaattctaaacatgcgcactaagtgtataaacaatgaattgggctgtctaccagaaactctagcgtgttacactctgaaaaaggatcagaaatttattgtaaatgtacatcctgtcctcaactctcttttggtaactaaatagttctctaaaattcaatggcaggagaattaaagacataattgtgaagcagaaaggaagccttcttcttggaatgcagcagagagctattgagtacaattctatagttgacaggcataaaaatatcaggtggaatcccttgtgcctctcttcctcatctatcttctagtgtaagtttttcatattctctctccctcaaagctcatgatagaggtatgtgtgcatacaggtcttctctggttgacagaatgccggtactggatgaggctactttcaatgtgaggagggccggctcttttcctgcatcagtttcaaccatggccaagccttcagttagccttcaaaatggtgttgagaaacttcctgtcgctcctcttgtggacttgctagacctagattctgacgatatcatggctgcacctagtccatctggtgcagatttccttcaggatcttctcggtgtagacttaggttcatcgtcagcacaatatggttagttctttggcggttctacagctcttgcgttcatattatggcgtgctcatctgctgtgtgtctctgaatgaacaagttttaaaaaaaatcattttcctcattgccttgcaaaaggataactcatgtttggtcttccattttttatccaatgattcaggtgcaacccaggctccaaaagctggcacagatctgttgctggatattctatcaattggaacaccttctcctgcacaaaacagcacatcatctattcgtttattatcaatagctgacgttaacaataatccctcaattgcgctagccaccctttcttcaccagctccacctcacgtaacaaaaacttcgtccaccggtatgtttgatttgctagatggtcgttct

SEQ ID NO: 30527 - DNA, 1964 bp, Arabidopsis thaliana landsberg
aaatcgataagttatgttctgctttcctctggtctggtccggatttaaattctcacaaatctaaggtagcttgggacgatgtttgtaagccgaagaaagaaggtggactcggtttaaggtctataaaggaggttgagacttatcttttaaagacggaaagtttttggtctatcaaagaatcgacaagcaaaggttcatggatatggcgaagcagttttgcaaaaaagaagtaaacaatggccgcaacacttttttctggtatgatgactggtctaccctgggcaggctggctgaaattgctggagatagagggacaatagatatggggatcagtagaaagatgactcttgaggaggcatggaatggtagacgtcaaagacgacacatggataatgttctcaatcagatggaggaggctcttgaactcacacgacaacgtagaaatggaaatgatgacgttactctttggaaaggcaaaaatgatgactaccgccattcaaggaaactggaaagatcgagtagaaagttttatcgcacggtatatctttcaagcttcagtctatgcaatatggcgttgagcgcaatgggaggaagcatgggcgcaacccgaatcaagcagctcaacttgttcgatggatagataagcaaatacgtgatcaactttcagcaatcaaacttatgggtgatagaagatatgaccaaggctttcagttttggttaaactctagtagttaacttgtaaagtatagctctacgcttagtctcttaaacaccatgatgcactcgttgtacaaccgacattttttcttttgagtataatttaacattttattcaaaaaaaaaaaaaaaattctcaaaccagtttctctatatacaatgttaacacacacacttcactgtgtagattctcctggtggttcactctcttcttcatccttagaatcaacaggcctaagtgaatcaagactgcaaaaacaaaaacgtcattgatcctctctaacaatctcaaagataataaaaaatgacaagaaaagaacctgcaattctgtgggacgctccaggtgaaaccagaggattggttactatgaagtggtaaagacttgaaatctctccagtcttgaagcatgattctaagatcatgaagcttactatccaaaccaaagcagcaattcgcatgcattgtacaaacaagattcaaatctttgcttggttcacagaatccaccaaaatacactgtgttcaagaacctaatcctaatccttagtttccaaaggaaaggatctgtcttgatgaagtttagaacatcctgatcgtggtttttggggtacttgagccttgaatcataccagaacttgtagaagcctatacttcggttattggctctcacaaaggtaaatcctccatttggtctattcctaaaatcatttggccttcctatgtaatggtcacaagcaatctggaaatcaccatcttcgtaaaaccgtcgaaaagggttcctgaaccacatcacatcagcatcctagagaacaaagacaatagatcactcaatagaacaaccaaccaacaagtactttaggttcaaaccaagagtggaagagagacttataccgtgaaaacaaagttgtaacccttttcaagaacagagcgaaggaaatagattcgtctccacatcatagtcaagtaagaaggagtcatgaaataagcttcaccaccagagaaatcaacaccttctgtttcaagtctgaaacaatgcctatgcaattcttgacaacgtgaaaaagctttagcatccaaagcaatgatcaccaaatgtttcaatagccttcttgttcctttaccaattctaaaactctcaaagaatagatcaattacagatcctggagctgcccaagcttcattcaaagttgttagaatcactgtaccatctttagttgctgctctacgcaatacttcttctagcttag

SEQ ID NO: 30528 - DNA, 3870 bp, Arabidopsis thaliana landsberg
tcaacaaagaaaaaaaagaagttaattttacacgctagaaaaaattgcataatactaagaatttagacaaaaaaggataagtactaagaattaataagggaactagttatttctggtcttcatacctaatttgatcaactatggaaaatgcatgtatcaaaatttttagaatcgtatcatttagattcttgcattcattactaatttaatctcgaagtagaaaccatcaaaccttatataagttagtcaatgttagtctatggataactattcaaaagtttaatatgaataattaagtaaactaatggttcaaacttttgatgggatggtactatattggtgaatccgagtcaatagattcgaataaggaattagacttgaaacatatgcctttcagaaaatctatctatttagaggaggaattaggtattgaaataaattattatttatagttagtatatgaaggttgttaattcactcccgcatcgttttcaaacgtcataattagaaaaagtcaaaaaaaaatctgaagacctggcaaaatttagtgaattcatttaaggaaagaagaacaactaaatctttgatttaaagaatcgtacgctgtttaaaattgatgtaaccatacgcaagtgtgaagtgtgtatgtaataatgatgtatagatgattggagttggggaactattgaccctaattcgtcttaggaacacaaataacttgcctcgtaagaatcactctcgtgtcgcccttttttgacttggcaagccaatttgtcatgctcgtagattgtagttcaaatttttgtgtttacaatacaaataaaaatattaaaaaaacatttaaaaaaattacacacatttagctataacattgacgtagtcacgtagtattgagagagaaccgttgaggacaacataaattcattcacaaaacgaatcaaaagaagcaacaaggatatataacgttgataactcaaatattgcagacacattcaagcaatatggaatgctacacaaaataagtgtgatagtcaaaaccaggggcagcgatcctcaattttttttttttttttaaagagtccaaaataatagaattaggagctaaaattcagagatatagcatttgaatcttttcaaagttgagagtaaaaaaagtttgttatatttattttttcaacaataagacttaatgtacgctttcaaattgtaatttgatttgtaaaatgaatatttgcatatgaatctgcttaaagtcgatgccacgtattcaatcaatttgatcgggaactgaacttgatatatggaccacctaacgtcaacgaattttgaccagcaatttatacacctaaccgtaaggcacaaattcaatgacgattaccaacatttccaatcatgaatccatccgggatttcttcctcaggtattcatatttactttcatacagtatagtcaaatgattgaaagattttatgaatacaaaggcaacacacaaaataattgcggcggtatagttaaagaacacgcggcgaagaagtacggccactaccacgttcaaagtatacgtcagctaataaagtcagacacgtggcatgtcaccaagaaagaagagcatacgtatgacgtaccgattgtccctgagtcaccacgttgaacatccacgatgcaacacaaccaaaacgccctccggattgaactcgctatatatagagcgagctactatagtcttcttcgtatatcatcatcaaatcgttgcgagtttgtttggtttttacttgtctagtgttttatataaacttgtgttgtgtaagtaactaaagagccatggcgtctcaacaagagaagaagcagctggatgagagggcaaagaagggcgagaccgtcgtgccaggtggtacgggaggcaaaagcttcgaagctcaacagcatctcgctgaaggtcattctttctcttattcatggttgcgtatgtttcaagttaggtatttaggctagagtaacgagattaatgtttgtggaatatttattatatgaagggaggagccgaggagggcaaactcgaaaggagcagttaggaactgaaggatatcagcagatgggacgcaaaggtggtcttagcaccggagacaagcctggtggggaacacgctgaggaggaaggagtcgagatagacgaatccaaattcaggaccaagacctaaatcaaacttccccacacggatgtaatattaatccggtttaaatctttccatgtagttatatcttgtgtagtttcctgtgcgtacttaagttcttgtttagtttacggatggtgatgaccatgtgtatgttttcgtctacgtaaagtgtctcgtttgttttccagtaccaatttctcttctttagtaagaagttaatgattgtggattctcaacatagtgttggatcaatcgtgatgtgtgaaatttggaagttccaaagtaaaaacaggtagagctaattcgactagaattgtcaaattgcatccaaagaaaagtacgcattagaattacaaataaaaactattattcaatgttgttaaatggataaagaaaattctcacaaacgttcaattttgttcttacaaaacggtttaatgcgttatcaaatcatacataacggtttcaataatttggtattaaatacatccaaccgcaatttgactgtcgatataacgtttgttgaccaaaggaaaaataggtagaaatttggtaagactagaccggtttcagcaatagtcgctctcagcaaaaccgataattcacggtattttatttaaaacactaaaccggtttagaatgttctctctacttcgccgtcgctctctcgtctcttccggtgactttttgacgttcccgatgaagaaggaatctggtgtttgcaaattctcacattcaatcagaaaaaacatttaaattttgtagatgatatacagagagagcaactcgctccatgaatcaggcaatcccggaagacaccaatgataacaatcagcaaaagttctcggatctaacttctgctccggcgtcatgagtttcccatttatcgaaccgtaaaatgaggtatgcccatcttttctatactctgacatagtcgttatgttgaggaaatgaatcggcacttttgtagatttggtcgcattcagtgcgatttcgtaaagtcttcgatttgttccaacatttattggttttgacatgtttagtattggttctgtctctttttcacatttgcttccttcattgaatccccaatctgaacttctgtttgcaactgaaaaggatcagtctctgtaaagttttgatttttatgggtgtttgatgatttagtacctgatatgagttggtgacatgctgctgaagaagatagatgtttgacttgggttgatgttttgttctagccattttgtccatgttgataacacttgtttgtatactatatagattccgatttcattgtactcttttgagtctcctttgttgaaagattcttgttttcttcatgcatcaaagtagaaaacttcatcaagattggcaaatttgaaagtttggaacttggtagagagatcgtttatcacttacagaactttgatcgtggaatgtctagtccaccatatgtaggtgttgaatatgaggtagtctgcgtctttccagttctcgccgtgtttcgagattgaattaggaatgattactggatcggtcttcccgtctctcttgtctggaggatcagcatttgattcgactaggaaaggtgcccagtaaaatgatatggatgcattgtactcctacacattcagaatagtagagaaggtaagatttggagttcttttgcttcatggattattgtctttttgcataga

SEQ ID NO: 30529 - DNA, 774 bp, Arabidopsis thaliana landsberg
agtaccacatatcacaccatttctccactctcctgtatactgattcccattcatccaaacatatctttcctctcccatcctgaagattccgccgccatgtaccttcatagtaatctccgttggcatatctcttctgaccatgaccttgtttccgatcagcaacccaagagccacgataagtatcaccatcaacaccaacaaaagtcccagatccttccattctcccagatttgaactctccttcataagtcgcaccactcggccacgaaaacttgcctttaccactcgctttaccacgtttccactcgccttcgtacatacacccatccttccacaaatacttaccggatccgttgggaaacccgccggaaaacgttcccatgtagagatctccgtttggtaacggtttctccacgtcaacaagaggtggcgtgggagtgacgcgccgagtagttccttgagatttcgatctcaccattggagcagattgagctaacaacaccaaaccgactggtgtctgtacttcttcaccgaaacgcagattcttcttattcttcttctgaacgacgctgcttaaaatgacttgactaggttcttcttcttcttcggcttcttctgaatcactcatcggagaatgttcactccagtcctcgattgacagtgtttctcaatctcagaaaatgtcattcggttgaaatctagaggtctaacagatttgttaacaaaagaaactcattggagaaacaaaaaacacatttctccggcgattgacca

SEQ ID NO: 30530 - DNA, 2012 bp, Arabidopsis thaliana landsberg
tatggtacagcgaatttaaagacagaaaggggagatccttacagcaataagatttgacagcacagtatagtcaagttccttcttgtaagcactacacaaagtgagcaatgaggccagtgattgctgacgagccatagtaagtgcaaacgaatcatccaaaatacctgtgaaatacaaagtaggatatctatctccaaagaaatttcattctgtcaaccagaaaacaaaattctgcaaggttgaattaccatatctatcgatagaagtcaagctttggctctctgttgcatttctgagtccagccgcaaggctgtcatcatatttcaccctatagaatccagcctgatcaacattgatttttatccaagaacatgtcccattaattttgtcgctaccatcggcaatggagcagcccaataattcctttaaatcatacgctccagatttggattctaataagaagtttttgcgcttttcatatgaaccacaacacaaggtcactggtacaatccattgtccttccccaggagaaccacttgacaagaatcgagactgaaaatttcaaatgaatttcgttacttaatcatgcacaatatcccaaagtggtataaacagaacatccagaaagggaaataagtctaagtacctgctcgagttccaattttccatcttttattttggctgagacgacaggatatcctttttgctttgtccaagaactcataagcttgttcacaggttctccggatcccgcttccaaagcagcccataaatcttctgtcttcgcgtttgaataagcgtgatttttaatgtatgcagcaagagacttctgctcaccaaaagccaaacaagtagggtaagatgttttggagacattagtgaaactggaactagaagccaccatatttacatgcataatataaacgctgcaattcttttgtaactgaagaaatgggcatgagagcgaacctgaaaaacctcagcaccaagatagctttgtagcatgcggatgacagatgcaccctttctgtagcttattgcatcaaatatttcatcaatttcagcagcatgattaacctccacctggggaaatttatggacttatgacaaataggcaatagggtatctctgggatcgatagtgaaattaaggaaaaccgacattattctgtgaagacatattgacagcattttggttacctctatcgggtgagactcctcaagcccatctagccttagaccctcagtagattcatctaaaaactgggtccagattttccattcagggaacaaactatcagtagccaagtagctgacctgaaacagataaagagtaacaatatattcacaacaaaactcaaaatcattgttaatactaagacctaagtttgcaatgtacccaagtagcaaaaccctcattcagccatagatgagtccaccactccatagtaacaagattgccaaaccactggtgggccagttcatgagcaactacagtggcaacctagcagcagaaatttaactgctttagataattgcacaagagagcacaagacaatttcctctagagaataaatggacatgtttacagtaccctctgtttgttagaagcagctgaatgttgttcatcatagagaagagctgtttcacggtatgtaactaaaccataattctccatagctccggcagcaaaatctggtattgcaatcatatccattttgggaaggggatatggcacagcaaagtacctacaagaatgattggacttatgcaatgagatgatacatccattaaagaagctcagaaatatgcatgcacataaagtttcaaatgtcaacgaaggacctactctttgaacagatccaatgtcttggcaccaacatgcaatgcaaatttcccttggtcggctttgcccacttgacagtatactctgactttaatccctgagaaaaagatgaaacttgatttagagcttttcgacttgactagaccggagatcataatggataaaat

SEQ ID NO: 30531 - DNA, 1109 bp, Arabidopsis thaliana landsberg
  unsure (1)..(1109): unsure at all n locations
tttttgtattgatgtaatccattagattatgttggaggattctagttggacgagctttctagtttccacaaaatgtttggttgtaattattttttagttaattagtaaattgaggggatatttgttcccccatttctactaaaaagaacttgagctttggacatgtaaatatatccgtggatgtatgggtacatgttctaaatatgtataaatattcgtctataatccaaaaatcaattaaattatgtacttaattaagatatatataacactttattttgtatacatatgattgcattatgatttatgatttgatgaatttcgttttctaattaaattattctttttttccagcaaactgaaactattattgcttctttgactagttcttttttctttcttaagaagcttttttcatatttaactatttttttaaaaaagaatattttctttcttaagaagctttttcatatttaactttttcataaatttcgatacatatttatatttatgtgttttcttggcattaaaattttttatcgtgatttttttatattggattaaattttgtatcgtactaattaaaatattataccataaagtttttttatatatgattttcaaacttagtaactcgcgtgattttgacacctctcaagtcatcgctcatatgttgacttgtgtaaaaaagtatatcgttcgggttaaaataaaatataggaaatgccccaatattaaaatataaacgaagtcgtttgattgtagtcacgaaggatttactttcctaaaataaacgatcatggtcacctctactatacatattcttcagatactcataatcttcttttctttcaacaatcttttgttagtttactatgttttcataagttacgcttataatcttcgtcctcttccttgaactccaagattcaaacatattttcttatggaaggtgttagaagagcagaggtgattgatacaaagaggtgttccaagctgcgcgtggatttcacgccctcactacgtggcagtcgtatatcggagcctnnttcttcggncaccaccaccaccaccaccttccgattccaaccaccggttcgttccgatgg

SEQ ID NO: 30532 - DNA, 2475 bp, Arabidopsis thaliana landsberg
  unsure (1)..(2475): unsure at all n locations
tctaaactatgaaagatgatgattgatgacagaaatatcagtaagaagtacctcgtgtctttgtttcctttcatgatttacataggcaagagtggaatcaaaatcttgctgaagaaaccttctgcggaaatacataacatggtattagagaagaaacacagatgtgaaccaatcatagtacaagatatgttgtgcaaaggttacttcaaacataattctcacagctgtactgagttgaagattaatgctggataagttaatctgagatatttgttaaacatcttcactagctaaagaaacaagccagtaattcaagcataaaagatttacagaaataagggtaagttatcacaaaaaataacttggactacaagctcctcagtgtgaggaaacagggatagtgatacaactcacttttgaggattgtgattctggagatactgatgagtatcacgtgcatctgagaaggaaccaaaatgagtctgacgttgctggttaannnnnnnnnnnnnnnnnnnnnnnttctgcttcagcctggccacatcagcctcagcaagagcaatttcctcaagctcagcccttgtcttcaaatacttggattgtaagtattttttacgagctaattgttataaagaaagataccatttccttaaaatgtatacttacttttgaatctacaccatgtgaactgaattgtccagaagacatgctcaaaccaacctccagtgctgctcggagatctctttcagcttgcagctgctcttgtaatcttgacacctaaataagtatttttcatcaaatcagaagaagattcctttgacattaggattaatagtggagagacgagatttataaacactgatagttttaaagagaaattctttacatcttgttcaagcgacaaacgacgttcatgcagtgcttgtttccttctctccaagctagcctgtaatattgcattacctctggcctataacaataacggtgaccagtgttaatgactttatgaaggcaaagaataatatttcagcagtagatgattacctcctttgcaattcgttgtcgcagttcattttttgtggtctcgagcctctgtatagcaagcctacaaacaatgaaccaattagcagtacaaaaacaccaagctagtgtaatcttcgattcaagcatttaccaaagagatgaagtagtagtatagataatcaaagtatttcaagcaaaggaaacatttaaacttgaaaacttatggatagataatcacagtaaatgatagttttgctaagaaaatcaagaagttgcctatgaatacctagctagaagaaaatatatatatggagatggagaatacacccaagagttaaagccttactcgtcttctcctgaagaatcaaaagacccatctgtggatatctttctggcctgagacaaacaaagagaagaaaatattattccgttggctcattatctccatatgattcaacaaaggtgtgacacttctatcaaattggagaaaaagggttttgtctaatgcatccaattatatatgaactaatggaccaaatctgccgcgtgtacagaatcagaagtacttgataaagataagaaaacacatacactgcctcgaccccagaatgttgcgcgttttgcatgaacagaggagggtgtgcccttattcacggatttcgcgcttggtgattcaagaccaggagcagccaaagtattcccatgagtgggtacatttagacccgtccctgattgttgataagactcactaacatgtgcgagacacgagtttactccgtattttgttggatcatcgcctatctgctctccagcttgttgatccgtggaattgacaaaaggatttctcataagatgatctgttcgtatgtttgaattacatcttgggccatttgtgtctcttggtgattcaatatcagagtcatcagcaacaaatccctacaaagaatgttttcagcaatcatgaaataactattttgtccaacctttcttcttagctgccaaaaattgccgactctggttcatcgaaaaatagcaccggaaaaggaaaaatatacagtagctacacctaaaaacatattccaaattcctgaattatacttccctaacttaaaggcattttggtatatcatcaactatacaaataaatgtttcatgtaaacttggatggatgcatgagtatattgaagggagagatactggccaaaggagaaattaccttgtattcatagagatcgctgcctgtgcaaccgctgctctcactcatttttccactcaatgcaaggtcattatcgtcatcagtcactggttcaacttcattatctgcattgtgatatccatttttcatgttgttgtcatcatcacttgaatcagcaggcccgctatttcctatatgtgattcagttgatatagaacatcgttgaatattttcttcctgaaatggcgaataagcat

SEQ ID NO: 30533 - DNA, 2150 bp, Arabidopsis thaliana landsberg
aattatcggaaggtgcttataggtagtgtggttataaactatgaagatcatgtgtaaggtatgcaaatatgttatttcatgaaaagaattgttcatctgcttattttcatgtgtatagttttgacacatgattttctaaggcaactgatgatactgattgggtttaaatgtactcatcatcgtgaatcttctgggaatatctgttttatttctccatgtcactgagactgaagacggctgcttttaaaggtagaaatggaccacgacaagacaggatgcccaagcccaccatgaggatccaagctatgtactaacaactgcggtttgattggaagcgcttgcacaatgaacatgtgttctaagtgtcacaaggatatgttgccccaacaggagcagggcgctaagtttgcatctgcagtgtctggaacatcgtcatccagcaacatcataaaggaaacctttaccgctgcgttggtcgatattgaaaccaaatccgttgagccgatgactgtttctgtacagccatcctctgtccaagtcgttgcagaggtagtagcaccagaagaagctgcgaaaccaaagggaccaagccgatgtactacttgcaataagcgggttggcctgactggattcaaatgtcgctgtgggagcctcttctgcggaacacaccgctatgcagacgtacatgactgctccttcaattaccatgctgctgcgcaagaggcgatagctaaggcaaacccggttgtgaaagcagagaagcttgacaaaatctgaaaatctaagtaaacttctctggtttcatcaggtggcctggtgtttccttctcctgtctgtgtctggttcaagtattctcatgttaaaaaggttttatataaggtcgaatgaaagcgtgcttgatctttagcgtcttccatctctctgtggtgtggaactttctattatctgtgtttgcaagcagagaaacgtgctcttaaaaaaaatgctttgtgtgtttatctttctactatttttgagcactgtgttattgtttcctgtttggtctgtatcatattgagattgtctctgtagctacatgaagcttatttaaaaaggcctgtgtttgtccttcaatcagtgattcctttcaatttctctggttggtgagttatgtaactttgcaaagtcatgagcttactatatatgtgtatatatgggtcgataaacactgaagagctcgctttttcctgttctgagtacgaacgcccataaccatagaagaaggagatgatcgtaaggagacaaaagctccaaagggtgtcgtcctcacttgctttacaacatgtcctatgtgaaaaaccgacgtcgtatcaagttgcgtaagcatcgtatcaacttgctctaaacggcatcgtaggagttgctttaaacgtcaccatactatatactagttcctgaggacatcgtataaaaatgtttggaactgtttggttcattgcctacacaacaaacggcgttttatctgattttaccggttttttgatgagtcatcactgatagtgataactgatgcgcttttgcttcaccgcaactccttctcaaccgcaaccatttcactagagacacatgtaactatctcaaccgcaagatttggcaaacaatcaagcgtacgttcgttttcctcataaaccccagcaccgcatcttctacgtacttattccgctttcagttttgtttgatttcaccaaaataccaaacaatatttttttttgttttgttaaagaacaacaaaaacaaaaattaaaataataataaataataacaaaataatagtaataattaacaataaaatttactattttttctttacttttgtttgatctcatcatcaaatataaatacaagaaattttatgattttccatatatttttactttttctaattgaagtttttcttcaaattaattaaaatatatagaatatctaaataatatattattaaacttaccaattattatttcttttttaattagaacaaaatgtcattgttaaatatagatgaaaatcaactctcatgaatcattattttgcatttaatttttggttctagttttacgtagatttctttctatttagtttagactttaaaggatacaactaacttgatattt

SEQ ID NO: 30534 - DNA, 3679 bp, Arabidopsis thaliana landsberg
  unsure (1)..(3679): unsure at all n locations
tatttggatatgttcgaaaacgaatcatgttccgatactcttttcttgagaaaagctaagctcctacattagggatacatacatatgaagaaacaatgcttcaatttgcatgtgttaaccaaccatcctataaactcttcatcgaaatcataaggttcaacgaatctacgtttctcctcctaggcatgctatcaaacactttctgggcttcagaaaactttccacaaccacaataacatgttggaaagaaaaccaaaaattcaatattttttttactaagaatcaacatttgatgctgacgcaaaccctatatctggcgaaacggaacagatgcattacgcaattcctgggatcattagagaataaaaaaccacgtcttcacgtgcgcgatgatcaatgatctcattagagacaccaattctcttgtgctatgaacagaacactctgtttttcagttggagtatttaaattacaagtaaaaccccaacttttattgtgctttacattttagccccaaagttcggttacgttaatattggacatcaaccaaaccgaatgcaacctggacccaaattggagtactcatcggattcactcacatccgatcgcttcatttggattttgtattgactcggatccaaattttgtagannnnnnnnnnnnnnnnnnnnnnnnnnnnnnnnnnncaaataagaacacaaagaaacacatctccatttaactaattaacaaaagaacacacaagattcgttcgtttgtcagatggataggaattacattattacataacttgaaaaaacataaactataataagtacttcttaaccaaacgtcaaaacacaattaaaagacacagattttcatcagactgccatggtagatccaacaccagccttgtgctctcccacagtgtgtggtacatgaccatgaccatgagcttggcctgtagcatagtcttggtctctgtatccaggaccatatttgctgctgagtgaaccggcatggatcaacatgaggtagagaagctgcgtgaacgtcaaaatgataatgaaggcttcaatcatcttcagtctccatcctctccatcctcctatgtttatttgtttgcatgccaacctttcatcaaaattaagtttattataccatttaccaaacactgacacttccatgcatctatataaagaagttcacaaaatatccaaaaccaagttttaaagaaaaatagtcgtcaaaaattagcacttcatgagatttaataggacatcataaataaagtaattaccccatggcaagagctgtgatagcccatgcaacgatggaagaagctccagcagcggctaaactatcattcctccaaaacctaatatgatttgctccggccaacttcgacgctactcctaccacagccgccaatatcgaaaacgtcaagaagaacggtgttgctccattgcctccaaaacctattcaaacattactaatattcttagtaattccactagatcagctacatgaccatataaatagctagagagaaagagaaaaataaatttacttgggtggttagtttgcccgttgatgtatttattgagacaccaacttgcaaaaccaagcacaatcaggtacataacaagattcaagaacagcaatggtgctgctatgtttcttcccactgtcgtcgccatcaattgcttcttttaccttctcctaaagatctagttttactcttttgctactcgaaacctttcttctctttgcaacaacacgtaaactaacttgctcggtgatgatctatatggaagggctatgtgagacatagttatatacaccgagcttatgtgttcgttggcaaggagcacgtgccatgcgaagaggacctttgtgtttagctacttacaggtggtgggacacgtgtcttgacgttgttttaaagtgttggatatagccagtgttgtcattgagctcgaatctccaaaccgctttctttatattatctccttatgttttatcataataaatgttccaaagctaccatatattggggtcagcaattaattacttatgataatccacctggaatcaatgaaaatagccatgtattggtagaatatcatttattcatattgcttaaatatgaaatattagcttaaaattttcataattttgccaagtttcttttcatttggtaaaaagttatctgaggaaggttggggataatgaaagaggacaagtgattaaccaccgagtatctagaacttctttttttctcttttatcttaataacgaaggcgttgttaatatccggaattgtttgcaacgaaatttagttgtatgaaaaaacgaaaaaaaaaatcagttgcatactattgcttcatgggcctatattgggttggcaccaaaaaggaaaaccgcatctcacaaacatgtcggtcgtaaccgcatggctgttttcacatatgtttctaagaagtaagaacaaaccgataatttacatgtttttttgttttgtaaaatatgaatcaaatttatgtaataaagatgactgatacaggccacaatggtgatgaccataaacttgagctgcactgggcaccagactatatgattaaggtatatttgatgaattgaccaaaacacaagtgtgtttaaaaatcttactgagtaacatacatatcctttcttttcttttcctgtgttttgacaggtttccagcatctctgtctgtctttacactagtaagtataattttttctatgagacttataatgttcaataattttatgatatttagagaattagtgacgtttatgatgatgttttggtggacgaagaaactcctccggttttctcaagatcccgttgtcttgctcgttccattttccgctttcgccattcttccaatgctgagcggataacaaaaacatttgttacatacctaaaccatcatgtatagttttgtttctgatctgaattccatagcataaacaagacgatttcgctattatgtgtacctttcaagctcgatgcatcgtttagcgcacgaaaatccttcagtcgtttagagagatcaacggctgtagtctgcttcacatctttctgctgctcggtttcttgtcccgcagatgcctcttgttcgatttctcggacctatcattcatttcaagaacataaggccaaatcactctctcgaaagcatagatacttgtaaatatctaatgctacaaaaagcataatgtgcttactcttctgatgagctctaaaggttgcatcttgagcctaagttcttcggcttccttgatataccgaagctgagctgcatttatcaaagaggtaatggttatgtatgatgaaagaagaaactttttcaagtacccaaaaagaagacaaagctctgcagtaatgtagaaaaaaacatcaacaatctctcaaagttcttcatctcattaaaccaaaaaaaaaaaaaaaaagttcttcatctctacaaggcttagaatgtgaatatgtaacaactttgatatcaacagttccatggaaagagcttaactttcaagtgccttatgcaattgaattatctgttcaatacgcaaaaatctaaactttctcgaaatcgaatcatatcagtgtagaagccctaaatctacaaagagcgaattgaagtgaccacaggatccagaaatctaaa

SEQ ID NO: 30535 - DNA, 3538 bp, Arabidopsis thaliana landsberg
  unsure (1)..(3538): unsure at all n locations
gctattcgagatggccaagaagtcagcagatgttgccaatgccaagggatttctcgcagctaaagaagaggcatcaatatgcgtcgacatactcgctttactcatgaaattttccatcatctcaacggctattgaaacaagacggatcatggaaaagcttgagcgtctcacaaagcacaaagatagaaagatatgcaatgctgcattagcacttctccaccattggaggcagaccattagaaatcaacaacaatgagtagtgtcatcagagaatctgcggaagacaagggatggaaattagtaggatcgtgacttgaaagttttggttttctattcgtttagtaaactagagtagagtagcatgccacttaaattccattacttagaagcaaacaatgttatgagttaatgagttgtgaatatattatataaggattttcataatctctcggtgtgttgtttcaagtggaatgtgtgtttttcttttgtttatgcaaattcatgaaaatggagtttgatttgaacgacatgacaagcaactatattatggaaatgaattcttgtgcataatggagctcttctctcttgtgttccatcgttatttatcatcatcataaagcagagtaaaacagagaagacaagataaaacgaacttgaagcctaagcaacacaaagatgaaagtctttacttagtagcaaactgaaactgatacacttttgatattttctggtaacatgtttgtggttaatacaatagggattaacatctggtttgtagtttggttttgatataactttaccttttttgggatttacaaaagaaactaaaaccaaataaaatcatttggtctggtagatattcaatgatgaaacacaaaacatagaatttatcctaatggttttatacgaaccatttatcttaatgaacgattctatcgccactgctttctagttcaacaaattcttcctcttcgtcgtctggacaaataatatgacttgcatgtgaaggcattgttccataaaccaatagacttatgaatctctttacaaaaagatcactggtgctttataggaagaagtaagataatactttccaattcacagagtaatttggttgcaaagttccagcaaaactgttattctgatatattgagtatcgaaaaactttattcaagggactttcatatatagagtaaatttacaaaatgagtaacacaaaataatcaaaccgggacttttctaccggaatttgccacagtcatctccaccaccgtatctccgccgctttgttcctcatcttctctcgaaatctcttccaaagacttccctttagactccggaaccaacagagtaaaaacaatccccaagaaattaacacaagcaagcatcaacaacgaattcctaacaccaatcccaggaggataaccannnnnnnnnnnnnnnnnatccgaactctgcgccgcgtaaagaaacccaaacgctccaacaatcgctcccgcctttaccactcgccgccgatatcccatgacaagacgatctcaaccttgccggaaatatctcagcaggaacaacaaacgttgtcggattagggccaaaattagcgaagaacatagtcaacgaatacataattaaaaaaccaaagcgtttctctctatgtctccaatgatcataaggaatcgctaaagcgaacataaagatcgtcatgaagataaatcccatcaactggatgaagaatcgaccgagtatatcgatgaatgcgacggtgaaccagtaaccagggacggtgccgcagagagcgattagggtttgagcttttgagacggtgaagacttcgtggattgcgttcattgtttcggcggcgggaatccatccgattgctgtgtagatgtctttttggaagaggttgctgctgtaataggcgatgtctaggaggaaccatgtggtggttgtgccgagaaggtggagactgtgacggcgagcgaattctctggtgaataaaccgaaggtgaaattagggtttgatgaatttgaatttgattgtgcttcttcttctgcaattagatccacttgaagcacctgttgtgtaaataataattacttttacactaatcatcatggtttagtatgatgatttagtatatgatgaaattaagtattagttaaggaacgtgtaccttagacatatcggaggcggcttgtttggtattccgagctacaagagcggtataccgagcagtttccggcattttcatccgccaataataagtaagtaaagctgggatagctccaaacatgagcacaatccgccacacgtaatccgcttgaggaacagtggagccaacaggatcaacctcgtaggtgggcgctttgaaggcatggtcaaatgtactcgagacgatgagagacacgattcctccggctaagattccgaagccttgcatagcgaagacggctgctatgaaggcgccacgtgttttcttgttggcgtattccgacatgatggtggctgagagagggtagtcgccgcctatgccgaaaccgagccagaaccggaagaaacaaagtgtggccattactccgttagctgagtgaccaaatgatagaccagacccgagagaacatagtaccatgagcatcaaggtaatacctatgtgtattccaataattttcattatataccattagttaatttagccactaaatactataattaatagttctagtattaccaatggatcaaatactttgaattaatctagatagatcattttaaacgtaaaactactaaaacatatgttaaggccaagaaattagcaaaggttaccgtaaactttcttgcggccgagcttgtcaccgagccaaccgaagaagagctggcctgctaaggtaccgcagaaggccacaccattaacagcggcagcaacattaggagggagcgttccaggcttcttggagctatcaacatggtagtatatgcggcctaggagcttcgtgacgagggagatgctaaatagatcgtaagcatcagtgaaaaaacccatacccgcgattacaatcgctgtgaaatggtacatctgcgttttggctgcgtccaaagcgttcaacacttctttcccttttttcgccatgtttttctctgttgttcagtcacctgagagaaaatcttgatacaacaatttttgatcacataggctagtattttataaatgtaattattatatagtcaagatattgtgaacatgcatgtgacagtgagtgcagttatctatgtaaaattaaatgcagtttataagcgatttgtcaaaggttgtcttttttgaaagagtcaaggaaaagtatgtgtgaggccaagaacctacgatccccttttgaaacgtaggaatcaatctaacttaattaagcttggttttgatttctatcttaaactaatcaatttactacaatttaatcaaatatatttagtttattcttaaaccaaccagtttacacttaaactataagagtactggtttataacatatagttcactgaaaaaaaa

SEQ ID NO: 30536 - DNA, 3592 bp, Arabidopsis thaliana landsberg
ttgattcacctgtttaaaacactacaagaacactctcacataaagagatcatatcaaatgcaaccacattaagaagaagatgcaaacctcgttgaagtacaagagtgactggaccgggcaagagcgaatcaagtaaaccgtgaggtaagtgacttgtggtagccactctctttgtatctaatacatcaccaacgcagatagctaaagggcttgtaagtttacgccctttgatctcataaatccggctaaccgcttctaaagaactgtcatgttacataaatcacaacttagtccaggcaatgtaaaaggttatatcagctgataaagtgaagatttttagattaccaagcatcacaagcgaagccataaagcgtatcggtaggcacagcaataactttctcggatttgatagcttcaatagcttcttgtgcataggcttcagttgcaggatgaactaaacatgatttgctcactacacaggtctcagctctctccaaactccaaaccatcttcttttgtaatccccatctcaatcttctactttggttagcaattgaaaagcatcttaactcggagactcctaatacacacatgagtagaaataattaacaaaacccctcattagcttgtgaattcgagattgaacctaacgacttaaaaccttgtaaagataagaggtagagagatatgagcacgaaagtatccttcatcaatcagagacaaatcaaacagacgaagagaaacccagaaaagatttccctttgaattgaatccaaaccaaacaagcaatttccaaaaagacagtaagattaaaaagaaccaacctttacgcaggagaggagaagacggcgccggtaagattccgggaagtttttcagcgagcctcgtggagagattcatcgcaagtgacaccgtcgtcgagaaggaagaacaaagacttaagcctaataagtcagaaacagagaagaagagttttcaggaacttggcacgtgattacctcgtgacccacttgttcaattttaaatctttttattatacagagaaaccaatactgctacaaacatttcatttgcagagattgagcaaatcaaagttacaaacttacaacaatacaaatgtgtatgtaaaacaaacaaaaggaacaatctttaagcattccttggatcactttctctttttcttttatacaaatcattacataaacattaaccaaactacactgtataaatgtaaaatcatctgtccacttcttggctctctatgaggtatttgaatgatgcagagaggttgttggatccagtggttgcggcggttgtgacagagtcaaagcatggttcagctgttgctctagccttctggctcgccatcttcgtctccatctcacaaactcaaccatcactgaacttccgcatatgcatacaccaaatccagcaaatgttgacagaagaactgacagaactggttgcaacttcacctgttaccaccgagagatcgaattttagcaacaaaaatgttgattttatagactatcatatgataaaggttgcatttctatgtctcacaacgttttgttgctaaaatttaaccaaaagctcacaacgtctaaccaatatgtgtctcacaagggaaggaaaaaaagatgcgttgaagagcactaaccacagagtaaaatatatgggcgaagagaacgaccaacgcaaactggacagatgcgtaaatccagacaaatcttctcattactgcataggaatattccagaactgaaaacgggtcagagtggaggagcacattgcaaagagtattttctaaaagacgacctacccatggttgatgcggtcatggatgcaagaagaccaagaatacaagaaaacggcagtgatatagcgatggcacctgtacccatattctcaacctacaaatggaacttactgttatagtctgtatatgtatgtctaaatccggatgctggttgttgttataaacagtagagacggattaccaggagctgctcgaggaagcagaagtaagcgagcatgctgatgattactagaaccggtacctcctgccacaccctgtcgggaaattatacagagatttaggtgaagtttactatttaaccaaaagaaagtttgaatactctctgaggttcaaatcttgcagaaaatttgtacaagaatgtgaaatgaagagtatttttacctatagccagagacatctagctgaggaacaccagaatttcgaaggctttggatgcgtaagagtgttacaggtaagttcttaacttcttgtttacacacctcacaagtcttgttaccctttatggtgaaccatttaagagcacaatctttgtgggcaagagcaagttcgcctttgcaactacactccatttttaaggtttctcctccttcacagagctctaccaaacaaatcctacaaactgcttcatcctcaggtatgtcttctccatcagcatcacctgtttctgtacaatacattaagatagatttgtcgtgtccagtaaaaataaatatctcggaaaaaaagaaaccataaaaccgattgaaatatgaacttaccagtattaccagcctctgatgcatttgagaaaacgtctccttccttaacacgaggagtcgaaggaattactctgaaaaatgaatccattcccttcaggcttaattccttgtcgttaaggggcacagagcgagagcgagctatgtgtacactcccttttctctgcaatgccaagtataagtacctaaacaatcataaggttctctgaaatgatacaagagaaagcttacgtttggagtttgaggagcaacactggttcctccgtgagctgactctgagtttgaaagaataacaggagtcacaggtagggacgaagttctcttgatcctaggtgtaaatagctttgaaagtgataatgacctcgatatcgaagccttctcctgcgatgcaggaggagaacaggcattcccttgtcccttctcgatatcagtgttagaggtttttggtttacacccagcttttggcaatagattcttcagggacgatttgccacgaggaagaacagaagaagaagtaggagtaggacctggagaactcgaagtcaaagcaaagttgactcttcttggagttggactaggcgttggaggcattttgataacaaccgaatcttcaggagagagaccagctgctctagagggtatctgtaaagagagattctttcgcctccattgttgaacattcgcagaagtgtcttcagttatagcagatgatccttcagccttctcatcaagaacgaagaggaaaagtaacaaaagagttctatgagaattcaaacaacacctcaattccttaagaaaagtaatcccttggatgaaactaacaacactaatcagagatttaggttccaaaagcatgaatttttccaaacatgacaagcaatttttggcaagtaagtagcacaaaaaaaactctaatattttcaattccattcaagagacgcatttaattcattcaaaggtccaatttttggaaccataggtccaaccttggcaaaccaccaaatttgtaaggcctgat

SEQ ID NO: 30537 - DNA, 718 bp, Arabidopsis thaliana landsberg
taagggctgctcctctcaaggggtcatgatccgtcagtctctgagacggcacactgagaagaagatagatacaccaatttatatagacacacaacacacgcaaaaacccttgtcgtattatagtaatgtgtttaactcataatgttaaaacaaaatcgtctaatatgatcgggagggggtgttacacctatatttaaaatgaaacactcgaaaaggttataacttataaacattaaaaataacatattttctatcatattccaatgattatgcctatattggttgcataaaaaggtcgaagaagtgagattaagaataatagaataaaggaaatctagattctggcgtattccaccatctcatacttgtgtttaactttatctggggtattcttgttccactcaggggaccaatttcgatacaatgcccaaacttgtccctttatggaaagaatattgaggagtcctcttgcacctttggtaaacttatctagtactttatataaaaatatttaactttttgtaatttgagtattactatgtttattataaaacatttttttaattttttcttaaaatattatcttttatttaatattttttcatataatatagtccaaaaggagacaatatacacaactttttggattttatacacataaaataacacagtaacatactaatatgttattttatgtgtataaaatacagaaacttgt

SEQ ID NO: 30538 - DNA, 928 bp, Arabidopsis thaliana landsberg
ccccccttttttttttttttttttcccccccccccacctttaacccaaaaattcgctttaaaccccataaagaggctttttttggcccgtttaatttggtttttttaaataaaacctcgggtgagaaaacaaaaaaggttaagctgttgttttacattctctaaaagctctctcttatatagtttcccactaacaaatcccaaatctaattctttcagctaaaaatcttacatcaatcaatcgaattgtcaaaaaaagatatcacaacccttcttctgaattctcatttcttaagcttatacacttgaaatctccaaaaaggtaccatttttatgactttgttatctccgttttgtgttcgttgtttgcgattctcaattgggttaaaagggtttagtcgttaaacatttccatcttcgtttttggacttgatgtgaatttaaagttgggaccttttatgttttgatccaaagaaaagaatccccttcattgttgttttagtgtcagatttgtttcttctttgatgcaggggaaaaagaaaatgagttaggtgaagtttcagaaccatagagacgacgatttgatcgttgcgtaaaccaaatgatataaagcaaaagatgcaatcgagaatcgtcggattagctccggcgttttctcttttccctaacctaaacacacctcacaaaaccttcactttccatcaaatcttagttctcatcatcacattcacagcctacgctttctttcacgcttctcgttaaccaccaagtatcgtcaaaagcgtccttggtccaccttctcttaattcatcttcaattgataatggctgggctccgtttaacggaacccaaggaaccaagagacttggggagccttgataggcttttctttcttcttatgcttgggggatgtattttgctggacattt

SEQ ID NO: 30539 - DNA, 1495 bp, Arabidopsis thaliana landsberg
aatgttatttcaatgtctctatataactaccatttttattttttctattatttatatttttatctacgataaagtagaatatttatataaaacattgtctgttttatggtagaaactccgtaaaatattgtaaaaattatgctaaagaaaagatcttctgcggtaatgaacaatgagaatgttaaacttacttaaaagtgataagaagcggtgttaatgttaattgagatataaacaaatttgaattcaatgaaacttttgaatacactttaatattaaaagaaagtattttgtttatttgaataccctagatggagaaagaactcttttattagtgactacagtctcatgacaaatcgaatatgaatccaagtcacaagaagatcgcttgacttatcctaccattttcctacgaaaattgtttgtagggaatagtccgtaggaaaccaaaattggtaggattttggtaggatctcagtcattcgaaggtgtctagaatgtctttatgtagagtgttcattctacattactgaatactttgctcgtgaatactctgagaattcacattcaagtagccaagaggacacaaacacagaagaagtatctaatcctaatgcttcacctgtgatactaccaccattctcttatcgcagcccatatctgttttttccgcatattcatgtaccatctaacaaaaatattttctgaagatttttacggccagggatgcagagaacgtagaggtggatgagaaaagtgaagttgtgaaagagaatgagcaaggtgaagctttgaaagagaaaaagcaaggtgaagctgtgaaagagaatgaggaaagtgaagctgtgaaagagaatgaagaaagtgatgctgtaaaagagaatgagcaaggtgaagctatgaaagaggttgagcaaagtgaagctgtgaaagagaatggagaaagtgaagctgtgaaagagaatgaagaagtcggtacggatctagattaggggggtatgaaggtagtagcagtcagtacacaggcatgaagagaatgcacaaggagttgcagcggggtctagttccagaaaaccttatggtacgttattagcttctttccctgtaagaatgtaatgcacctaatggaaaatcttaacatttcttcctttgcaatcttccttagaccaagtttctctgtgcatctacggaaaactgccctgaactcttcagctttgagtaaaagagccacggttagactctgatcgtcttttgtatagtcatcaaaaacttccaccatctcatacttgtctttaacttcatctggggtattcttgatccactcagggaccaatttagatacaatgcccaaacttgttccttttttgaaaagatatggaggagtcctcttgcacctttgggtaaattatctagtaatttatataaaaatattttttttttttgtaatttgaggaattacctatgtttatatataaaaccattttttttaattttt

SEQ ID NO: 30540 - DNA, 752 bp, Arabidopsis thaliana landsberg
cttactttaaatgggccaaaaatctaggcccgtaatatttttaatataagtttagtagaatccacgtggacagtagaaccgcggaaaatattcgtttcctaaagacggaccggttgctttgagtttctccgttcgacaatagggtatcaacgaccaccgtgtttcggccagactcgtcggaggagtgttaaaattgttgaatctcagattagggtttacttctatggtaaacttcttaaggtctctgttttcctgatctgaggtccttttggggaaatttgtttatggcgttgaagcagcagaagctttagctatacttgtcggaagattgtgacacttattgaatcccagattagggtctacttatattaccattgagtggaatatttgaaagactgttcttccgaaggtgaaattcatggctgataagtacaccgtcgaggaagcagaggctttggccaagagagctttggtacaattctttccccagctatatacttgtctgacttctcgtactctttcataaagtttagatttttacttgttgggtttcgtaaaattgtgtcctttcctcagcattcaccaattgcacaagcgacgccgatctacgagcagcttttgtcactttatcccacttctgtaagtttcccatgactttgcttccacgtattttaagagtttcctgatgtttttggttaattgtgagctcctttgtactctgtaggcgagattttggaagcaatatgtggagt

SEQ ID NO: 30541 - DNA, 1368 bp, Arabidopsis thaliana landsberg
  unsure (1)..(1368): unsure at all n locations
tctatccaggatccataaatctctgtaacttcacaaaaggtgtttccaatgccaagcgttggtgtgaagctctacagtgttttcttcaagttcctttttaaaaccccgtttacaaaaccggattcaatcttccggtgatgaatcttcctcggatccatttggtgtcacgacccgacccgaagaatccgtcgctgctccgaatccgttattcaccgacggtgttgcaaccaaagatattcatatcgatccgttaacttctttatctgtacgaatttttcttccggaatctgctcttacgccgcttgaaccgagtacctccgcctgtgtttattccggtaaggctcgaactctcaacaacatcgccggatcggatcttcttagtaggagaaatagcttaggttcgtctaattcgttgttgtctcataaggtagaatctagaaggaacagttacggttacaccactggttcgtcctcccctgaggcaggatcctccgacgtgtatagaggatacgcaccgtcgtcgtcgggtggaaactctagaaaacttcctgtgatgttgcagttccatggtggtggatgggtaagtggaagtaatgactcagtggctaatgatttcttttgtagaaggatggcgaagcactgtgacatcattgttttggcagtcgggtacannnnnnnnnnnnnnnnnnnnnnnnnnnnnnnnnnnnnnnatgggttcaaggtgttgaaatggctggggaagcaggcgaatttggctgaatgtaataagtcgatgggaaattctcgacgacctggaggtgaggtgaagaaatcagaagttaataagcatatagttgatgcttttggtgcttccttggtggagccttggctggcaaatcatgctgatccctcgaggtaaaaacaatgtcttgtttaggtagtgaaactagtgaaagagccaagaatttgttagaaacgaatgtgtttgtgtgtgttcatgcctgcctgaaaatctaagctttagtgtcaactctatatgttatacgatgtcctttacgatctttgatttgtgatctactgatgctaagttcagcttacttcttaacctcaatagtcttgataggtccttatcatgtcttgaaattattcaaaccacacttgctttctttcaggacttctcatgctaattctcctcttacggtcttacccattggtatgagatgtggaattgnnttcgtcgtcattaatttctgggtcttagtacatgctagatatgtaaattcaatcctttggattccaggaatcttcttggattggattatcaaagcttgtttttgatgagaaaaccttctgcttangatttcagttcctgaaaatgtgcttggtatg

SEQ ID NO: 30542 - DNA, 844 bp, Arabidopsis thaliana landsberg
  unsure (1)..(844): unsure at all n locations
taagtagatactctttcccatctatcacttctttaagctcacccacttcttttctcaacatctctattctttctccatcccttattccattttctggtgactcgtagttgttttcgctgttcacatcgccactccaaccattgctacctgtgtgtcccacgcagtgatcagcgattgcctttctcagtctctggacttctctttctgattcaaacaggtccctgtttgttgcgtctagctgtgtttggatatggctagagtgtcccatctgggcgtttagcgagttttgcagctctagaatctgttcctgcatttcaactatcatgtcgtcacgtctcttcagctgttgcctcagtttctgtattacttctcgcttgctgaagatgtctgagccggattcagatacgcaaggagaatctgagcaggtcgaatgttgatggtatgctttcatcggcacttccaggtggtcaggagaagatccccatacgactgttctttctttgctatatgatgaagcangaggctgggtttagaggcagagaggttctggactctgccatttgctcatttgtagcatgatttccttccccattctcagttcctgcataaatgaaaataagaagccaactctcagaacacccacacaaaacttttctgccataacacaagccatcattgggggataatactacagccttcatagtttccagctcattaacgtaagtagctacttaagtatgaatcctgattggggtacaaagacatctttagtcaaatattgctcctgattgggttacaaagatcattatgcaagatactagaggctacaaatatgtaagaacca

SEQ ID NO: 30543 - DNA, 3949 bp, Arabidopsis thaliana landsberg
cgctactctaagcctctgcatgttcgaaatttcttggcctaccttctgttaataacttcaccagtgcgaatcatatagaaactggacaagattctgtcttacaaaatgtctgagttttgttataacactgtcaatgctaaacatgcttatgggatttcaattttgcatttcacaaaaacttaataatagtttctgcaagaatattctatgagaccatcaaatcaaaaacaaaaaatgtctcaaactttgtcggaaacatatactatatactaaaatgttacatacaagattacaagtcaattgcaaaaggcactactacatgaagacaaagaatgaatcaaaaagctaaaaatcacaagctaaagaggtttcatcaagacccaacatctgttcgaacaccagaaccattgagacggaaggcatgtgatcgagccagctcaaccgcgtcctgaaccctaagcctggttccttgttgacccaccacagttgctgcaatcgttgcagccatatctcccattcctttcaagtcagagacacccctcaagataccgtataagatccctgaagcatatgcatctccagcaccacatgtatcaactggcacgcatggggacggaggaatgtagatggcctctccttttactccaatatatgacccgttgattccatcggtaacagaaacaaacggaacaaagtggctcatgtatcttgtcgctgaaattggactttcctctgcggaaaagtgacaaaacgctcttgcttcatcgctatttgcaaatacaatatccgcatagttccccacaatgtccctgaatcaacagaaaaccatcagcatttatctaggttcaagtttcgttttttcgagagacattcacagcttgaagcatcaaagcttctatgacttatcaagctacagaagataatcactctcttcgtattatttccaactgttcctatccgatggaactgacccaaaatcaaatagacgcaagaatgtattcaagtaaagggagaagaaactgaccagaaatcatcataatgcctctctatgcaggacacatctgatgctgtcacagcaacaagtgccccgtttctgtgggcttcttcgcaggcttttgttatggttcttatagtatcaggaagctcaaacaaatagccttccacaacaaagacatttgtcttggctatcaaactagccaaacaagaatcataattaacgacagaggatgttccctgaaattatacataacattaggtttgttatttagtgggatcaataaaactgaaaaacttatcagagttaacaatgctactactatctcaatgtggttgctttatggaagcaaatcgatcctaccactacaatgatcttgcacgtcatctacttcaaaagttaaactttgctcgactcttgtggaagaagaaagggaaacccttacattttgaatagtaatacattgcaagagcaatttgctgagatcagaaatcctacctgatatgcaagcatagtacgttgtgcatcaggagttgtgagaactatcactgttcctgttgttccgtccttgattggagcagaaagaaaatttacatttgctcgtcgtagtttagtcctatagaaacaaaaaaaaaaaaacttgtgagtataccaaaccaaatgtaatgataggctagtttgacgccttacaaactactcttgtatagtaacgattctatacatagttccatacctctattcctaagaggggaataaaaagtagactatgtcgaactacatacactattagccataaatgaagagcagggccatatgagtaagtcagtttagtacccgtaaaagcaaaagagaggataacctccaatactgccagccattgccacattcaaaggccggtcgcagatggattgagaacctaatcttgcgagagcaactaaagtgttggacaatgagcctccagctgccgccttatagctacaaccatccattgcttgtaataatttacccctctcctcgtgattaatcagtttccttgttcccttttctaaaccaagtttctttagaaactcatcatccacaactccagagaaatctacctaaaacataaaacacatcatcaataaccaagtaagtatttttaggatccagattcacatatttcaaccatttggtggcttcaaggataagaagaagctagaagctagaagctagaatgatttattataggaaacaaaaactcaccatggcttggccgagacccaaaacatcccatctctcaggcgaagcagcagaggaattattagcatggacttgtatgaattcatcgtcgtcttcgtcttcatttccaatcctctggatttcaccttcatccatatcatccaattcagcaccggctccgccaccaatcctacaaaccaattgcctattctccgccatggaaacaatcctcaagttcccagaagctccgaaaaacgaggtcgcggttctggttcgtaaggttcctttggggtgatataaagagtaaagacgggagagagaggaggaggaagcattattagaagcggtaatggcggagagagtgaaaaaaagagaggcagaggtaggaattggagagaggagggagaacgccatggaattagatagttttgctctttgaatgaagaaagctcacatctccattcaaaagcgagaggagcaaggaagaccagcaaaacccgagagacggcctctgagaggataaagtatgactttgactttatatgtttatttatataaatcttattaggataaaactctatttcttatttatattcaaacccaaaatttcagaataagcataattgctaacaattttattttaactgtatcttaaaaataataatgtatgttgcgtctatttataaatttaaaatttgtttatactatttatcatttgtgttaaaattggctaattcttctagtgaacacatccttatacgtggcgtttgtaattatcgggttagttaccaattacggagaataaaaaaaaaaaaaaagtagagagctattcccgcggtaaattcttcaacaactatctatttacctttacaccaaatgttgaaagaaaaaacagaatcaagacattcaaaaacgaaagcagaaagccagaaagaacctgaaaatcttgatctccaccgttcttagtacatactaagattcattttctcgaaaaaggaaaaagaaccgaaaaaaaaaataagagacgcaagtatgcacaatgcctaacctttccacctacaataagttttggagctgtgagtccagtctctgctgcaactcttttaccttctgcgaaagctcaatcttctgctccttatagcttctaagtagatactctttcccatctatcacttctttaagctcactcacttcctttctcaacatctctactctttctccatcccttaggctcttttcttgtgactcataattgctttcgctgtccataaacccgccattccaaggtccaaccggagatgtcttgccattgctgtccgcgccacatcccacgctgtgatcagcaattgcctttctcagtctttgaacttctctttctgattcaaacagatctctgttcagtgtgtctagctgtgcctggagatggcttgagtgtgccgtctgtgcgttatacgagttttgcagctctagaatctgttcttgcatttcctgtatcatgtcatcccgtctcttcagctgctgccttagtttctgtattacttctcgtttgctgaaaatgtctgagctggtttcagatacgcaaggagaatctgagcagtttgaattgtgattgtatggtcttgggggaagttccaggcgatcaggagaagttgcccacatgactccattctctttgctcgatggagcaggaactgtcacaagaggcagtgaagtgtcagatgcggatatcatttgctc

SEQ ID NO: 30544 - DNA, 1311 bp, Arabidopsis thaliana landsberg
tcatctcttctccgcgagcctcccgatctcccattgcgcactctcacctgatttcgaaaaacctataacatctctggttgatctatgagagtcacccgattttcctccgtctttgtcaccaccgccgccgccagattctgttgagttgaaggtgtttggaatcgttaatgagaacggaacaatgtctgatgagtttcagattggtgattacgacgttgagtcggcggagacgttggggaatcagacggaattcgagagtagcgacgacgatgatattaaatccaccacagctagagttagtgtgaggaaatttgagatttgttcggagaatatgactgagtacattccttgtttggataatgtagaagccatcaaaaggcttaattcaacggcgcgtggtgagcgattcgaacggaattgtcctaacgatggaatgggattgaattgcaccgttccgattcctcaaggataccgtagtccgattccgtggccgagaagccgtgatgaggtatatctgtgacgctctctgttctgattttgtatttccaaaaggaaagtttctgattttggtttacaggtgtggttcaacaatgttccacatactaaacttgttgaagacaaaggtggtcaaaattggatttataaagagaatgacaaatttaagtttcctggtggtggtactcagtttatacacggagctgatcagtacttggatcagatctctcaggttaattgatttttatgtctcattgtgagaattatttgcatcacttgaatctgatattactttatttttgtggttgtatgtgtagatgattcctgatattagctttggtaaccatacacgagttgttcttgacattggatgtggtgtggcaagttttggtgcctacttaatgtcacgaaatgtcttgactatgtctatagctccaaaagatgttcacgagaaccagatacagtttgctcttgagcgtggtgttcctgcaatggtggcagcattcacaacacggagattgttgtatccaagccaagcttttgatttggtacattgttcaagatgtagaatcaactggactcgtgatggtatgcagatcttttctgccactgttttttactaatgagaaagttaagacataaatcttattccagttcacttgcacaaacttgttaccgttccttccaccatgtttaactcgttttcctatttttggtttataaataaagttatcgatccgtggccacatagagctaaaactgtgctttggtagctgttttgccatttaacaccaaacttttaagtaaaaaacgtac

SEQ ID NO: 30545 - DNA, 2897 bp, Arabidopsis thaliana landsberg
  unsure (1)..(2897): unsure at all n locations
gattgttatatcacacaatttgcttatttagcctttgaaatggatatgtttaaaataatctacaatcaaacaccgatgagatatcagtcaatggtcagaggagagagctaagtgaagggcatgctctgcctccttcaacaacagtcttgtgagctgcttctgtcctctacggtacactacacttgaccacttgtttctgctcatccttctcccatccaagtccctaccacaaaacatattttataaacatttttaatcaatatctaaacgacatgtccacagattttttacattgtacctcgattcttcatggctctctaagacgcacgcctcctcaaggagcctagcatcttgttcttcagtgccagaattctcttccagcttcatcatcctgtcaggacaaaaagcattgaggtctgtaattttcttctcatcccacagacaaacatcttagttagcccttaagaatccatgttcaaattcaactgcttactttgaattaaggagatccacaagtaactgcaaagctccagaatccccacatgcttcccatactgccatcctgacctcagtttcagaaggttgctcgccttgtcttgactcaacaagcttttcaggaaaacaatacttttgtctcattatctagtggaagacaaactgtggatatttatgattccgccttcgtttcccaagttactactttcactctttcagagatggagattttttgtgtaggatatgggtttcagatgtcagaagaaagaaaaaacggtgatcatacctcttcaagcatagctgagaccttgtaaatctcttcttcttgcattgcaatggtccttaagccagtcataaaatcttctgggaaaactagtttgttcatatatgtgggcatcttacgcttcccagaccaactgaaattacaggatctcactgtttccttctcatcactttctctaattactgatgtggttcgtgggaaaaacccatgatttaggaccgattttggcaagagacaccggagttgtgcattctgcaatgatattttttagagttcgacagttacatattacatggaaataaatgtattaaagagctacattgtcttatagggtctataatcaaaacttcgggtaagatagtgcgaagacttgtactgctaacctgagcttcaagcagctgccccttggaatcagaaaaagggatactcggaattgcctcaacaggataatgtacctgaataaatccattgttaaacgtaacaacagatgtgagaacaaaattgacgagcatctccttgatcttgaaagttatgtttctcgtcatcattctcaagacttctataatacatcactggttgaaaaggtagggaactgttgatggatgtaaatattaccatgagataatcatctgggttgttatctatcacaaagccatacaggtaaagaagctcctgcattcagcaagaaggcacatcactcaaacaaagggctagatgtgattttttaccaagagacaagttatatagttgtacaagatagctgcaaaacatcttacctcatttcctttgttaccataactgatcgagatctccttctttgggataggacgttgagcaactgctttacagaattgtagcacttagttttccgcatacagatcaaaaagaagagaggaaaaagaatgttctgtattgtttgattgaaaaattgtagaaagctgagatgtttctcaaacaaatatttggccaaccagagagaaggtacatggagaaaggaaccctagatactgatccgatcccatcaacttcccaagtcgccacaggcttcaaatctatactgccataaccataggtcattatatcacatcacactgggatatactcattaaccatatcaacattatggaacggagaaactgataatagagtctttttgaaacaaagattggcataccatggttgcaaaagtcaatgccaggaacaagcccctcaacccatattgtatctccggatcctacagatggcgcaggttgagcctgaatttctacccatcagaaaatgaagaaacccatgaaattgtcgttacatgatagaataataataattaaaaaagaggcatttcacacagaatnnnnnnnnnnnnnnnnnnnnnnnnnnntttttcctcattagaattaactggagccgtttcaggggactcacttgttgatgtgcattccccggtatcatcttggctttgtggaaacacgaaagaatgtggaagaggaatattcaaggcgcgactccagaatacagagtttgccctggcataattgaaaaaagtcgcaagatcactaagcagccctttacaagacacaaaagtctggttctactaacaaggaataacaccagtaccaaacataccagaggaagtgttcaaaggagaccttgctgcacgaagagagaaaacaaaatatgattatcaatgaacaataatttggtctaaaagtagtgtaaatatgtcaacctttcggaatcgccatccaaaataagaagctttgtcaccaggacctccaccttgtcatggtaaagcgagagcaacttcttcttctgagaatgaatacacgatggttattgggtttaataaatgaaaagagaaaatgtggttgctattttaaggacgatatgataagacaggaataaatgatcaagattgagacctgtaactcggttgcgtgatacaagttagtcccttttagctcaaggatgtcatcatcagaaaaccaaagaggattgccaaatcgagtaggaagcatatcaagatacctatcatatcatttctagacagatgaatacccttaagcttacgtaaatgtgtgctaagagattaaaaaaaaaacttacggcttccaaggacaat

SEQ ID NO: 30546 - DNA, 2870 bp, Arabidopsis thaliana landsberg
  unsure (1)..(2870): unsure at all n locations
aagccaaggctgcttcagagcctctgctgcataaggacactactttgtgttcatctcaagaagatgagccacaaagtctgtgaattcttggtctcccattggcagccgatgtctcaacgatgttctttttggtatcaggtactccaatctgttgctttcctgaacaaacaatttttccagagagaatgttctttattagcatatgtttcttccattcaacttaagagttgcagagtttttggagttcagggaatgttcctttaaggtctctggaaacactaacctggttccgctcatagagcattcggttttttgtgaagtatttgtgggaatcacgtcccttggtaagcatttcattatcgaaagatcctacgattcccataacccttgctagcaaactggccggcgaatcattctggaagagaacctgcaaaagtaactcgatatttaaacacggattcaccttcttgtcctcaaaaatcaacaaccaacccagacaatatgaataaccagctgacactccagaacatcaatgatgcagttacctttaactccatcaagtgttagtataaatgacacaagtttctggtaaatttctgtttacttaatagcccgagaatcaagttcccatgtaagaaaacaaatttatgcggatatggaaattttctatctcttcgaaacgtattttgcatgagaaaaaataatacatgatgaagcaaaaatcagaaatgcaccaagtcaatggaaatgcaggacttacgttgcctgtacatagttcagctaaaatgcacccaagagaccacacatctatctttttatcataaggaagtcccaaaatgacttctggtgctcgatatgaccttgactggacataggagcataggtggtctgtctcgaaacagctacttccaaggtcaatgacttttatttcacatctgctatagcttttcaccaatatattctcaggcttcaaatcacagtgtataagtccaaggccatgtagaaactgaagtgattcgagacactggatagtgattgactgtacagaacggtcccaaagagatcaggaatcggatacatatacatatctatgatgtatggtaatgataaagtggacaaacctgcaaccttggcatcgtgaaataaacttcaccacctgattctctgttaaatttgtggaactcgtatagattggccttaagaagttcacatacaattagcaagtgctcctgcaaagaacattcagggaatccgttacaccaaacaatccacaaagagaaatattgcaaaggtattaaataaaaggcatatggttcacacttgtgctaaaattgttgaagagaaagacacaattggtcacttttgatatacagtagcaaaaccaaattttgcaaaagggatgtaatcacttacccggtagtaaaagtaatcatacaaccgtagaagatggtatttgtcagcaggatcatgcttgttgacatacttcaaaagttttatctcgtcaagactctggtcaaagaagtctttgttgttctttataatctttatacagacatccattcctgtctgtaagtcatgcgcttgtatggctttactgaaggctgctgatccaaggtactcagtgacatggtaccgcccagcaatgaccgaatttaaaaccacgttaaagttcttttcctcttcgaaaccagtcctgataaatgccaaacaagtaataagagagcagcactctcagctataaataaaagtaaaaaattaagacgatgatgaaatttttttagttcaatcttggtctaacttttcaaaagaatatacttatccaagatatttacagcgaaacatatcaacgtaaaataatttctcaaaattggaccggatcaatacaaaactgaaggaatgtagttagttcaattcatatgctattcacaattttacttaacatgatgtttctgggttgaaacgcaacaatcagagacaaaaagaaaacatcatgtgtggctctctaaacaggaaataaagcgattactgatgtaatttaaaacaaaaaattagggagaaatcttacctgttttttcgatgcacaattttgaggtcaaaggtttcaaactcctcctcttgggccttaatttgtctaacttgctcttgtacagccacggcctgttcatcatcaagtgctgtcgcatggccatcctctctttcactgctatcattttctttctcagcatgctttctttctccgcgagcataatttgacagagaagagggagatgagtttacagattttatggacgttgcattattttctttcacagaacttcgagaacttgatgaatcactacttttttgtctccaagttgcaaccatatcatctgtagctgttgaagcacttaaaagttcagtatttctatctctagttaccgtttcacgattgccggaccataatgatttactagattctgcatgcattaactgcccatctttttgtgacgagccaaacgaaaaatcaccatcagtttgaatcttcacatgaaaacttccgcctgaatcatttttacttgctttctgtttattcttattttggccatcaatatgtttcttatctgactcggagtaaagctgtttaaacctggatgctacaggatcatgatcacgcgagtactcaaaatctccctcactgctacctccagccaaactgtcacgtacttcactgccaaaatcagctgcatcactattaatacccacaccaattgacctgaccgaatcatgctgatcatcttcgacgtaaacatcatcaagatgagattttcgatggacatttatgcctttcttatcacctaacatgacaagtncatttgactgagctacaaacc

SEQ ID NO: 30547 - DNA, 3327 bp, Arabidopsis thaliana landsberg
aacaaactcccatctacccaatgatatagtatgatagctcagaattttatcccagttccatagatgtcctaactctaccgtttttctcatggtttctctctttttggttcaagttttaaggggttctctttgaaacgatttaagagtctagcgcgttcagttttatactttaacaaacttaaggcttttcttcaaatcttagcacatagggcgatttacccttttctttgaatcacaatgcctaacttctttgaattccaaatcctttactagacttaacacttttgtatcccccttagaactctaaactcttactctctttttttttttttttcattctcactctcattcccattcattccatacacattcccaatcccaaatacaaggctccacctagtcctagctaactcaaaaagcgtgggctaggcctacatgaaagactgctcttgtcggctcatacctaacacgctataccaagctcaatcgaaaaagacctcacaatcacacacaaatgatctttggcttgaaataaggctaggctaaggttatgagaaactgctctaaaaaggagagacagctacttggattaacagagggtgatgaaatgaataagatgatccaagtatgtatatggtagccatgagttcataaacaatgcatagacatgataatttcaaattcagttcaggttctaatagatagggaatggcgtcaggtaagcgagtttcgatcaaagtagtatagtcaagttacaaattcaaagcagggtaaggtcttacttcagagatacaatcggttatgcaacaaagaactaacaacccgggcattgaacttacttcattgaatcaaaacatgcttaacggtttgaaatcatcatcatcccctatgcaaatgagcaatcctaaatgcaaacactctatatacaatcctaaaacgatatgtaatctacatgacactctgtttttgatgaaatcattttctgaaaagtttcaaatttgtatggtttttctatgccttagatgaatgcagactcaagaatatatacaatgcaacacacacttcctgagccctcccccaaacttaaatcacacagtccactgtgcgaataaacttggaagagagtactcaagaaaaatccaatcacagaaacaaaaaaaatgaagaaacaaatcgcaacggatgatataatacaatggtgaagtgaggcgcttacctcaggtgaagaatgaacgtagttgctcctcaatggctgcctatgattgctcccaggccatagacgaaccaccttgttctgtatcagctccagcaggtgggtactcgacctcatcagctctctggcggccagcaccgctctgaggaaactcgacctctctccttctgctgcggccagcaccgcggtcgcgtaaactacgagactgcagaagtcgtctgctcctactgctagatcgagtgagtgtggtcctcctcttactcccagattcacaaggctcgaatgatgaatgcctcgcagggacatgcggaatctcctgctctctaggctcaggcttgcgccgacttggctcgggcgcgtcatatctcctcgtaggcatgtcctgagggagatgtccctgcggaatagctgtagtggaagaggagcagctgagcttgtccttcagaaacttgatagcccttaagcacttggcgagtaacttgtcctgtttcttgcaccacttctgcagcttgctgttgttcctgtgagcttcactcaaactcttgctttccctcgcaggaggtatatgctcactgaaatgatacatgctcgtgtcaaactccgcttcatctatatcatccgtctcatcaacatcttctgttgtagctccttcggtgtgactaaactcctcggttggcggactgccctcgaaataaagatcttcaagcgcaggcttgaagtcaatgttcctgccctcaagaatcctagtagcgtcaatgcaggggagaagaatgttggcgattctaatcgatgaatgctcgaacctgtagcggtgaaagtcgccagccatgtcaaactccaagaactcacatctgcgcaaatgatccaagtccatcatcctcggtgctaaacctggttccttgagcgggactccacaagcttccagaattggcgacacaacgccacccacgcatagtgctcctctcaccttcttcttcccgttcgtcaacgcccacttcctgtatccacacagatggatcaacagaggcattactggtggtgcgttgttgagatcgcctctcaagacattcttccccttcgtccgtcggagaatccctgtaagcgcataatctatcatctccatgtccgtgttagacacggtgcctgtagactccctggagtaaaagacgttggcaaccgatcgctcaaagtagcggatcacaggactccggatttggttgctcttagaccgcgccgagtttagcggtagattgttccttatagtggcccacaaatccttaagctcctctctgtcaaatctgggtttagttccctttccactagggaaaccaaacagttcttccaacttcttgatcgaaagctgataccgctgttcattcactgagaacgtcaagaagcctaaccccatggtatcctgctcaaagtccgtgagtgcctcatacatctccacttgcagcgtggaaagaaacttgattgtctcctccttataggcagggtaagggtaagacatgagtgtctccagatgacacttctcgaacagatgctgcacgtcctccagtaaccccagctgggctaaagtctcataacacggataccgcgttccccagaagtcattcatctcaaagaatttgatatactcctccactgtaacctcgtcgagtttgttcagtagcttcgtctccttgcgccatgactctggctcatactcagtttcgatgtcctcatcaatcagctcatatctacttgacatcgccctctttcctctggcgatttcagctcttctctaattacgtccggctgcagagcgttcgaattcatccctgaagctctggtaaacatgttgctctctcggtctagcggaccaggactcagcttcatccacgttgtaatcagggtccatagaggattctccactgtagttactcatgatgaaacctgaaaacggacagaactcaaaaataaacgttaatcattagtaacagcaaactaaaaacacaaaccaatcaagtgaactggtcgagtgatgtaatagagtaaaccgtcggttttgaattttttttttttcggttgatcgagtgattttgcttggtcgagtgaagctagtttcgtggtta

SEQ ID NO: 30548 - DNA, 1016 bp, Arabidopsis thaliana landsberg
cctctgctgcagaaggacgcttctttgggtttatctcaagaagatgagccacaaagtctgtgaatccttggtcttccattggcagccgatgtctcaacgatgttctttttggtatcaggtactccaatctgttgctttcctgaacaaacaatttttccagagagaatgttctttattagcatatgtttcttccattcaacttaagagttgcagagtttttggagttcagggaatgttcctttaaggtctctggaaacactaacctggttccgctcatagagcattcggttttttgtgaagtatttgtgggaatcacgtcccttggtaagcatttcattatcgaaagatcctacgattcccataacccttgctagcaaactggctggcgaatcattctggaagagaacctgcaaaagtaactcgatattaaacacggattcaccttcttgtcctcaaaaatcaacaaccaaactagacaatattatctagctgaaattccaaaacttacgttgcctgtacacagttcagccaaaatgcacccaagagaccacacatctatctttttatcataaggaagtcccaaaatgacttctggtgctcgatatgaccttgactggacataggagcataggtggtctgtctcgaaacagctacttccaaggtcaatgacctttatttcacatctgctataacttttaaccaatatgttctcaggcttcaaatcacagtgtataagtccaaggccatgtagaaactgaagtgattcgagacactggatagtgattgactgtacagaacgatcccaaagagattagaactcggatttatacatatctattaagaatgttaatgatgaagcggacaaacctgcaatcttggcatcgtgaaataaacttcaccacctgattctctgttaaatttgtggaattcgtatagattggccttaagaagttcacatacaattagcaagtgctcctgcaaagaacattcagggaatccgttacaccaaacaatcc

SEQ ID NO: 30549 - DNA, 2525 bp, Arabidopsis thaliana landsberg
  unsure (1)..(2525): unsure at all n locations
gcacttattgttttgctttgaagatttagtcttttcattcacagaaacttaagtggaaacccgaactttaatctcacagcaattccagactctcttcagcaaagggtaaacagcaaatctttaacactaatgtaagatgaccacactcctctgaacagtccttataagttatatgtagtgctacaataactctattctaatctcttttttgttttcttttctgttttccatcatttttaatgattacagtttgggtgaaaacctgactctgactcccaaaaaagagagtaaaaaggttcccatggttgctatcgcagcgtcagtggctggcgtgttcgctctgctcgttatcttagccatattttttgtcattaaaaggaaaaatgtgaaagctcataagtgtatgaatctccaccaggtcttgatattagtgaaaaatgaaaacttttgctctttcatttcacatgtttttatcttattttacagctccaggaccacccccattagtcactcccggtatagttaaaagtgagacaagatcatccaatccatcaatcataacaagggaacgcaagatcannnnnnnnnnnnnnnnnnnnnnnnnnnnnnnnnnnnnnnnnnnnnntggcaaaggaggctttggaacagtgtatcatggaaacttggatggtgctgaagtggcagtgaaaatgctttctcattcatcagctcaaggttataaagagttcaaagcagaggtacttcaagaaaaaatggttttgttaatcctttttttaaaaatattactttctcagttatgaagttgtcatgggacactttgatatctttcgtaggttgaactttttttaacagttcaccatacaaatttggtgggttttgtgggttactgtgatgatggagataactgggctttgatttatgaatacatggctaatggagatctcaaggagaatatgtcaggtaacattttaaatttagagactctaatttaatcgaatccatatctttctgcggtttaaaatatcctagtataggaaaacgtggaggcaatgtccttacctgggaaaacaggatgcaaatagctgtagaggctgcacaaggtgaacaaaattatgacttgttttcttattacacaacaaactgcgtttggttatcttagagaaagattgacagatacaataacaacttgtaacaggattggagtatcttcacaatggatgtacgcctcctatggtccatagagatgttaaaactaccaacatcttattgaatgagcggtatggagcaaaactagccgactttgggctctcaagatctttcccagttgatggcgaaagtcatgtctcgacagtggttgcgggcacacctggttaccttgaccctgagtaagtgaatcaaccagttatcatcactcatgttagttgtgtttctcaaataaatattcaatgatgtcaatgtaatatttcaattctctctcaggtactacagaacaaactggctaagcgagaagagtgatgtgtacagcttcggtgtagtcctattagagatagtcacaaaccagcctgtgacagataaaacaagagagagaactcacatcaatgaatgggttgggtccatgctcactaaaggggacatcaagagcatccttgacccaaaactgatgggggactatgacacaaacggtgcctggaagattgttgagctggctcttgcatgtgtgaacccgtcttcaaaccggagaccaacaatggcacacgtcgtgactgagctaaacgaatgtgtggccttagaaaatgcaaggcgacaaggtagtgaagagatgcacacaagtggttatgttgactttagtcgctcttctgcttccgaattttcccctggagccagataaattgagagaatatcttccgaacttccaatgtatttattgaataaactatctacactctataatttcttttgtataaaactgagatgactatgacacaaacggtgtgtggaaggttgtagagttggctttaggttgtgtaaacccgtctaaccgtcttcaagacgtagaccgacgatgccacacgtggtgatggacctaaacgaatgtcttgctctggaaatcgaaaggaaacaaggtagtcaactcaaaggatttctgtttctgattttgctcctagagcgaggtaaaatgaaagtattcaatgtgtttgatattgaaatgtttaagatagctgtgtacataagacccgatggttgttcccaaaaaagcaatagcctttatcatgtctaactttcttggatcaaaagaaattattttaggttatgtatgaatcaacccctataactaatccagacaggtatttttaaaagaatttttatttgagaaacttgtttgaagttgatattttactaaatcaaaatttaacgggagtgtttcacccaacagaaaagtgaagtaatgggaaccctaaaccatttcatatatttttaagaattggaaaggagattttttgactttaataaaattttttaaaaaa

SEQ ID NO: 30550 - DNA, 3410 bp, Arabidopsis thaliana landsberg
  unsure (1)..(3410): unsure at all n locations
aatcatagatatatgtagccgtatctgtatgttgttgacagaagaaaaaaacaaaaaatgaaatatattggtttatggtaaaagaatattcgattactctatttctaataaagaaaatctagctaggtgaaataagaaacatacttagtgttctaagctggaatatagattttatgtattggggaatccatgtgacaaaatcattcgaatttctttggtgttatggaagacttgttctaagcttcgtgagagtatccatcacaaaaagttatatttttatgttttgatttttttgtcggcaaactcgatttcaaaaaatttatttatgagatttttaatgcatttcattattatctttgacgtgagatgctgatatcggacacgttgaataattgacatatagagcgttatagaaaatcatattaaagtcaacttgtcagttgtgacatgtaaagttggtatagacagacaaaatatacgtgagcataccaaaaaacaatcatttctatataacaacagcaaaccggaaaacgagtccaccggccggacataagactgactaaatcttcgttttggaagtttccaacatcccaatttccggtagacgaaaagagagtggataaagcaaccacaatgtatctcatactcggacgtagctgcgcattctcttgtgtacatgctttccctaattccgccatctataccacaacacataaaacaccaaattggcttaccccgttattaaaattagctatgtgcaatccggtattcggtttgattgacactttaagctaatcgaatagcacattgttcagtgaataccggtttttaaaaatcgcacttttaatcggtttttcggaccaaaaaacggattggacaccctcttttagaatgatcaatgatgaatagaatagggaacaagaagagatattaccttgtataccgaatcaaacgggtaactatcaccgagcctcgggtctataatcttgcgtagtgcttcttctttgtcggtctccttgaatgattcttcgaactgaataataaataaacaaagcatattgttaagtgatccacatacatgcctttaaatcagaaagactaaatgttacgaagaaacaataatactaaccacaccaacaaggcctctaaattcaccaacggcttctgtcattttgacaaccgcacctttcgcagaaatcaattcgtaaaggacaactccaaatgcatatacatctacttttgcagacacttctccataaacagtcctgcatacatacatatatacaccatcactatagtgtagtctctaaagtagtatataagtgtaaacgagatcaaattctttactctggtgccatgtaaccaaatgtacccattgcaccccgagttgctgaacctccaacttctgtcagttttgttaacccgaaatctgctacctgtaacacgtaaacgactcagagcggtgacaaaggaaaaatctaaccttttcagtatttttcacttttgattgacaaaagagaaatcgagaatgtacctttgctcggaatttctggtctatcaaaatattggcagatttaatgtccctatggacataaactggaaccgtgtgctcgtggatatattctaaacctctagctgagtctagtgcaatctgcactctcttagtccacggtaatggttctcgtcctagtttcacataaactcttttagtttacaactttctcgaaaaatgattcacttttggaggtctttatattgcgtacctgacccatgtaaatgttgtccaaggttaccattctcaacatattcatacaccaagaaaagtgatccctcaacacaatatccaatcaggcgaacctgcaagaaaaaacaaattcgttaaaatttggctaagacttgatcttcatctgatctcagatattatcttgagagaacacaaaaggggtttaccaggttgacatgatgtacacgcgttaagacttttagttccgccaagaactgtttcgatgcctccatgtccatcttcttaatcgcagctttctatacaagaaccgaataatttaaatgttccatgtgtagtagcttcaaacaaaaagatataaaaagatatctgcttacttctcctctcagctctgcatagtaaacagccccaaaaccaccttgcccaatcttaaaagacaaattgaaattatcagtagcctttgctagttcctccaacgaaaactcaacagatttgtccacgcttatggcagcaatgccaggagacactccggcaccacccaaacctccactttggagactagtagaagaagctaaaagcagatttcatataaacataataagcaactcccagctaacaaaagagacaaaaactgcttgtatatgatcatcacgaaattaccatgatcagccttagtagacaacggaatagaagaagaaaacgaatcacccttcgacttattcttccggtaagcataatatacgataaacaagatcaacaacaaagccacaatcactcctataactataccagcaataactccagcaccaacaccatctgctaatacaaaaaaatatcaaaaacatactcttccatgtctcctcttgcttcgtgcataatcatcaaaagctcaaaaatggagaaaagaaccaaccttgtttactacaaaaaacataagagaagtagaaatacatcagtaaatagatatcaaaatgaacaaagatacaatcttaacaacaacaaaaacaaccttgatttgaatggtggaaatgcaccatttggatctgcaaaaaacacaggaacatgtacataaacttcaacaatcattactacttttataacaatttgtgtcacaaatcatcaaagatcaatctttgtacctcttccaggcacataaacgattccattcccggagttaaaattaacaccaggattatatctctgcagaatatccgccgannnnnnnnnnnnnnnnnnaatagaactgagactgtcttcaggacgaagcggatacgtaacaaacaaaccaaaatctttcgaaacactctcatccccacaagaacaattcaccaatacattaagcgtcgcagagagaggtatgttagtcgccggaaaaggattcctcgcctgtaacgactccatcgtcgtgagattcgcgtaattactaatcgcgactctttcgtaagtatcttcctgtcgaacactgtagctgaaattgtgccctaggaaatcaccaggttgacattcgcaagggaaaggtacaagaaccctagagcccatctggattctatctttgtctttaatgttactgttgtacctgaggattggatcgaaattgatttgatcgtaaggcgcgattgaagaattgaggttttggttgatgacggagagtgttgttccgttctcgaga

SEQ ID NO: 30551 - DNA, 1477 bp, Arabidopsis thaliana landsberg
gcctcaactacggaatacctccgtttcagctcgaggggaaggatggtaatggattcttcgacgacttgagttacttggatctggagaactaaacaaaacaatatgaagctttttggatttgatatttgccttaatcccacaacgactgttgattctctatccgagttttagtgatatagagaactgcagaacacgttttttcttgttacaaaggtgaactgtatatatcgaaacagtgatatgacaatggagaagacaactatagtttgttagtctgcttctcttaagttgttctttagatatgttttatgttttataacaacgggaatgaataatatacacttgtgaagttttgtgggccttagtgtgtctcacaatatttaaaacctttacagaggaaacactatacgatctccaaaaaaaactcatcattggattcagtcttaggaagttctctagggattagagggcagctttatttaacattaagcagctcgacatcaaagaccagccaagagtcagggggaatgctaccagcaccttccgcaccatacctgtgagccagacaattttatcatctctcattaaaaaaagcttaaaataaaacatcacattatcaaagataaataaaaaaagatttgcaaaggctttaccccattgctggaggaattgtaagctttcttttggcaccaacaagcatccctttagaaatttacaaaaagagatcaaaacaacacaccatttgaccatatttagtgaagaaaaaccagtaagaaactagctaggttaccattaaggccaacatccaatcccttaatgacttttccagcacctgtatgtgtaacagcaagcacataagtatccaagtaccactcacacattaataaagctcttactttcgcatcaagttataataccaacctagacgaaacttataacgtgattttccaacggtggaatcgaaaatcttcccattcccctgaagctttccagtataatggacacttacctgcactcagagacaatagattgacctccaacaaatatttgcacacaaactccaacagtttaggactaaatgctcatacccttttgccaggctcagctttcttgccgttggggtttcccatgcataactcttcaacaatgaggccatctaggtcaggcgtttgcttctcaacactaatagaaaaggctttactctccactgtagcttcctcacttatcttctcattcttcttagcagattcagatggggacatggagctttcactcctgcaataatatcaaaagaaaagagcatagaaatttataagatgggaaagaatttgaaagaaccatttacttgtgagctaataatatcgaataccaataacaaatgtactaactgatatatatcccaaatgacatgaatacttttgactatcccaaaaagaacaaagtacttaaggcaaaggaatggactgaagtcaagtag

SEQ ID NO: 30552 - DNA, 2312 bp, Arabidopsis thaliana landsberg
gcgtgtctatgatgtaataagcatcggtggttcacaaggagtacgaagaaatgatcattccagcttacaatgtagatcacatgttcgcttgccgactcttctggttcttgtttcatgatctcttcccagatactgtcaaaggacattacacctttaagaaaatctagactaacatcttctttttcttcttcttcctttgatttctctggatggaaaaacccgatgaatgatctttcagggacaacacagatgggtctgacttttgcttggagaaccgtctcgagatcgaaatgtttgtctggaaaccgttcccgatattccttgttttcacacatctttctccactcggatgatccttctctgataagactgtcaaattctgaccttgttgggatttctctctgttggatcctaaccaatgtgccatcacttcacctagagctgtgcatgcgctttctccagtagctctctcgcttctctgatcaattgatgcgagaaatactctagccgtgagtttcatcagcccatcacggcttataatttctttggtttcccagctaccaacaacgaaatcatcatctcctgttagatatgacttgaattggaatgtacccttaactttaggcccaatcagtttagggttaattagggcttcttttgtataagtactcttcttaacctagcctccctgtattctgtactctattttctcaagtaataaaatctgtctctttgcccgtggacgtagccaacagaaagtgttggtgaaccacgttaaatctgtgtcgtgttctttacgcttttgttgtcttgctcacatctgttataacaaactggtatcagagccaggttactttgttcttctttcgtcctgcgaattttttgcataagaagttttgtgcagaataaggttctggaaattccatgttttgtaatctggtgagaagatgtcttcgatgaatgtgaagattgataagttttctggaagaaacagtttcagtctctggcaaattaagatgcaagccctgttaaaacaacaaggcttgtgggcgccgctgtctaatgacagtaaagggaagagcgatgctgctgagatggatgtcatggacaagaaggcacactccacaatcatgttgtgtcttgaagacgaagtcatcattgaggtttcaagagaaaccacttctgccaatctgtgaaagaagttagagaatttgtatatgacaaagtctctacagaacaagctgcttctaaaacgacgtctgtttgcattaaggatgcaagaaggtacgccactcaatgatcacttagatcagttaaattcagtattactagagctgcgtaatattgatgttaaagttgaagatgaagatgctgccttgcttctgttggtatctttaccactatcatatgagaactttgtggaatcattcatagtgaataaagttacagtaactttggaagaagtcagatctgcgcttcacagcagagtgttgcgtcatcaggcggctggtacagttacagattatcaagcctcaagactagtagccagtggcagtagtgggctgggacacggtaagaagaacaaaagcagaaatggtttttctaaaggtcctaagccagatgatatctgtaattactgtaaggagaaagggcattggaaatcagactgtcccaagaggaagcaacaaggatatgctgctgtagcagaagatgacactaagtctgaacatgatgttgctcttgtagctgctggaaacgcccacaactctgatgtgtgggttcttgatacaggagcatcatatcatatgtgtccaaggagagagtggttctcaacttatgcacaggtagaaaacggctgcatcaagatggcagacagttatgtcagtcaggttactggaatcggttctatacagatcagaacacatgatgacagattttgcacattgaacgatgtcagacatgttccgtcgatggagaagaatttgatatcactgagtctgcttgatagtagaggtctgaaatactctagtggagatggaattttgcaggtctgtcaaggttctgatgtgattctgaagggtgtcataagtggtactctatatatactacacgggttcacagttacagtttcagcgaatgttgcatcagcagagattcacaaggaggatatgactaagctatggcatatgagacttggtcatatgagtgaaagagggatgcaaattttgtcacaagaagatcttaaatgttgtcagaagatcaagaggttgcaaacagtaaatggtccagagtttagttgatcggagttcaac

SEQ ID NO: 30553 - DNA, 3903 bp, Arabidopsis thaliana landsberg
ttaagagctcacatcattagaaatcgttatgtagaagacggatgtgagtcatgtgacaaagggatgaaaccggtttagctaatctgaatctttgttggttttgattcctgcaggtttagctagtttggctcaaatggtcgaatggtttgagatataagagaactgttgggctggatcatcaaaggaaaaggtcgaacttgtatgttgttgtgcttagcttaaattgttattttgttataccttatgaggattagtttgagtttccgttcaagattttatcccattatcatattttgtttcctttcaatttttaatctcgcaccaaaatccaattaatacatttgaatgtgatgagttggttatagttgcatatggtgtgagtggtgatgcagaaagagagtgtaatatgtaattcaatcaaataacgttttgaatgattaacgaattagtgctaacttaataagacatagtcaatagttaataattaagtgaaactgcattggttggtgaagcatagcaaaagtttggatgtcaagcaattccgataaaagtatagtcatactgacgtagttacccactttctgctttttacttggattataaaatatccacgtagttagttatttgaatagtttagatacatactatcatgcatgagcaatatctacgtagaattcaaattaaataacattttataatacaaatcagtaatacgacaaaactagatcatataatattgtgagttttggttgaatagaaagtgacatccacacgtagttgcaatgactaatcaaattcttttgacctataagttaaattatgtaacaagtcgcaaaagtgtccgtttttcttgcttagcttcttcaaatgtgtcttgttaacggcaatcatgtgacatatataactagatcattttgaatatataatccttcagcacaaataatcgcgttattgatgatgatgatacacatttataggtaagataatatactgaataatgcagtaaaataagtgtttgttgggtaaattatatatagtgtagtaaactttgtgaatgtgtagaatcatctcttgagaagtttagagatttgaagaatgcaccgaagagattttccatcgcgaagcagctgaaacgcatcgtttatcttctcaaatggaagctcattggtaataaaaggttccaatttcacaacctacaaatcaaagattccaattaatatcactaaaacacaaaattacttcttgtttctaagattagaaattagagacaaatttcagacccctttcatgcattgttgggcgaaatttggaagctgagatttgggcttgaagccaccaaacacagaaccggtgattctacggccgtcgaaaagctccattgggtgaagaggcaatgttcttggcgtcggatagatcccaacaagtactgtcgatccccaaccctatcatcaaaataatgtttctcatttccttctttatcaagtaactaaatcaacatcaagtaaaccaaattaagattttgatctcaattcataatattattatggacttacgacgtgagtggataaaaaggcttcgcgaagaacatcaacgtttcctgtacattcaaagctatagtccacgcctcctcccgttatctctcgtatcatctttttgtatattgatccatcgcaaattcgcaatggttaaaaattttagttaacaatttttttatttttttttacaattattgatatttttttgttataagaaaattggtatattacctgatgtactggcttagttaagtctttagggtttatgaaatctgttactcccatcagtttacctgcaatatttgattggagtaatatggtaattatatggacatagtcgtagattggtacgctccacaaaatctagtaaaccttataatcagtccatttggtcctgaaaaatatcattttgtttatgttccattatggcgtataattggaaagttggaaattaaactattgcattcgcattcttaagttatttgcttcactacttttcgagatgcttaattagataagtggaaaagagtttgggaaatttggttttattttccccatatcaaccttagtatgtagaaaaagagcgagagcgcaatcgaagcattggtgaaaaagaaagtaacgtacctttctcaaatttggaagcattagcatcaacaccaatgatcctagaagctcctctagctcttgcaccttcagcaaccttcagttctcattcatgaaataaatatatcattttcacttcatatatataagtgaaaaattaatttttatcatactttggatgcataaatggattaatgaagtttaatcttacagcgagtccaacggaacccaatccaaagacagcagtgctttttccttccttcacatttgcaatgttccaagctgctccaacccctatttttcaaaacgacgtcgtaacattaagaaggaaacacctcatgaaactatgcatgcttcttatttttaccacttatgtatatacttgaggtggtcaatggaccacgacaatatgtaacagtaaattaaaatttactgttacagagacaaattgaaataactgcgtttttgaaaggagaattaaatgtgtttttgaaaccaaggtcctatcttctcctttattccctagctagtcccaaaactcactatgttatctcccacaaaggatatgataatatatcatttctaaaacaaatagcaagttctcgatgttcaagactatatggacaaaaatccaagaatccaattgctatatacgagtaaattagtaactaaccagttgagacaccacaactcaagaggctcatttgcttgagaggagaattaggatcgatcttgacgacgcaagccgagtccaagacagtgtattcggtgaacgtggaggtgttaaggaagtgatatataggttggctttggctcgaaccaccgtccttgtttatggtggttgagaatctcgtccctccatcattcaccatcaccctcttcataggatccacatgatatcgctcacagagattactttcttctctcttacacactttacattcaccacattctccattgaaagtcggaatcacgtagtctccttctttcacatcttttactccttctccaacactctctacaatcctatcaaacatataaccgaaacatagaaaacatatttagttagcgacactcataggcggttataaaagggtttagatatcgggatatacccgacagcttcatggccaagaatccttggaaatgctcgttcagcttcgttcttttacacaccaaaaataacatatttttgattagattacaatcaagaaacattgcaatttttgtactgattcgagtatatatccatgagtaccgtgccgttccaacatccgagatcggtgtggcaaatggaggagtaaagaattttaacacggacttccattttctgaggaggatcgacgcatatttcttgaattacaagcggcacttttggaccccatacgacagcagctacatgcatcacatacatgcatcattactatcataatcatcatcatcatcatcatatgcatcaacagcataatgataggaaaccatctcattggtgagtcatttacttacctttacaagtgatgacctttccttgagtctccgccatgttcttgatgcttttttccttttgttatgttagatctttcttttatgaatgtagctctatatatacaggactgagatctatgtatgtctaaatatagtcacatgtataaatatccaaatcgagtcaataatcccgagagaggtgggtttgataagattgatataaccaatctctttacataaaccatcgtaatgcgaatctcaaattcggcgctcagtc

SEQ ID NO: 30554 - DNA, 543 bp, Arabidopsis thaliana landsberg
gcgcttcttctcgttgaaaatcttgttgtgtcttgctttgaccgttctttatcgagcatcattcttggaacaagttcaggatcttctacgactttgtaaataaacgccatcatctgctccggtctcttctccgtcgcttcgatccttcggttcatcctctgaatctctgcctctagctccctttgctgttcttttaaccgttcgatctccctcacaatctcaccgtcctcccaattttgaccgcgcatcccccgcgcgtgtttcttacgcgctacgttattcaacaaatgcttctgtccccttagaaaatgctcgttcgcaaactcccaccggtccggatccactttcctaaacccctaaagtaaataaagaaaggatcattagttcgtaatcccctgtttccagtctcatgtatgagtttcggttatgaattcccttacataggtgttgagttgccgaacacagctgctagtattgctgtgtttgtaataaacaggtaagattcgttgcaagaagtcgagtggatcatcgcctatggaactg

SEQ ID NO: 30555 - DNA, 3739 bp, Arabidopsis thaliana landsberg
cccttttatggaatctgcagtcaaatgtttcctttatatcttttattttgtgataacctgaatctacaacactgaaaacctggaatgggtaaagacaaaaatgaacaagttacatcagcaacatagagagacgtagttgtcctcagaaagttagctaagttttatggtgtcagagaaattatacctttgtagctccttcagcacagatagatagcaacaatgtcctttcaggtttctgaagcaggtcaattaaaacaattaagtagataagaatacctgagactcagtgatagagtggctacagaaaactgaaacaaggataaatcacgtcctctaagcgcacttttgcactaattatgtggaactcaaaagagagtatcaaaagaaggaaaaaatgaatgaaattggttggtcttatcaaatatatgctttgttttcatgtgattagctgacatctgttttctttctttagagtcaattcaatatcagtgtaactttcagtgccaccactcattcattcgactgatccaattttacaaggtctagcaacagaagatatttacttagccaggatgatgatactgatttgaatttctgcatacatacaaaaaaacaaagcatgcattcatattgtccagagctgcatgcaactggttattgtatatcgtccagagctgcatgcaactggttattgtaaagtttaatccactccatctcatcattttagcaggcccagaaagcctatacttgttgagttcaaacttaatttgcaaaggaaatttggagatgctctaccttaggctaaaagatatgaggatccaactcattcaaattcatgcgaatattaccccaaattagactaacgagagattggctagttttttttcttctgttcataaccaatgcttaagaaagcatgctggtaggacattccaatatatagatgggtctagcatgtaggaaccactcagtaaaagccatgataaccacaaataaataatacataacaaagttatttgtgatattatacctcagaggtggagcgcaagtgcactgcaataggttgttttgttatctcaaatgcataagagcctagaacacgatctccgggtacctacattcctcattaagagaaaaaatgtaagacaaggaaaagaagagaacagcagcaaatagaaatgtcaacagatacaaagggctgatttgtcattaagcagaaaatgtaatcaccatacctcaatggtcaaacgatgtggataacagggttcatcccaagcataagggcaagatgtgtaaggatgaactatggtatcaaaagtttcacatttttgttgataaaccctcagtctctatcacccacagaaaaaaaatccattttcagttccttgtgggagcaaataagggtttcaaaatcgacaagatatcatacattggtgattctcagaaagcaagtttccagtaagaaaatgttttcaccaacaattacacttgggtcccaaaattacatgctacattaaagacaactagcatagttccctcaacggatgccaaagaaaatcatgtacaatttaggcctcatagatattgattactcaatttaattttccgaatgctttgaagtattcaggcaatgctacttaagttgtagagttgaacaacctgtgaactgacgggaaaaataactaaaactctttagttggatatacagaatcatcaatcataacattactgacctcatttgagaaattatcaatcctgtaaggcatatagcccatgtcgtcatctgataatagaataaagtttgtcccgacatgtccatgaacactccctacaatcttttcatctccgcttgacatattggcattctgaacttccacccgcaccatgttgaaagctttgttaacatagttccaaaccttcagttgcgtatcccctaaatgatctggcaagaagctgcctgaccattgccatccaggctcatttaaacggattgaaactagcagctccctggttatatacaagagtaagtggcgtataggtagaaaccttttgactgtaaattctctcagtacaaaggtaagataaatgtagcaacagtggtggtttcaaaaagaaaaccactccttaataccaagaatgtgttgtatataagacatagataagtaaacgaacctagtagtatctgtccattgaagctgagaatgctgtccaacagccagatgagaaactaaattggttcccttctgcttgtaacacaggttatggctgcatgaattacagatgatatatctgcaacatgggaatttgtttagtggatactagggataatggttcaggagaaaacagagtatttggtgaaactgtctatcacctaggttggaaagtaattgcttgcgttctccccgctaatgcaccaccaagaatagaacatgtaacagataataaagatgattcaccaggcgatggttgtgggacaactacatttgtagaaccactgggtggaacgagaggaaacggagcagaccacagagggtatgggctacttgaactaacccaccctggcaggtcccttttgactcggatcatggtgtcactgactctggaaatagggcaaggtgaataaatgcatgcctttactttgccagactcatcattaccttggaagcacacctctcttaaactttttgaagaaaagctcctcttgcgaacaattgctgagtcttttggatatgctgcaaaagggacttggcgagttgactgagtcgcatgcttatctataaatctctcagtactggaagcagtgttgctgcactccgatgaggaaggactacaaggaatatcctccattacagctttatctagcaaatctttctcagaggtcaaaatgccaagaccaacttttcgactttgaacaaaatgctgctcaatcaggttgtagcaagacggtattacgctgtaaatccctttagtttcattggtgcagtccgaaacaatcagaggagttccagtgcagttatacagtaaaaatgggacaaagatgaatacttcccgagccccacatgttgcatccattgttttctcacacgatacataaacagaacctataagaaaatcaatattaaaattgtctcaaaatgagtagccaattttaaacataaagaggtaaatcttaccaccaccaacgtgtgaatcaaaggaaatagtttcaatctgagagaacttccctccactgaacttagcctctgtgctaaaagtttctgagcgtgaaaactttaaagatgatgttctacagccatttaatttgaactcaaggaccaggtcatgtgaaggatcaatatgatggaatggcgtctccccctaaaaaaaatacattttattgtcacataaataataccatatcaaccatataaaaacatgatttcaactcttatcttccagaacgaaattatttggaaatatctctcagacctcaggaagggatgcagtttgagtgatgccaccactttcgatagaaagtgatattggatctggaagacagttgctcacaacaaatggagtgcttaaagttacttgatgaatgaattgctctcttgattggtcaagattgtgcaactgctgaccaaaatttccagctgacaaatcattaatatgaaacgatgccggcaagctggtgctctgaacagatatgcaacaccgaaatggttcatggctagggtgacatggataacaagcaaaagat

SEQ ID NO: 30556 - DNA, 1282 bp, Arabidopsis thaliana landsberg
  unsure (1)..(1282): unsure at all n locations
aaaatctttttattaagagattccctgaccaaaaatctttttattaatacagtatgtccaaaactatttaactacctttttgatctcaaaactttactttcaagcaatgtaaaactaagatttactgacaaaaataaagaagtaattattaatactaatgaaaactgagagtaatcattaaactcatgacgcaattacacaatggtgttatttaggacaacaagtaacaaagtagtgaaacaatgtctgacacgttacttgtgtttgcaactttgcatcatcatgcttgatatgtggacctattagaagaacttgggccttgcacgattgcatctttgtttttaattagtaaagtgattaaataagacgcaaatcaattaatgtccttaacaaaacataccgacatgactttgaatagagcaagcatcacgaaacgaactctattcaaacgtgtgtttgacagtttcttgcttttgaatctccggttcgaattaatttgtgtttgaaccgtgttccgaatggtttatgatgggccaagttattttatatgagaatgttgggctcaattatacgaagcccaaataattataaagaaatgcaaagggaagggtatatgttaccaccaccaaccattttctagaaccttccacttcttcttacttagcttcccacatagttttcttctccttccttcttcttatcttcttcttcttcatctacctaacttaggttttatcaatctctcatttccaaccatggcttcctccgccgcccaaattcacatcctcggcggaatcggattccctacttcgtcttcttcctcctccaccaaaaacctcgacaacaaaaccaattccattccacgaagcgtcttcttcggcaacagaacaagtcctttcactactccaacctccgccttccttcgtatgggacgaagaaacaacaacgcttcccgatacaccgttggtccagtccgtgtggttaacgagaaagtcgtcggaatcgatttaggcacgacgaattcagctgttgctgctatggaaggaggtaaaccaacgattgtgactaannnnnnnnnnnnnnnnnnnnnnnnnnnnnttgtggcttatactaagagtaaagatagacttgttggtcagattgctaaacgtcaagctgttgttaatccggagaatactttcttctctgttaagaggtttattggtagaagaatgaatgaagttgctgaagagtctaagcaggtttcttatagagttattaaagatgagaatggtaatgttaa

SEQ ID NO: 30557 - DNA, 2795 bp, Arabidopsis thaliana landsberg
  unsure (1)..(2795): unsure at all n locations
ttcgtatctccacaccccaaaaatagattatgggtaacgaatggatttactttaggccaaattaatttatatctaaattaggaatatattcgttagtcaaatatgctttgtcatatctttttcttcggaccattttataacacagaaatcatctgagtaatgagaaagaaacctaggaaattgatcaaaacaccacatgtatgtacagagtaaagtcaaataagcaaatagcacgaaagagaatccagaaaagcatcatagttggtaacaaagagcaatagtatgagcacaacacaagagaaagcagcacaagctgtgctaacacttgctaaatacaggtctcgtgggatcaccatctttagattgatttactcacctgaaagaaacgaaattcaactataaacatcagccacaagtttgtattcaagacttctttcttcaacaattttattgctttacctataagaggtatctccataaagccgggcggtctcttgagatgaggagtacacgacaacctgtgtagtcaaatgacgggcaatacatatcgtttggaccgatgatctctcttactgtttgaacgcttccatagtcacttgtcaatggctgttgttgcaaggtctcttcttttgcagtatcaaacacaaatagtcccataccagaagtagccatgacaaaatttgaatttccccagacttgggttattgcagagtggtgcgggtgagagtttgagtcaggcagactgtatgtgctcacgagacgctgtttccttatggagaattgctgcacctgagaagaagaagccatttgtttcttgacagttgatttctgattggtacatcctagaaacactgaatctcctcgagatgatacacattgagcattaacaccgagtttggggattttagcaccaatgccagatgggttacgaaaatctaagatgttgattgaatcactagtgcagaatactccgtcgtttccttcagcatccaaggaacttactctgcattccatgtgaagagaacattataagtgaatgagagagaaagagtaaagtatccacattgtttagcttccacatattcaatttatgaggccaagcgaggagatagtaagaggctaaatggtaaaataaagtttttttacctttgacgaacaccacccccaacttcagcatctgtgttgttgatatgnnnnnnnnnnnnnnnnnnnnnnnnnnnngaaatcgtgtgctgtgcttcagggtgaagggaattgacatcccaaacagaaattgcttcagtttcggctatgacaagttttcctcgattcctccattgtaaagggctcgaataatctaaagctgacacaggattctgcacaccccatttcatgatttgttccccatctcgtatgtcaaaaacctttactatactttgaaaactaccagttgatgctataagaggaccacacggtctgtaccaccattgttgagtttctggtaccactgcacaagccggagtgttcctaccatgtgatgtgttattgggtagaggagcaagagctgttcttgaaactcttgaagatccgtcctcgatgtggagtgccttaatgtctttcgtgtagaaatcccatgaacaaaagccagattctaaggtattcccagcagaagcagctacgacatatctgcctgagcagccatcagcacccggtgcacgaactacccagcaatctctccaagtgtttggtgagataccatctggaggactgtacacagatttcacctgaaaaagaatttcaagtctttgatgtaaaagataataatgcatacatagtgaacaaagccaaaaactccagtcacttcatacaaacgcacccagattgacagagaattacattcattaaccataaactgtgcatactattagcccaaaataaagctttagtcactaagtatttctgcaagtataagatgaaaaatccaatctacatcaaaataagatatgctaaacatcttctcgtaccttgagatatgtgtatgttgtggtcaatatgagattttaaaatcaatgttccacactagcatagttcaagttagatcaaacatgatactaaaaactttcataaatgaagaaacgcatagtacctcagagttagcgacatcgtaataggaacacgagccatcatcatgagcaagtataactgcctcgccctctgatacaaaccatcctcctgtagaagttttggacccaatgtcattgagttgatacatgcatccatcatctatttcttccagctccatctcctctctattctcttcatcatcaatttcctcgagggcttcgtttgctctaagaatttcagttaagttggaagtcagattgacgtcttttgagacatcattttcctttgacggctcctctgtatccatctcctgcacttccagattttccagcgcattctgatcactcataaatgtgactttttccttgtcaagtgaggccaagaactctagagctatcgcattctcctcaacaggagctgacggcttttcttcagcattcactgccttgttggactcaacagaatcatggccttttgagacatgcgaagatgttttggactgagttctgctccttagcaacctctggtgaggcaagagtctgtcttccagctcttccttatttaatcctttcacagaactttttgctttcgtagttttgtttttctctggaccatcaataacatgactcatagacttttcaatccctgtgattttctgatgtatatcagagattataaccttagacgaatcc

SEQ ID NO: 30558 - DNA, 2170 bp, Arabidopsis thaliana landsberg
tttgtctttctttctattcaaagtttcaaattgatcattggattcggatctacttcacacgaccgttataggattttttcttctgtattttttaaaaacaattattgttattaggtgagagataatagttgatgcagttcaagaaaaaacaattatagaaaaattctcaaaaaagtttaatgttgttgttgattactatttaaatgtaggttagtcatcatgaacaatttaataattattttcaaactgttcatgatttggtgataaatgatacaattaggagacttttattgattagtcccaaatcgtgtcatgtcattttctactgctattttatttgaaagtgtgagactttcaaacataacaaatgaagttgaacacatcataggaaagcaaattcccatcttccagataacaataagtcaccaaatcggactctgcagattaaaagatacgataaacatgactaacagaagaaagcaaactacttggtttacgtttcccgagcttagtgttagcaactgggaatctgggttcgagcaaccggaatgcacttaagtggatgagccatggttaataccagtgatccacgagcttcttccatgttaaccttatttcctttgattttccagtcaaagcactgtaccatcactccaatcgcggttccaacaagaatgtaagctagatttattccaggacagcctctccttccgccaccaaaagaaaggtacttaagtgtttgctctttctcgtcttcttgccctgatcttgaataacttagaaacctctctggcttaaactcgtcaggatcttcccaagagtcgggatctctcatcacagcataagcgttgataacgagtgttgtcttctccggtatgtagaaccctttcatctcacatctttcttgaaaagtccttatcaagaggggccctggaggatgcaatcttagtccttccttaaccactgcttgcaaataaggaaggtttggtatatccgtttcgtgaatcaaccttgatttccctacaactgaatcgatttcttttctcagtgtctgaagaatgttagggttattaatgatctcagccatagtccattgtgttgtttggaccgaggtatcagtgcccccaacgaaaaggtcctgcaggcgaagacatggaacatttttaagtaattttcatatggatactcaaacgaaatcggcaaaatgaggaaaatttaccacaaaaaacgacttgatatgactcctagtgatcttatactcttgcgttttgtctcgataagctgccaacaatgcgtccatcaagtccgtacgttgatgatgcacgtccagtttcttttcgtgttccacaagaatgctttcgagcagctcatcgaatctgtaggaaataactgtagtttcttttttaaacagagagacaacaagcttcttaaaccatgctcgcaacatgtttgcaaagaagagcttctttgtcaaaacatctaactcggtagccatatccctgaatctcccctctgaacaactcctccccatgatcatcttgcagatgctggagttagataacttcaacgcttcagcacatatctccacgctctgcttcttcatcgctttatcgaacagattcccataaaaccgctctagcacatctgcacggacacctcgtgactgctcgtgtgcttggggcccaaaaacgtttgtaacaaggaccttcttcatgaacttccaataatctccatagggagcagagataaagctgaaagatccggcaaaaagtgaatcatcggttggagtgaaaccacgatacgagatgttcaggtcgtgtgccctgaagatctcatatgcaattgaggctgacgagatgaggactacagggaacctaaagactcggagatagagaatagatccgtacttggtggagagtttttgtaaagatctgtggagtagaacagagagaagaaggtgcagatgaccgatgatgggaagagacggagggctcggaggtaaatcaaagtgaaggcgagggtcctttggtttcttgaagaagtgagaataacagagtcgtgagaagagacataggaggataaagatgaagcagttttgaaagtcaatcatgttcattgctgccataataactcaaagagaaagaggaagatgagatttgggatgctaatc

SEQ ID NO: 30559 - DNA, 1667 bp, Arabidopsis thaliana landsberg
cacagactttgtctgtctgaaatgctttataaatcatcttactcactggtagatacgacttttgcaatgcagagagtcgttgattggcttgcttcaactttcaagaaggatgaaggtatagatcttctcaaagacaagcaagcgcttcagaggttgacggaggcagctgaaaaagctaaaattgagctttcctcactgactcagacaaacatgaggttcacttttccctctcaaatctatttacctcgttcccattggtatgtaggatattaactgatttcgattctgtatccagtttgccttttatcactgcaacggctgatgggcctaagcacattgaaaccactctcaccaggggcaagtttgaagaattgtgctctgacttactcgacaggtatatttcagttattgtttatatggatgagatcagaacctgccatgtaaaacatggttgctgtttgattcaccatgtgtgcctaagttttgtttctctgcattcaaacttgtagggtcaggacacctgtggagaattccctgagggatgcaaagctcagcttcaaagatattgatgaagtcatccttgtcggtggatccacacgtattcctgctgttcaggaactcgtgaggaaggtgactgggaaagaacctaatgttacagtaaatcctgacgaggttgtagcgttaggtgctgcagtccaggtgtgttctcctgaacttgtatctttcaccctatttaggtcttgaatttaacaatatgcattagtcattcctttgataaccttttggcaaagaagttgtgttctactaaaatgaattcttatcaagtaccattctcttctggctccaggctggtgttcttgctggagatgtgagtgacattgtgcttcttgatgtgacaccgctttcgattggtttggagaccctaggtggtgttatgactaagattattccaaggaacaccacactgcctacttctaaatcagaagtcttttcaactgctgctgatggacagacaagtgttgagattaatgtgttgcagggtgagagggagtttgttagggataacaagtctcttggtagcttccgtctagatggtatcccccctgcaccacgtggagttccacaaatcgaagtcaaatttgacattgatgccaatggaattctatctgtcagtgctgttgacaagggcacaggaaagaagcaagacatcaccattactggcgcaagtacattgcccaaggatgaggtgcgttcactttaggaattaaaccgcattgcttcattaacaataacttgtttttgtcagtcccatctttgaggtttagtgatttcctactgattatgaaagtggtagccataccataccataggttaactggtagcattctcgttgttgctatcacttaatggctgtagcaatctccatcatcataggagtggttatttttcgttagtattcataatcatggtaacaaaagttggtgtggatggatgttgcacgtagaccaaatggtccaggaggcagaaagatttgctaaagatgacaaagagaagagagacgccatcgacacgaaaaaccaagcagattcagtggtgtcccagacagagaagccactgaaagaactaggagagaaaattccaggtgaactgaaagagaaggtggaggc

SEQ ID NO: 30560 - DNA, 4454 bp, Arabidopsis thaliana landsberg
tgatcattactgactcttgcattttgattcttatgcagttgacataccctctatatgttttgagattgaggttggctgtcgaacctgggtatcgaacaatgtctcaggtgaaatggtttttcatttatatcatttcctgttcatgcatttattgataggcattgtgcaatgtaatctcgtgcaggttgctttgagtatgctccgtgatgaaggaatcgcatctttctattacggtctaggaccttctctagtggggatagctccatatattgctgtaaacttttgtattttcgatctgtgagtctttcaaactttctttctatctgttttaagtacctgtacggaaacaaaatttgaaccgggcttaatattgttttggcaacagggtgaagaagtctttaccggaggaatatagaaagaaggcacaatcgtctctattaacagctgttctctcagctggtattgcaacactgacatgttaccctctagacactgtgagacggcaaatgcaaatgagaggaaactccatacaaatcaattccggaggcatttgctggtaaagttaatatatttcatcatgcaactcattagagcaagatcttcatccaaatctgattgggtctatttacttacaactcgtgttgtgttttgagcaaaatacttgagattttaactgagtcatctttacattgtggctatgcaggaattatagaccgtgatgggcttataggcttgtaccgcggctttttacccaatgcattgaaaactctaccaaacagcaggttagactcttaataaacataggaatagctttctccatgcatttgttaactactgagatgtatcatgtacaaaacacaattatgaacatgcatttagattatttagtcacaattgccaataagaacaagcctactaaatatccattgccgtttatgtttgttttgcagtattaggcttacaaccttcgacatggtaaagcgccttatcgccacaagtgagaagcagcttcaaaagatcagcgatgataatcggaatcgagaccaagctcaataacaaaccacatttttggaatataattgttcacatgaaaattttggagccgcagaatatttatttatgctcgagtgctagtttaacattttattagagcgaaacatagcttggcttttcactttgctagttcatgtttggggaacaatatgtatattcggcaaaattctgtcggaaattcattactatttcaacaattttgaaggaatttgaaagaaccttgagagagtcgagagaccaaatatacattagaagggagattttaatatgtacattagtttatgttttggtttggatgatcactaacgcagacattggtacattgtttgttgtggcaaaaagctgaaacaaacatcctgagagaagggagattttcatatgtacattagtttatgttttggtttggatgatcactaacgcagacattgatacattgtttgttgcggcaaaaagctgaaacagacatcctgagagatgctaacaactgtttcgctttcttaggaaaagaaaaacaaaaagacacacgattttagatctatagttctcgtcgacacacaaattacaaaatacttacttctgcttaaggatctgcagttaagcttgagatacaaaatctgatttctatccctgatttagtcttcttcctcgtcgtcatcattatcgtcatcttcttcctcttcttcttcttcatcatcacctgccgcttccttctctagtagttcttcctgcagagaaatattaagccaaacatacatcttcagaaagcaagcaccaggtacagaagaaaatgggtcatgaataaaagacattatatagagaaactctacattgcttagtggaattgttacctccccactggcttcatcttcatcatttatctcagatctagacttttcagattcatcactcccttcctcctgtccccattgcaaggaaatcagagttagctatgtacgagtttgtatatatgagagtaaggcttagggcttaccaagtttttgttgtatgcatccatttgcttctcatattcagctttcctttttgcagctttctcttcatatggagctttttcctttacaaaggaagacgtgaaactcatgtcaatctcacactattttcctcacagtatcagacagggaagtttcaaagatacttacagcttgagacattgccttccatttctgccctccagctttcccaaccttcacaaggaaaagagaaggtgagaccatgaggacttcacctagtaaagactaccgtacatgtaaactatcaaggaatttgccaaaatgcttacagcagagacggccttcacatttggattttctttcttgaacgtgaccctaaaatcttctctgaaacaaagaaacaaaaaacgagaatgaagttcaacaatacaagtgaaaacctcctagagtgaaaatcatacacaatacttacagaaagacaaagaaggcactaggagctctttttggtttgtttgggtcctttttagccttcttttctttacgagtctctcgtttagtaggcttctcggccggtgccttcctctttcccacctttctgaaaatcaaacagaaaccaaagcttttgtttaaatctatgagaccaaattacaagcaacaatgttaaaaccagtctgtccaacctaagctagcaagtcaacaataatgatcacaaactgtttctcaacagccataatttctcattattactgtaatagttgcagagagataatgggattaacctgtcatcaactggcttcaaggcttcctttgtggtcttaactttatctttccccttcgctgtcttcatcgtagcaactatagaaccaacgaattgaatcaacttcacagatatttagagaattaatcatagcattcaacatagaacagaatcaacagatacactaccaatcctatcaggaaaaaaaaaatcaatcaatcaaacaggtgaaggaaaaattcaattcaatccgtaagctaaaaatcctaaaattagaaaaaaaaaactgaaaacgaaggaatagatgagagaataacaacagattcgaagctcaaaaagtactaaatccttagctaaaacaactattttccattgaaatcgagaggaaaataaaaactcgaatcaaacaagctaagctccagattctccccaatagaagggataaagagaaaaacgcagaaactaattcgaaacaacaacaaaaactgcgaatagattcgaatcaaaaatcaaaacaatagagaaattcgttaccttaattcgagacgaatggaagatctcagaaacctagcagaaaaaagcagaatcaaaagaaaaagacgatcagagagagagagtaagagatgaggcctgaaggaggaaaagagaaagagatgcttattaccggttacctgttaaacctaggattggcgatcgccggttaaggaaaaggaagagtcaagtaaatcccaggtgcttttacctcctatagccggtcaaatgataatagtgaaggaaggtcgttgatttgaacggttgcgatcaaacggttgccgccaaatcatacagatacgataaggatgcgactaaaatcacgtgcggtgtgggtcttatatgggcctgactttattaaggatattgttgggcatattatgggccagactttaatccatagctaagagagaataatgaaggattctttaaccagtgattttgttgctcaaaactgaattattgttcacaagaatcatgtttctatctaattcaaacttatacgaaatcaaaccaaactgatatagctgaaaatctgttgtgcttctggccggttttattgaatatattatatatacatcaaagtagaaaactgtgtgggaaaccaacaatggtaagaccaaagacgaaatcaaaacaaacaatagtcgagactgaacatgagggaagctaacaaagtaaagacggtttaacatcaatcaagaagaagttaacttgtcacatacacaactacaacttctctgtaactgtgacctgttcactcacactcacattcgggtcagctccagatggtgagggcagttttggcttcatatgagttggcggattgtgcttgagtttcgtgagcacttgacgcatacgagacagatcagtgggcttccctggctttggtccctggattacagttatggttgctgttttcttcttgttccctctattctctataactggcacttcacgaggaatgagttctgcaatcgccttccaattgtttttgtcagcttcagcgtaaaacttttcttgattctccaaaaaaaactgccaataacaaacacaaatctcgaatgataagcctgagaattcagagtttcttgatagaatggtgagaggggctatatagaataataaccctctctttctcgcgg

SEQ ID NO: 30561 - DNA, 3191 bp, Arabidopsis thaliana landsberg
aaactaagtaacgccattgttgttgttctactaagcggcgcaaatctgtttccataatactgcatcaatgtcatacatgcacgcaacaagcatccataactcgatccaaattcttataagaatgtaactacatatataaggatacaacattagtcaaacatgtaatctgaaatggtatgattataccaccaccatcttgttcctctataaccgaaatcgccacggacacataccggtttagagtttctattttgttattccctttctgttttaagatatcatccaaaacgctccgacaatctctgatatgtacacaattaaaccagagaacatcagcttccgatgttttacgggagaagaaggcgggagcggaattactcctctggggcatggggcatccatcgcctttacatgccctcgtacagtacccggggctcgagaagatcagacagaacatctctcatgttgtctagtgatacgggtttgagcaacacaccgtctagaccaaagctcatgcatttctcttttgtggatttgtcggtgttaccactgagtgccacaagtagtggccgttggtggcgttgttttgtgaatttctcgtgaatacggagagcgatttggtagttttcgaccccgggcatgcacacgtccatgaagaccactttgtgctcatgggacacaactcggagacactcctcgtttgaactcaccatggtcacttcgcacccaaggtgtacaagaagtcccttcgtcaccagtctacttaccctgcaaccaaaataatcatcggtttctcataagattaaatttgcgttttttctaaacgccaatatctgcatttgcaagaagtaaggcgagagattttgcaaagagaaaggtgagaagcttatactaacccgttctcatccatgacaagaaccttaagtccagtgaaatttgaatgtcggggaatggctggaactttcggtatgcccgactgtttagattcgtttgaacgttctgagatcccaagtttaacatcaaagatagccgtgcatccttttccaagaccatcgctctcaatccaaatgttaccctccatcagattcacaaaccttgtcatattaaacgcttatgagtaaacttttaacaacacagaagacaagaaaaagttggaaaaaaacgtcttttaataaggctcaaacctcttggagatggcgaggccaagcccactaccacccgagcttctcgtcgctaaagattgtgtttgagcaaatttagtgaaaatctttggaatgtcttgaggatttattcctgctccagagtcttttacctatatttgaataatcatcaaaattaagacctaagaaatacattcagctatggtataagatcccaagatacaagataataaccttcactctcaagtagaaatgactcccagttggcacgacaaaaaagtcagcagctcgtgtgtctgacttggtgacaagagcggttacggagatactaccttgtttggagaatttcacagcattaccaactatatttaatattatctgcattagccgtttctcatccccaacaacaaattctggcaaatctggtgcaagatttagtgtgatgggtaatttcttaacaaccgctataggctttatcagattgaggacctgcaacaagattcaatatgacaatcaagtacacaaatagtataaacttatgaaacatagagctgttcaaaagttacctctctaaataatgtatgaagattgaatgtcccaagttcaagttgaagacttccatcttctaaccttgaaagatctaagacatcattcatcaaagttgccaaaaggttactacttttaagtattgtttccaccatcagtctttgttcaggggttagttccgtttcttggagtaaggaagagagtgcaataatcgcatgcatcggtgttcgcatttcatggttcataaccgctaggaaatcattgcgggcacggattgctgtttctgcttctcgtctagctagatcaagagcaacattctgctccatgagaaggtccctagctcgcatcgactcttctaggatcgcagcatgtgagagagctacagccacctataataagagaagaaaagttatagacaagatcatgaacatagcaaagaagagaaattctcagcaatgtaaaacctgatcagcgacgacttcaacgagttccaactcatggacatgccattgccttgcactatctgaaggaagcatcaaaaccatcaaagcatatctctttgttgaaagctcaggccagtcattaatctgaaaattagaaaggtggagaagcggaaccctcacagcgaccacctcccctagcatatatttcccagaaacaggtctcaacctagccacaggagaattaggagatatttttacagccctactagtaccaaacacttggttaatcaccggtaattgaataggaaccgtatactccacgggatgttgatgacgaagtgtataagaaagctgtagctctaacccagttctagtaggcatccacaatgcacactcctccaaagctaatgtcctaccaagctcaacaagtgtagtctttaaaatagtatgtctatctaaagtgcttctaatctcatgagtcaacattctcacatgccttccggtttcttcctgagttcgaatcaatcccatttctctatcgagctccgcagctttatttttcaagaaaagctcccgagtcttaacacttaaaagatcaggaataatatgaacaagcatcaacgcagtagcacacgagacaacagcggttaacaccttcgcggtagtcatcacaagcgcaacagttctcgaatgcgtagtgaaagtccataagttaataagatgagttgctccacaaagaacgataaaagcaccaaactgaacaagtacccatctatacggaaacacggctgatttcttcacaaagtaaatcaactcaagaggaatcgaaaaatacgcaatcgcaatgaagaaatcggagatgtattggtatttcattaacaattcatccgctggccattgcggttcaatacaattgcagacttccattatgaattttttacactatagttcttttctcacacatacacacacgtgtgtaacaaacacatagcattatcaacttcgatttacgacgaggacgtagcgtagaaagatcatgagc

SEQ ID NO: 30562 - DNA, 1204 bp, Arabidopsis thaliana landsberg
ttttcggtttggatctatatttaaggtcaacaatgtgggaacgtgtatagtcaaaccgaccttacaacatacagccgaagatttctcatttacaatggcaacgaatctcgagtcagcttttcatctctcgcagctcgcgcatcctttgttgaaagcttctggttcagggagcatcgtgctcatctcctccgtatctggagttgtacatgtcaatggtgcatccatatatggagtatctaaaggtaaatctatacgtatgtatattcaaacgattaatgatgcatcacgttctgatttttacgaaatgtaagtgtattttaggagccttgaatcaactggcaagagatttggcgtgtgaatgggccagtgacaacataagggctaactctgtagctccttgggtcactgcaacttctcttgtccaaaaagtaaactaaaaatctttttttctgttcataattttttttttttcgtttttaacctaaatcttggtttgaatgtggacttaccagtatcttgaagacgagatatttgcggaagctatgttctcaagaaccccattaggacgtgcatgtgagccacgtgaggttgcgtcgctggtgacatttctctgtctccctgcagcttcttatataacaggacaaaccatttgtattgatggtggtttcactgttaatggattctcctataagccataggctcaaaccctagaaaacacttctacaattaacaatttctatgatgtatgaacatttggtcaagttttactacattatgtcaaaaataaatgaggtcaagcttatatatgaagcagagatgttagaatggtagtacttagtagtgaatgtgtgattaaaatttgaattccatgatcacctctatgtcgtaaagatacgacaagcctaaaagattcgttgatatgaagatttggatcctctgagtctgagatattcctgatggacccggcccatcatcttcatcttttatctccaatgattgattaatgatcaatcaactttgtgtttgctccacttatctcttcacatcgtacacttcaagataagagagaaatggctggagcagagcaaagccagagatggagccttaaggccaagaccgtacttgtaaccggtggaacaaagcatcgggtagctccaatctttcatatttctgaagagtaaacttattggatcttattttaaat

SEQ ID NO: 30563 - DNA, 2490 bp, Arabidopsis thaliana landsberg
gcctttcgtcaaggacaaatcttcaccggtagtttcagttacagagcagtccacggcggaggaatattcagctactccattaacgataattccacctcgggtttcgaatcaggatccaagatcgatcaattatccaagtctgacttcgaatccgttgccgccaagaaaaagaagccattcaggacgggttttgaatccgccgcaggaactatcgcatgaattgaagcaagaacgaatcaatctattcctagcagtggcttctgatttgccttcacaagaagtcctctcttatctcgagcgcttcaattgggacgtggagagagccggggcccaatactatgaggatcgagatcagcagcgtacttcatatgatcgtacggagattgatcagtcgtatttgcagcggtttcaagagggttatacgccgatgattggggtttcgaatttggaaggattctcacaaaatgaaacatcgactatggatttgatgcagcatagtgctccgcctcttccatcgttacatttaccttcagaatctcagtttcatgattctgttggttatcaattaggggaccactcttcttctttttctgggtaatttccttttacttttcttgcgattttgtctatcgaattcgatttctggtgagttctttgatttagggtttagttgattcctgagaaaatgtttgtgtacagattgatgaacgttgatgtggatgagtttggagatttagacgatatacctataatgtcttcatcgtctcaagttcaggtactaatcttctctttctctgcactatatctttcttctggtttgctctgtttccttaagatagtctttacaaagaagggaactaactctatgttgattgatgcacatagaagctttgtgtttgatgatgaaggaactttagagaaaacgagagttgatttcagactcaatctttctcctatgttttaactgtttgcattttctacattcagattcaggggaagtagcagttctgctcaaaacttggaagaccacccaccgccaaacaatattgatagaatctgcactgaaactggtgtgtctcgaggtgaagcagtctattaccttgaatccttcgatggtgatttggcttcagcgatagaggcttgccgcagcaaaaacttgcctaccctcaaggttagatcttcgccagtggtttcggtgaatgagatatccgcggtaccagagtgggagtcaccaacagagaggccactggtgatgaattcttgtccgatttcgaatgagctgcagattcagccagagcaactaccgctaaacaaagaggaaatcatcaaacaattctgtgagattgttggattgcatccagatgtcgcagtcgcttacctcgagcgttgccaatggagtttacaagttgccatcgactatttcatgaatgaggcatatttcacagaggatgtaacatccaacccgcctcttccattgataggactaccttcacaatcacagtttcaggcttcggggagctctttttctaggtgacttcccgattatacttagtatgagtctctctgccttctttcaagatctctgaacatccttatctgaatctttcttttttccgccattcacctacttgtacagtttgacgaacattgacccgactgatttcaccgtagctaatcttccaatggcatcgtctcaagtggatgtaactttccttctcttcctctgcactatttactatagtcttgctactttctcgaattgtgttagcttgaaagcttagcttaaaacagaacctgtaaaggaaaaatagggatcttagttttacattaggagttagcaacctagatatatctctcttgatggtctttctttggatgtggccttttttgttgttgaggaagatttaagcacggagacatttcttgatcctcaggccatccaaggctggacaagtgtggggcatgaagctgcaccgactacaattacactaactatctacttggacgatggtgggtctgtgacaccggtatatattccttttagatcagaccaaaccgtcagagacatccgcaatgccattgacgagctaacaccagctaacaacagatattacgatttgcgctcagtgggtggagaagatgattgcagggatatgaatgcaactgtaggcaaaatttgtaagagtggttctacaactctccaccaggtcttccacaacacttagctttggatttttacagtttccattgattgatgatgaaacagataagaaagacagagagatgtatatgattttcgaaaggattcttgccttgtatagaaaggaaaaaatagaatagagcaggtacagttgttactgcgatttgtgaaacataaaatggataaggagagcgttattatcttacagatttgattctatacagttgctatacgatatatgaaacatagagacaactgttgttcctttatatcactttgctctgctttgc

SEQ ID NO: 30564 - DNA, 1460 bp, Arabidopsis thaliana landsberg
  unsure (1)..(1460): unsure at all n locations
tcggagagtgtttgggaaagatgatgaaggaagttagggtttttgcggcgatctaaatctaacggttcgtgtttgttttgattaatttgtgatctgacggctcttgtttactttgatgggaattgggctttaactaaaattaggcccaaattgacaagataacacgcgtgacgtttttttaatgttagaagaaaacttcgtgtcgttcattttggtaaaaactacaaggcgttgatcaggagcttcttctccttcttcttcaccgggaagagctcaccatgattctcatcgttgtggattctctccgatcatgtcgtcgaagaaagcgaagacgaagaacgaggcgagtagcagccgtggtggcatcggcggagagagtatagtcgctgattgtggacgaaataaatcaacttgcggttactgtaaatcttctacccgctttagtatttctcacggttcgttgcattgcctttgaaatatcgttttattagttcgtgaatcttctgtatagtttgtcgttgaattgatctgactatcgtataagtcaaataaaaagattttccgatttgggaatgtgaatgatttccattgcaggtttatggacagagagactcaccgttaatgactatcaaggtttgttacatcaatctcatggtcttattaatatgtttgattatgtgcaaacacaaagtttgaatttttgcttctttgatttgaagttcttcattcaacattttgattctcctttctgagcttagtcatcatttttgatgtatcttttttttttttttttttttaaaaagctcttcttgaccgtggatggagacgatctggctgctacctttacaaacctgagatggagaaaacttgttgcccttcttatacaatccgcttgaaagcaagtgattttgttccttctaaggagcagcagcgagtgcgtagaagactagaaaggtatatatatttctatggatgcactcttctcctcccttcttcttttaacttttttctgtgatgttgtgtacaaaggttcttggatggcgaactagatgcgaagccgagtgagcagacagaagatcaagacgtttctttctccggcgaagtttcagtgctagggagaaaatcacttggagctatagtggaaccaattatgaaagatttatctnnnnnnnnnnnnnnnnnnnnacaaagatgcatacagagtggtgagtttccttctaatgttcagattcccaatgcttcagtaaagaaagttctttctgctaaaaggaagaaactagctgaagggtcagaagaactcttatacaccagcaacattgcttttccaataggagctgctataaaacacacacagacattggagaaaggcataaacgtagaagaaaacagattatcaccagaggctgtttctgagaagttgttgagtgcaatgagtaaggtgnggagagtttactggtttt

SEQ ID NO: 30565 - DNA, 3248 bp, Arabidopsis thaliana landsberg
ggaattggaagacgttgtttatttctatctcgatcttctcttgatgttgcgaggtgtatatgtctcttttgatcaaaactcttcaatacatcataatcatctcaacacgaaatctctcgtggttttcataaaaccagatccaaacgcgctctttagggttcttttttttttgttgctcttactaattctttttttttctgtggcccaatttgttttagtcaggcccaattcattattttcacaacactctggttcaaaaaaaaaaaccgccaaccacaagcatcataaaagagtttcctccaaataaggtgtttaatatcaagtgtttttgaagttttggtattaagatctcattctttcgagtttgtttgacttgcatcaatcaaatgaaccaaacaatgctatggttttactttatattttctagattttgtataccacgatatagctagacctcgaatgatcttaacgctatctttgtatcgttgggtgcggctagttgtcttctggttccataggtcattcgtggtgatactattcagatgtctcaaagccttatgggatgtatgagtatcgtccgaaatatttttacaaatttaaacaaaagataatcttgaggaaaattaagattataatctgatatgaaatatatacaccaaacacaaacccaaacataacaaagtcaaagtgtttagtcatgtaaatgtgaatcaggctagagaattcaaggaccggtagatttgatttaatcggttttcttatttggaccgagcagtacccaatcatgtgtagatcaactactactcagcagatcttattttattctagttaaacttaagatcaaggctttatattcgacttcgtaaggatagtagttcttgcttaatctgatctctcaagactcttctcagtagcttgctagaagctgttcttggaaactccggcacaatcttcacaaaactcacctgcaatatttttgcaaaatccatttttaagcacacaaaaaatcttataataactttgaatttatagaaaaactcatcaaagatattgattaccttgaagagaggattaagatctttttgaatggttcttgaaaatttcatctttagctcttctccactctgttgcttgaacccttctttcaagactgcgaatatgaccagcaactctggaccaccgttaggtggtgttaaggtgactgcagctgtctcagagatgcactcatcagcttgatcacacacacgttcgatctcaatagaactcgtctgcgttataacagataaacaaaagatgaaaacttgagaaaagttccaactctaatcgaagttgggtatatagacatacaatgtatgtagtaccttaatgcctccaaggttcatggtatcatcagctctaccttgaacattgtaatatcctccaacagttcgcttcacaatgtcaccgtgtcttctaagtcgctgcagaacgcaacagaacagaggaatcgtttaactgacgtaagtttgcaattttgtttagatgtaaatatagaagttctaaaactactcactgtttccttatacatgggcattcccttgaagtaaacctcgtcgtgatttgcattcagaagtctatccgtggccccaaggtgctgggggaacaaaccgacttctccagtacatggttgatcatccggctgcaaaaaccagtctacatcaatctctggatattctaagaaaatactccaaatgtctaaagtttcagtttgtcacatatgggacgccattttcatcgaagatgatgattctagttgtcatggatggtgtgctaaacgctccaaaagcctgcggttgaagagggcttcctatgatgtatgacgaagcaagttccgtgcctccacagcattcgatcacaggtttgtaatcagctttagaagaaagccagagaacatcgtcaacattggaagcttctcctgtagtggcgaaaaacctaacaaaacacaacagcttctaagttaaaatttctcgtataaacccgaaaacaaaacaaggtttgttgctccttacttaatctttgtccaattaagcccttccatacagtttgttctcttccaagttttcaccaagcttggaacagtaccaagaactgtaactccagcatcctgaagtaatatcaagcacaaataagtgaggatttatcgaaccttactaaaattgaaaaggagacaacaatggagatgtcttgcctgaacaaactttccaaaaccgcggccaaggggagacccgctgtagagagcgagagttgcaccagttagaaagcaggagaacataagagttggtcccattacccatccaagatttgtaggccaacaatatgtgtgacccacttggacatcaagatgagcccatccatcacaagcactacgaattggtgatagttgtgtccacggtatagctttcggctcacctggttaagaaaaaagaactaatcattagatgcatctaaacaaaatctattacaatttgatgatcacattatttttacctgtagttccagatgagaagagaatgttaatcacagactctacaggtagataaatcggacgatagtagttctctccactgcaagcaaaattggagcatgtcttatctacactctctgagtgattgcaagtgtagagatgtaaacaatttacctagaatggggtttggcgttggaaagaaaatccatccatgatacatcctgttctcttaactgaacatgcaattcagtacctgaagccgggaggacaatgaccttagatggagcagcttcaaccactcgactacaggaaaaaaaaagagacaagtttagatataattattatgttgttcattcattgagttgcaaaatcagccacagaaagatcaattttgtcacctgtataaaggaaaccttcgacctcctctgagtatataatcctgaaaacgcaataagagatatttcacatggtacgggatagatacaaggcgaaaagatgtgagtcagggtgtgtcacaaacctgagtgaatatgccttttgccttcgaaattttcaaccttgttgctatttctttagctgcaaagctgtctgcgatggagacaacaatgcaaccagctaatatgattgcgagatatataatcactgcatcaactgtcattggcatatcgattgcaattgtgtcacccttttcaaaacttccacttatcgcatttgccaccacccttttcgggtaaatgcggcggag

SEQ ID NO: 30566 - DNA, 4712 bp, Arabidopsis thaliana landsberg
caaaaaagccagccatgaggaaccagcttggtaatcttcctatggcgcctagaaatgggtaggttaagaattcaaaatcttctaggaatgggtggagatggtaagcggtttctgcatacatccaagtttcatgcagtggcattaggtaaggcaggcaagccaaagttctccaccaccattgtggcttcttggtcatcgggggaaatcggaagctagaaggtacatcttttgacgctcgtggagtcaaaagagtttttctgcggacaggtaacacaggtaatgtaccagatagactaccttgttctccattcagaagcagagaagacgaggctgagagatatgacagaggcacacctaaaacaatcaaagtatacaagattgaattaggaaacaaaagcagcacctttgaaataccaaagtcacttatcctagtttcagcccatggacaggtcttttaatattcacatcatataaactcattggagcaatttacagatataagcagggatatatgataataagtgtttgaaaccatatgagtagaagaaattcacatgcctcttgacactctcggaagctcattgaaaggtgaaggtggtgatccccacgagttctttacgacaggcaatgaacttcgagcaagataatgttgagtctgtcctgctgcagctctatatgatgatgacttgaatgcccgagagctcattagaacatgtgcacttggcgtgctgtatccagttatcatccttaccaactaaaatgcctataccaaaacaaacgaaacatgggaaatcgaatttgaacagacgactgtagaaacaaaatctcatccgataaatttcaattcccataaacatatttcggtaccctaaaccagagattgctcaagaccagctagaacattgcaaacctacccaagcgcttcgactaattagaacccataaatcaaacaaaatcgattcttttcataaatccatgagataatttagagagaagaagaagttacgaaccttcacaaacaaggaatggtataatcgaagctggaggtaaaagaagaagagtagggtttatggagcattcatctgtacttcatcatctgaatcctatccttcttcactcccccaataaagaaaaatggcgattactctctctttctctcccgtgtttaaattgacactaataccctcaggcccagatcggcccaaaacctgaaaacctccctatgagtaagagggttcgcgcattattaaaccgtgaccaaatttgaaacttttttttttctttttactgtttccccaaaaattcttttgaaaatcgaatcgacaaattccttccgccgtcggaatgtcaattcccgatcccaactcctccgcatctctaacggtgtctccgtctctatccaccgcatcggaaactccggtaacaccagtaaacactgttagaccaccgccgtctcagccacctcctgctccgccgccactaccgccgccgacttacagacccatagctccgcttcgccaccctaatccgttccaacaacaatctgcttatagtaataacctctacgcacattcgattccggtcagacgccaaattcaagatccgtcagctgttctttacccgtttgctctaccgggtcgagggttttcagcccgacctgttcgaggattcgtcgcagatccttccgtgacggctggtaatctgagtgggtaccctcctcgcccgagttttacttacgatcctggaccatatgagcagcgtcaaatggaatccttgttgcagcagtttataagggagagaaatcctcagatttcgtccattaccacgccttggattgggttctcctgttgggttgggtcccattagagcaagtcctcaatttctgcaaccgcgggtgaggtttcttagatgaagtcctcaatttctgcttgtcatgtttcatttgttaatgcttagattctagctaagtagtggaaagattagtggggaaaatgctcgagatgatccaaagtttcttgattggagtcttagtagaactgaatctgactgtaccgtgacttaagaatcatcttggttaatattggatccatttttgtcagagtgattctcattcgaactaatgcatgtagttctagaattttgatcgactagtctagttatacaacaatgtgagttgttggacgtgtctttcatggttttcttataaaccatgtgatagttagtaattggatctagttatctttctattttggttctttgtcctgctatgtgcctgctttactctggtcttgaaaattctcttttgtggaatgaggaagacttgaaaatgcttttatatcttagcaaatgttaagctgttcttctcttaatagatggtttgcacctacttacttttgattattgctcttgctccagtcacattttctcattttcgtaaattttggtacttaggttgccccgcccccaacttcaattctagacactagcaggaatagaaaggccaggtgaacatcaaatttctctactttgatattacctttcttttggtttcactgaaaatattattttaaaaaaaacttgttcaagagacttagttgccttgctgtttcttcttccttgttattagaagcaaggatggggctcttgccgttgttagagggagaaaggtaagcctactatcatatgtactgcttgtttgagaatttggaaaagacatctgttaagtttagattgtaatactattcaactgtttacaggtccgaatcactgaggggtcttcttctctttattcacttggtcgatcgtggttgaaaaatggtgctcacgttggaattcaggttcgcactttatatgctgctgttagagtaggatgttagtgtcattgacgactccgcttgataaaagattcatcggttgtattttcaagatattggtttgtggggttttgattcagaaaacctctcagaatgccaaatttactcgaatttggaaactaaattacttttgatcactcacctatttgcatccgtgctagttagaggattctttcttgatatagttatatttttagaagccaatcttagttaaatgatcttcaattgcatactcaaagcttgttatctgctttgcaatggaaatgtgcatctgcaatctcttgagcgtaaccatatatctgggactaatctaactttcagtttctctgttgacagccgcaaaggagtggtataatgaaacctttgccaaaaccgttacctgtggatttaacaacagagacaagtgtaccagatgatccagatgaagaatcagcggatgaagacaaagaggtttgtgttaagtcttcaagaaccattgattctatctgagcagaacagaagacattagtctgattctttcctgctgttgctaatttcagctcttgaatatttactacatgacgtttgattccactcttttctttgatgatctcaggacgaggaagctgtaaagcaattatctgagaaggatcttttgaaaagacacatcgagcgagctaagaaagtccgtgcacagtaagctccccactattctctctttttgctccttaggtcgtgtagtatttgaaagataaagctccccacaagattcatggattagttttcataatcatcaaagcaaatctagcagaatattttggtaacttgaaaaagcggatttctttctctttcagattacgagaagaacggtcgaggaggatcaggaggtacaaagaaagaataactcttattctggcacaatccgaagaccgatgatgcttgaagaacgactaaaaaagggtaaagttttgttaggaattagcttcatatgactgttgttgatttagcatactagtaccacgtaacaacatacgtgtagtaatagtataggtgtgttcttcttcgtcttctatagattagtaggactactcaatgaatagtgtttcattcttcctaaaactaaagaggaagataaaattgtttccttaaagtcagcttttactaatttgacaataaaaatttcttctcttacacatgtgtcaatcagcgaagtggtaataaataaactttactgtcattcgactaattgtaactttataaacaagatttgagaaaaattgagattttgtagtaaataggtggaagtctctaattggattagaggcttttcgagagagaatcgcatagggaagcggacagagaagataacaaacgctcatatttaaactctctttccgttacatttgccacgtaattacaacaaacacgtgtcatcgccgctaagaactaatttttgtcattgctccacacatgcaactactaaactaccgatgatctctctcgctcacgtttaatccgccatttctgtaaaatcctcttcccttttctgaagtaaactttttcccgcaatcaactcttgctttctatttttctcgattgtttacacttttcattttcagctctctgtttctttctttcacactaaccccaattctagtttcttactctccaagaaacaaagagcaccgatctcagttttctcgagaaacagaggacaaactcagaatggcggggaacgagtggataaatgggtatttggaggcgattcttgacagccaagctcaagggattgaagaaacgcagcagaaaccacaagcttctgtgaatctgagagaaggtgatggacaatatttcaatccg

SEQ ID NO: 30567 - DNA, 2021 bp, Arabidopsis thaliana landsberg
ctgaataccgccgactgtcgatccttaaactcacgaatcacgattgtcaaacgcacgctcacggctcacgggaagctttagccgctgtgataaacggtatcttttatctaggcggccaaaactttgttcaccataacacttcaaacacaaatgtagaccattacacatatataatcaaatggtttccacttaatatatgttagtattcaaaataacaagatattttaaaagcataacaagagttagtgtctctattttctccccaccttctttctaaatataaatattgcgtatgattcatcattttcgcctttttttaatggctaacgttcggtggttgagtgtctgagtgtctgagtcatatgctatatattatgctttgtcattttccatatcatatttgtgtatccccttgtccatgaccgattaattaatttcgctctcacaacaaacacttcactagagaaaatataattaccatctgttcccctgaaacaatacataatcaatgatgatatcaacatcaagtgttatagtgagaaatgcacagcgaaatttctcaattcggtttagtattccaacaaataaatcaattattgttcacaaagacgatctggccaaaactcatataaatgttatgtgttatggatcctttaatctccgtaataacaccaaattactaaacttcgaacgtattttaccttttgtcaccatttaatatgattttaataaacttttcatagtttttttttttacctccaattatttatggaaaatatttttttcagttgtattattattattattttccttaaaacaactatatttttttcatgaagggaaaacactttatattattttgtgaaagaaagaaattacaaatattgaactaattaacttatttctttaacaaaaaaaaatcttttaattgtttttgccaatagggtccccacattttacaggtgtccctcgtcccagcccatcacttgcgtgtcacttggacccaaatttctcctgttttttaaaagaaatttaatttctttctagtatataagaaaaaacaaaacaaattaaaaatgaacctatgataacgtcagccggagaagatcccagatctgcgcgcgctggcatctttcatagagcgccacgtggcaaaaagatttttcactttcgtaagtgatcttatcaaatctcggtcttttgtgtaaattcatcatcatcatataacttactctatttcgatttttcaataaattacttaatatcaaaaaccacaattctggcaaaaaagaaaaatccccaaaatctagggttttcttctcgcccaatttcacttttcttctacgaaattctccattcctgccggctgtcgggttttctgaatcgattctccttcaccaacttcttctctggttctgttcgattctgattttttttcaaggtcaattttttcttctctttaaactctgcaaaatcgtgatcgattaaattcacctcagggttttttgatttctgaaagaagttaatcttcttcgaaggcgattgcaaaagagtgctctgctgtgaatttccactggtatgttcaattttttctgtttttgaaattttgtttgctagaattcgtgaagggattgaaaaaattgatgcaggtggctaaagaatctcttgaatattacgagcttatgtaggtttagagtgtaaattcgagacatgtgagattttggtgctttctcatatttttgcatgcttctgcattgcttcatagccctaaaattgctctcttttttttgtagttggagtctgtatctttttcacggttttagtgatgaatttttttttttgattggattttgaattggttactgaacatgtgttgacttgattatgtagagatgcaatcaaaaccgggaagagaaaacgaagaggaagtcaataatcaccatgctgttcagcagccgatgatgtatgcagagccctggtggaaaaacaactcctttggtgttgtacctcaagcgagacct

SEQ ID NO: 30568 - DNA, 2513 bp, Arabidopsis thaliana landsberg
  unsure (1)..(2513): unsure at all n locations
taattttttatgtgtttccatattctctttcatatgctcttcgtgttttttgttgatataaataatcgatctgcccgttgtagatttaacaacttcttttttttcacagtccttttcaaatctggtttatatgcaaacttgaaacttccatgagcaaactatgcaacttattgcaagctgttttttttttctttgcaaaacataatgtttaataggtttcttctactttctaatcactctcctccggtcaaataatgtttaagttggcgaaaacagagaatttgactacaaatctgaagcattgttatagccttgttaacactttgtggtcagaaaggcaaacgattaagcaaacgtatttttcaattttgcaaaagagaaaaaaaaggtcaaagaataaaaacaagacctacttgctattcctttgtctcttgtctccaaaatctaacacctaacataactcgctctttgtacattcatcataactgttaaacccacacaatatgagactctgacaagaacaactagcaaacacaaaaacgaaaaagccaagaatgatttgccggtttgaggcaatggattatattagccaaagtgtgtgtctctctctcctctcagagctttggctttttttattatggtgcaccagaagaattcagggtctcattagagtctgtctcaacttgttcagagcctgatgagttggttgctgaacccctttctctgtctctccctcctgcatcctctcccgcttctacctcacttttcttcgcaaaccggcctccactcgctcgtgcccttctcattgcatgcttgtgtcttgactcgtgaagatatggctgtcgcatttcaaacatagtcaatacaagtttaccgagcgacaaaccaaacttgcaaattcttaatgctcattatcaatccttcatatagcatgggtccactgctattatggactctacaccatgcttagattaccaggacaccaatcaagtacaattttcataaatgagaaaaanatacctttctgtcccggatgactttcctctctagctctgccttggcacgtgcttttcttcgccttagaattccctcgtactgctttgcattcacataaacgggctcttgtgccatgtcaagtggcagagctgttctttcacgaggcattccaagatatggacgaaaaccctgtttaaaccaatgaacaaaataaatgcaacaaatagactcagatcatcgaaaactttacatataacttataagaccccaagaatccccattagttgttctcgataatttcagatataactttggattctcagttatttcagaaatgaactttaaaagcatctcactgactattgctgaacccagacacattccaacagtaaataaaatcaccacaaacgggtacttagtggcaaaagcgcacatacatcaaataaacactgcaccatatggaactattgtagagattgaaagaggtttcgacaagataccaattgctgatgaccatatgctcccatcaatcccccataatatggatcctgatatgggtttgggacacaagcctgtaaggaagttttgagtttatcatacatatgaaaagggcgttatacaagataaatccttttgagggaccaataagaagtcaatttaacagctcaagaactcataaagcatatatatatatatatatatataaggaatgagaggaaaccacatacgatatagtgtccaacaagctctggtggttgtacaagtggctgatcatgcatgttacggatagagagcgctgggtcatttccttccattccgtgattatctactgaagttgaagaaagacaccattacaaacaaaataaagaaatcacaatgcacatatcaacgagacagaatctccttggcatggatagaactatgaaaccctacaattacaatgcaagtatatttcaaggaccagattcatgaacttgacacgccctatagtgccgaatcacacaaatgcccatttaatttccctgcctgcttgaggaacaactcttcaccaagttgcaacattccgaacgtggaacaacatcactttcgacagtgatcactaggtcatccagtaaaacagtactgcagaaatgatgaatatgaacaatacaccaagtaggcctaaagaccaagaactcaaacctgaacgagaggaagttgcagcttgtgaatccttccaagtgccatcgttttcaccattcaacgcaccgtcttnnnnnnnnnnnnnnnnnncgtttgactcggaaccattggggcaatccaaagaagaggaatttgatggaattccagaaggtctcgcttgaggtacaacaccaaaggagtttgtttttccaccagggctctgcatacatcatcggctgctgaacagcatggtgattattgacttcctcttcgttttctcttccccgttttgattgcatctttacataatcaagtcaacacatgttcagtaaccaattcaaaatccaatcaaaaaa

SEQ ID NO: 30569 - DNA, 3205 bp, Arabidopsis thaliana landsberg
ctcctaaaggagccaagtccaaattgatttaagggtagtaaaaaaagacagttaacaacaaaaaaaatgaattcaagcattcctacaaaatggccaagttctagcgaatactaaatatggtaataattaacaagccacactgaggatgtatcgatgagaacatcgctcagcacatcagctgcgccattcgccatagcgagcagctccgcatctctctcttcctcgttggagaagtctctcctttcgaatttcgagttagcggatataaagatcagcttttgagctcgatccacggctgcgcgtgatcttccattcgaatttacccatctcaaaacagaggaattgcatttgaaaccacaagaagttgcatggagaaaaataagcctaaccgcaactctccccaatgacctgaactcactaagataagtttcccaaacaagtctactactttgtggattagctatcctcattttccccgaaacaggatctctctccttcatttgaaccgcccttgcgtaaaccggatcaagcccttctgttctccatttcatcagctccatcatcgcgatatgtgcctcgtctctagacacaagccttgttattaacttatcaacatctttctcttgctccggggacaagcatttgaatggaggaagatattttccgctactgtcttttatcaagtaaagcggatcaagtataaacgccgcagcccaagccgggtgataactcttcttgaatcttctctcaacgatcttctctacttgcctctcttcaacaacattgaactttgcataccaatcttttatcttggaccttagctcatcccaaagcggtaaacattgccctaccaaaggcctttcttcctctattctccgagccatttctttgacaagcttcaacaacgaataaaccgcctctacctcgttccaaaacccgacatctccaaccatttcaccaacctctctagccatatgatcctccattagaacagccttacacacatcatcatgcatcaccagctgaatcgctctagcgaaactaagcacatcctcaaggagattatacaacggctcaaacaaagaactgtccaaaggcaaatgcagcatcctagtctctccttgctcttgcaactgatacttacaaaccgcgtttcgtatctgtgccgtgctgttcacgaaattaacaagcctcgagcagctttgagagacggatttaaacaaaggaagctcttttacaaaatctcgaatcaaactgttgaaaccttgaaactgacaagagagattcaccatccattgatgctggctctcaagattcctcaatgccttactcataaacctatctgaaacaatcccaacacacctctgaggtgaattaccacaaatacccctcaccgtctccaacaaaacctcctctgcgtaattagacggcacagctccgttcacaaacacagctcgtctatacaaactcgtcccattaggcaaattcacaatcaaattcaccaaattctcgccggagctgtcgaatttccatccatcagaagcaatctgaaagaacattgcgtcgtggattctcgattcagcctctgctctcgaatcttcatacttcaaatccaatcttccggtgacaaaatctctccttgagatgatcggtaaaccaacttgcgtcaaaaaagctctcaactttggatgctcgagaccagataaagaaacagagccacaagattcaaaaacccaatcagagagagaatctaacgcagaatctatctgagctttagttagattccgcgtctgagaagttttaggactcttgagcttcttcacactatcttcaagcatagctaatggacccaaatcgtcttttccaccggaaagcatcaaatgcggctgctgtgtaaccggaaactgcccacagaatctcgagggatcaacgacactaagaggcgtcacattataagacccttgatgatgatgatgaggttgatgatgatgatgattcagagcttccacggcggaggaattacgtttccggtgagaagaagacggaggaggaggaggagaaggagagattgtggagatgggtttaggtaaagagttgaaatttggacaagttccacgtttaagatgctcagaagcagttcgggaaggattagaagctgagaaaacggcgtcgcataaagaacatcggagtttaacggctttagggaaaccagtgtcggtgttgtgtagtaagattggttcaaggtgactccaataccacgcgcctttgcctttaactgcttttgttcttaccatcattaatccttcgtaacgcttttgtaacgcctttgtcgctaattcttccgccgacggttgttgcgttggtgattgcgtttgctgttgtgtcgccgttgttgttgcgtttgtcgtcgtcgccattgtaaattcaaaaacttaaaacaacaaccctgaacgaaattaagctgagagtagtggattttgatgaaattgaagagaaaatttcgccggcggtcggagataactccggcggttcctcataacagagaacagaaataggaataaataaactttctctcttctttttttgcttcaactctgaaaaaaaaaaaaaattgttcctctctgctctgctatcacactgatagtttctttcgattctattttttaagagactgagaaatttcaaaaaggagaagaagaagaaagaaagagacagtagagagagacagagagaggaaggagaagaaaataagggagacaaaagtgaatctcacgcgcataaggtaagcgcgtgttagtaacattgaatgaaacgtttgataggaacaaggtgagaccagagtcccacgtcgtacgagaacggaaacaaagcattggttgttttagtctctcacttcactctcattggcacgtgattctcacgctctccataaaggtatttttaatactatatattattggttttatacctttttaataaaataaatatcactttttcagttttttttaaaaaaatatttttggatgtgtcttgttttcatatttttctgttttttttgagtgaattgttgggttcttgtgtggaagaggtcttcgtctgtttcctctttttctaatttatatgattataaaatattgatctactattgtatagtatcaactattccacgtaatcaaatttggtatatgattcgtgttatgaacta

SEQ ID NO: 30570 - DNA, 5302 bp, Arabidopsis thaliana landsberg
atacgatgaaccatttttttgaactcatagggtacagattctaagaaaatattgatctaaaatcatttactataaatgaagaaaccgatcaatttagtcaaaactctaaactaaaagtttgctccaagtcaaccttatctagctaccaaagttctccacaataatatatcttatcattaaagggtcccaatgaataatgattgatcaaataaaatatataccatgtgaactattaccacaacttatctaccattatcggacaaaaccgaagaagctgctgcttgtattcatgaatgttaagcttcttcgtgagcttagaaaggagagaggattgtttctggcaaagacggtaataggttattttttcacgttcttgaaccgatgcgatgagtcaaacctatcattgtttattggattctccatctcattcacactgatgcttgaactctgcaaacatttcatatatacacactgatgctttgaactctgcaaacatttcagagacaaaattttcaagagagggacacaaaactttgcgctgttgaaactattagaggattgtaatcagaagacatagctgaaacctagtgtttgtaaaaatgcaaattgaacagtgaatgtaagtaggttaccgtttcagccggaagaggtatccattgagagaggaaagagcaacaacaagcttatcaaaagacgtcacagtgtattcttgattcaacagctttagattctttgtgatttctgttctttggggatcatgatgagaaagcactaaacccttatagctaacaacacatttcaggtgaagtaaatttccctaaagtctctcttaagcatttcatcgaacaccttcactgcattgataattagagtaaccaataccaaaactgttctctaccaaatttagtgtaaaatccaatcttccctcaccagattgccttctacgccacaaattcgatcattctactaaagagattaaaggaaatttgaagttgataaatcacatccgaaaagaggaaaaagttttggacttttaaactttctttttaactttacccatcaaaatccctttatactacgtattttgttttgattactcttcttcaggttcttgcaggattctggaatcaatgacacgagtatgacccatttaacttggtaactaatggtaagtaatccaaaatttgtctttaattagtctggggatgaattattgttgtaaccaaaaagtcaatcttagaactgttttgatttgcatgcaaaaatgtaaatgctctgttgatgcttaaagttttgtgtggaaaccgtaggggtcttgtcaacgagacatacagaatggaccgcatccttatacatccgccgtttctcataacactcgcttgcatttacattgcttctgtacacaaagagaaagacataaagacatggtttgaagagctttctgtcgacatgaacattgtaagtccatgcactgttatctctgttgttactagaaggcatggtcttgcttagttggtcatcggaatgtgtgaacatattggcaggttaagaatattgcaatggagatattagatttctatgaaaaccatagactgttcacggaggagagagttcacgccgccttcaacaaacttgctacaaacccataaagtttctacttgtctgtgtgttttgttcccttgagaaaatgtaatgttttgccagaagttttggaagtgagattattctgtttattgtacatcagttttgctcgtcttggttcaaccatgtctaaaactgttttaaaaaatctgacaagatttaaggtacaaaacacaaatcttttaaccaaggttcgacaaaaaaatatccaaattttacaatgaactacaaaaaaacaaggttcgtttttctccattttatgaaagagtgttttcaagcatttccatgcatccgcatccaaaacaaacatcaataaaaagcattatatctataatatagttctgaggcacaacataacgatgcactgaagactggcaacgtagtcggtagtacatcagaatctgtattcttcataagcaaacctgttgatcagcagatgaagcagcttcttgttctttcctgcatctataaaaagatgatcgatgtgagaacgatgcataatagcaagcaaaaccaacaaatgatatcactataacatttgtttttacctgctacccgttattctccttattcgtcgtcacagttgataaattgaacgttgggaatgtgttggactctgtagtaatcttctccaaccaatttctccttccacttcctcttcattccttcaatcttcagctcctttaaggatgttatgtacttgagtccatcaggaagttccttcaactttttgcaattatgtatagtcaaagtacgaagacatgggatcgacccttcttctactatccactcttccaactctgattcttcagatatttctagagcacataattgaggaaaaccgccttttgagcacaccattctccttccgacgaaagcaccaaatgttaatataactgacttcaaatgcagcagcctttcaagaatcgggattggatcctcctccatgctgcaacaccatagatatatgtgtgaaaggtggggatggaatagatattgatcaggaaaccttggcatatgtatcgccaactctaattcctttaggtgaatacaattcagaacaatttctcccccatgataagctacacgaggttcttgcctatcatataaatgaagcacctccagggatctcaattgaccaagagatgacgatagagtgtcactagacccgtcagtaataaatagactgagctcccttagcttagtcatatggaggaggtccatcacactagcgtactttgttgaaaaattcatcaaagactccaggttcactaggtcactcaattccaactttgttttatcatgcattgacataggtaactgaaggtacctcagttcttgcatctctttcaaaacatttggcacatgaactagtaaccgatcagcaacacctaagttcaaatagagcagaagctttagattccccagagaagaaggtagatgagatactccagcctcgtataagctcaagaatctcaagtgaatgagatctccaatgctggatggtaacttccctccttcaaactgtacgtaagaaagatctaacactctaagcaaaggcaaacattggaaacctcgaggcttccaaaacttttcctcgactccaaatatcaatacagatctggcttttttattatctttgtgtcccagcatatgaagtgcattaccactatgtagaacaagtctgcgagatctacaaggagattgtgcattgatggtagtacttgtagttgtagggactttgacaactcgaataaagttctcttctttggctttagataaacatacttctctcatcatgtcatgcatttgacaatactctattctcgaagtcaaatagctttcttcaacaacaaccatatttctcctcactagctcttctagatagctttctccagtatcttgaatggttgatccatcatgaaacggcgttattaattcttctgcaacccaataattgaacaatatcttcacatctattttgttatcttcaggaaaatgggccaagtaaaagaagcggtgctttaactgcataggcaaatcttcataactcagagacaatactcggtaaaccgagttggaattgtcgtcacttaaaccagattttcctactatatgagttacaatattgctatgtactcttttccactctagaactgtatgtttcttagctaacaaccctcccagcactttaacggctaacggtagtcctccacaatatgtgaccatctcctttcccatggcttcatcaaccttgaattctgctaaccaggacaaagtaatatgtttacgattaaagccctgaatagattataaatatctaaaagcgaaagagaaattaaacttcttggtattaaggattcattagagaaaatacaagattcttggtcttgatttatgtatgagagcgtaccagttttgtctctcctagagcttactatcctctcaaatagcttccaactttgttcgggagtaaggattcttggtctaaaggcaaaacatgttggatccgcatgtaaaccaagaccttcattgcgagaagtaagtaacattttccaacctgcaaaatacttctcgtttcatgatagtgaataaaatgcatctatcaccaatgtatgtcaaacttgctttcatctctctctttttataaacacgtactgtataagtaaagtgcttttatgtatgtaccatatgagctcacctcttttgcggggaaacactgcttttattcgatcccagtgttcttctttccatacgtcatcgaggacaaccaaatatgtagcggtttccaataatttatagagtctaccttggactgcatattcgcccatcagcaaaatctccgcatcatgtggttgaagttcttgccagatcctttgccaaacatgcttctgcgtaaactgttgcgaaacaatagacccatgcgaatccatcaaaatggcgttgtaccatgtcatgatgaaagacttgtcttgcgagagtggttttaccaataccacccatcccagatatagaaaccacttgaatgttatcattctccaccaaatgaccagccaatgcttcaacactctgttccacccccacaaggtcgctttcagaactgttagcaaacgtttgccggatctccttttgctccctttgtctttcttgcagcgacatcgaactagcaccatcgataatctcttgtattcctaaactcttcattcccccaatcacctcggaaatcttcttagttatgcctttgatatctgaatcaaatttccggcgatccactaagaagcaagcaagtcttctcgcatgcttcttgatccctttttcttttgctctaaattcgttcagaagaaaggattcgattatatcctcagcatcataaacaatgtccctgacatcttccagaaagtttctcaccctttcactttcatgtttcttggcatcggcatctttcagcaatgactgtaaccttcccagctgacgctttagtccatcaacttgttcaccaattccattcaatcgcgcagattctcgattcagaagctcccaaagcttatgaactccaaacaacacaactccttcagccataataaccctttacgagaaaatttcatggacagatccgtctagtgagactgagacagaagaaacatttactaaaacagagaag

SEQ ID NO: 30571 - DNA, 2150 bp, Arabidopsis thaliana landsberg
ttagatccattgaataaaccatatatatgtttgatttgaatgtacttaccactagatgaatattcataatgtaggccattggtacgagtaggcgagaatccgattttataaaggctagtgaagcgaataacaattccttggaacctcaattggctgatcacggcgaacacacagcgatagagatgaccgggacagaccgaccgggcctcttctcagagatatttgctgctttcgcggacttacattgcaacgtcatggaagctcatgcttggagccacaacgctcgtttggcttgcattgcctatgtctctgacgacaatactcacactcccattgatgacccgagccgcttggcttccattgaggaccacctaagtactgtgatccgtgccacagcggatcccgcctccaactctacacacgtgggtcacaaggaaaacgagactgatgggtttcttgcaggacaaggcaaagggtgtatgaatagcaacatggagagacggttgcatcagctaatgttatctgtgagagactttgacgaaccgttttgtgagccttcttcgttgtcattattgtcgtccaagttagagtactgcgatcataaggagaggaagacaactatagtttcgattgggaattgcgaagaaagaggatactctattgtcacagtgaaatctaaggatcgaagaaggctcatgtttgatacaatttgtactttggttgatatgcaatacgttatctttcacgccgctctccggtctgatggagctgatgcttttcaagtagggcaagaatatatatagcttccttgaaaccattagacccttagggtttgatgttaatatcttggtatgaaaattgtaggaatacttcataagacacatagatggaagggcattgaacacggaaggcgagaaagaacgggtgattaaatgcttggaggctgcaatagaacgccgcgtttgcgaggtatgttaacatttctctatgtgttaaccagaagagatcaatccacaatgactaactttgagatgtctcagacagaagaatattagaggaacattcaccaaactgtttgggttctatttaagaatggtaaacaatttgggtgtgtggtctatggcttaatgcagggcgtgaagttggagttatgcgcagagaacagagtaggcttactctctgacatcactcgtgtactacgtgagaatggtttaaccgttgtccgtgcagacgtggagactcaaggccaaaagtctctcaatgctttttacgtcagagatatttccggcaacaaaatcgatatggagtttgtggagtcagtgaagaaagagatgagaccaatccaccttgaggtcaagaatgaagacacaaaaatagacacagttggatcggatgaaccgacagcctcagcctcagccacaccgcaaccgcaaccacaaccgcaccgtttctcgcttggtgacatccttcgatcacagatggaacgcctttctctcaacttcgtcccaaccaaatgattgaaagttagtaattacgagtatggtataaagatttagatcatctatatttcttagaaagttgcaacaattctttattcattaactaataacaacaaatctatctagacttttaaggtttactacatttctgagatatgagttacaaaatctaacagaactttaccttacgtaagcttcaagttaagtctacgtaaccaaatggaatgaagagtcaagtgaaatgcatcaaatctctgaggaggatcgttaagctcgaaatgtctcctcacatacctcaagttacttttaagccattcatatttctcattggagatcgacatgagaatctccttcaacctcggaatctctgaaacgtcgaccagtacagagaaagtctcccaacgaagaacatcagtgaatggtaacacgaagttaaccgagagaatgacggggatacactcagagtagatggcttcgatgactcgaggactagctacctcatacccactgggacaaaaacagaactttgaacttctcatgaaatcatagtagtttaagtgtttaggaaggtattcataaacaggcatatccaggtcacgctgtttccagtgttttaaaagaatcggtctaaccggaccgtgggcttcgcct

SEQ ID NO: 30572 - DNA, 373 bp, Arabidopsis thaliana landsberg
ttggtatttttgtgtttcgttttgaggtgcttgaggataaaatcatgtgatttatcaaatatatattactactttcagctaagccaaaatattcatatatagttcaaatatatatatttaagagaaaaaaaaacttgggtaagcctaggtgttggttttagtgcatgtgtttcttactttttcgtctaagtgcaagaaactctctagtaaaaccatacaagaaaagagaagaaaatttaaacgcgagacaaagcaaagagttttaatgtttaaaaaaactcagaagactcaaaatggttaagacatgacaaggggcacatcatgtaacaaaagaggacaaattaagctctttaagttgcctccacaatctctt

SEQ ID NO: 30573 - DNA, 1880 bp, Arabidopsis thaliana landsberg
tgaacccacaactccgtcagggtgagttttgaatggtgtaaattacattaaaagtctctctcacagttggggggtgcgatggactggtttattcaatcatatctatttggatcaccttgttgtttataaaactcattgaatcacctaatattgtttgcagtcgtccactgcctgttgtcctaccagcatcaaagggtcaaggtctgcagattagcgctcaattaacccgacaagatggtcaagtattctacagtatgctcctcgagaacaactcacagtcacttcttgatggcttcatgattcagttcaacaaaaactcattcggccttgcagctgtcggatcacttcaggtaatagtagttggatatgctctatatctacgcctattatatatcctggattcctgaaactgatgtccaggttttgtactattataggttccgcctctgcaacccggagcatctgccaggacaatgatgccaatggtattgtcccaaaacatgtctactggctccaccagctcggtattgcaagttgccgtcaaaaacaaccagcagcctgtctggtacttcgaggataagattgtacttaacgctcttttctcagaagatggtcggatggagcgcggaaccttcctcgaggtaaaagactaatatatgataaagagttcattaacaatacagcaccatgttagtcattgaataatagtggagagggcttatgatattaagatgggcgagtaattagtgacagattttgtgccttaagaagcctgggggagttagggtgctgtagatcttaacatatgatatggttttcatcgatttaagtttctagactcagtaagaactgatggaagatattgatttctgatcataactatataccacagtcttaaaaaccagttcttctgagttataaaacatttgtttttttgattagacatggaaatcgttaccggattcaaacgaggtgcagaaagaattccccgggataaccatcacgagcgtggagtcaacacttgatttactcgccgcatcaaacatgttcttcatagcaaagcgtaagaatgggaaccaagacgtcctctatctttcggccaaggtaccaagaggcataccgttcctgatcgaactaacggccatagtgggtcaacctggtctgaaatgtgcagtcaagactccaacccctgagatcgctcctctcttctttgaagcagtcgaaattctcttcaaggcttgatttgattttacactgccctaaggtaagcaaatttcttcttttagtgtatgtagtaagtgaattgttgccgacttcttgtttctaatttttgtgttggaacccactcgtttttttattctcgtaagagctttgatttttgatgttgtcgttgcgtatatgccccaaaaggtttttgattaaactagtgtgataatgacttattatcagcaaatgctatttttagtgttcagtgaccgacatgaaatcaaaaagtttcctaagtggagcgaagagattcgtacacgtaaaccaattgagaatttggtaccttcttcacaacagataggcgtagatagatagatagatactgggcccgtaatgcgacgtagcaatttcctaatatcaatatcaatcatgatttcctgtaacatgcggttacaaaatagcttcgtcgaaactaatcttcttttaattatcgattgattattaaatcaattcaaaaccaaaactaattgaaaattttaaagcttgagggggactaatagtaacgtgagattgaagtaatgccaccgaatataagggttgagtaagggcgcttcacgccatcacataaaagggattatactatcaatcaactaatatttttggtacttaaatga

SEQ ID NO: 30574 - DNA, 3701 bp, Arabidopsis thaliana landsberg
tcagatcctcccaaagttgctctgaagatagatcgaggagggtacaggagtaagagagaaccggttaataagtttaagagaggtcgtggtggtggtagacccggcggtaaaagcaagttcgagaggtactaaaaatacagttgcacaaacaacgtcatatttagtagtatggcacatgcctttaacgaatgttgtatcttatttttggattcatttacgattgttttgtcttaagctgtttccagagatatcagacgagataccagttttgtccccgttacttagaaatattgatcattttgttttgcgaataaacttggtcttatatacaaacattgcagttgttttactacggctatataggttttgatgaaatggaatataaaaattattcacaacaaatttcggtagcatcagatatttgcaagacgtagatttaaatgttatatattgccaaaagaaacattggagatcacatcacactgcatcaacatcaagccagtcgtttgattttttcttctcttttacctcttttagctgaacccaatctggtgattttgtgtctgaagaatcagaaccagagttagtaacgttcttgtaactcaccttcacgtctccttcattatcgtcgtcttcttctagatcactgaatgatacatcttcttcgtctccaccaaaagaatgatttgtggttgatcttcctccgatggcgctaacagatgacgtctcttcatcgttcaaccaatcatctgcatcgtctgcttcttcgtcatccacttgcacattgataaatctagatgaagaagcagttgatgtgcttgtttcttcaatgacagatttgtcaacaatttgtatctctttgctctcaatagggtgcttgtctgtttcaacgtcagatgactcgactggatttacgattttaacagctgctgtttctggtgaaggttcataaggaggcacagtaagaggttccacaatgacagtattagcttcaatactccctgcttctacgggtaatttgttttgtttctgtagttcctgagataacattgatcttgcttcgagtaccttcataagcaaaggcaaaaacaattagtgacaggaacaagaaatgatctaactttatcacaggaaacctgaattagcaccacttagaactgcttacaaatctatcaaacctgattgacatgctacaactattcacttatgaggatcatcaccatatacaatgtgaaaggcataaacttgaaaacaaggaaataggtagacatttgtaagcaatggagttgagaatccaaacttacctgaggagtggagagaagcaaggcatggtctttactgagtttaggatgcacaagaacaaagtaaatcctccagaagcaattctcagtcatatattcagggcaaagctcaatcctcaaagaagccaagctcggtgctagcctttctacagctaaagcgtgctcgtattgagcatcggccaattcaaagtctgaaaattgattttaaaacagacaattgagaacaaccaatacaccaatcatgaaagcatataagctgaaacaaaatcaaacttgaacttcactattcacagaaacaatttcagatatttaaggaaagatctgaaactaaaacttaccatcaaagctatcgtcgtcatcaggtaaaggaaaatccaaccaagtctcaggatgcatcgcaagatccttcgcaaacgcaactaattcctctgtaactccgattacgtcgtaatctttcggatccacatcttctgaactcaattttaagaaagtcgaagcgatctttgtgaactcagacacaggtaagttcccagatagtttcgaaatcccagtcctgaatctcccaccaatctcagcgaaatcgttcttaatcccagcgattagatcctcatcttcctccggatgatcgggagtttgatttctctcctgaagatccggagatgaagaaggttgcgagaggaacgaagctacaccccaaaattgggttctcaaggtcttggtaagttcgctaatgtcttccttaacgcctcgtggagactgtgaatccgatacagattccgacggctgttgttgattcagatgcttatcatcatcttcatcttcctcatcgagcttgagtgagttcgcaatggatctagctaaccaagccatatctgaatctttctctcacacacgcatacacacaagttgcgatcgtgatctttttgttacagcagaagcaaatcaaacttgagagatagataatgaaatctccgtctaaatcaatatctaatttaaatattgtaatctttatcttacttaatagcttaatccaatttagagccaaagacgacattttgtattgactgtcaaaatattactggacctggataatagcccatatagttcaactaaggcccatcttaagatagctcctattcgggaaattatttatatttttttttttctaacttgagacaaattgttttccagatttggtaactgtgtttagattttatttccagacaagagctctcacatcagtgacatcacactcactgatacaatgtttccaagagatatgttcagattctcatagccaattaaataaaaaacagagataaacaaacagtgaactgttgaaacgattcataagtcaaatcatcctttcttttcaattgttcattcatttacacagtgcatacaaatcagaccaatgcatgttcaaaaaataagacttttattcccctccacaaatctgaaacccacccatatctgttttctaatcctactgttctaacaagaatcactaagggttataagagtgtcaaataaaacgattcatagatcaataatttctccaattattatgactcacaaacagctagtaacttacaagaggccaaaaaaatgattcctttcttcaatctattcttctactgaataatgaaccaaccacaacaaaaagatttatacagtttacttctacttaactattattattcaaataacattgcaaaatagaattcaacacatcgaaactcgtttcttactctcatactccttgagcttcttcatttctatatacatcaacaagatggggcagatccgttgtgtgattttgacccgaaaggtgaaaacttgatcagtcttttattggatagttcttgtgagtttacatttggagataaacattgagtctgaataatgtagactacataacttcaatagctcagctgaacgttgcttcaaagctggatcacatccactttgtatcacaagcaaaagctttgcagccaaaccaacttcaacagcaagagatgaacattcttcagaagctaatttgcaaactgaccaaagaatcgatatcgcatagtttgtgcatttctctgataccttcatcagtaacctaacggtatgcggaatcgtgttaaccgaatctttcaaagcaattctgccttcgctttctaaacataacgaatccaacacgaaaagagctgactctaaacactccacatccaaacatggcaaaacatcaaccaattgaggaactgcaccaatcctaaccaacaagttcctaacttgtttatgaacagaaaccgatttgagcagcgttaacgcaggcgaaacgccgtttcttcgtctcctatctttaaccaatctcattaatccaacaagcaaactatgactagaaacaagctc

SEQ ID NO: 30575 - DNA, 2758 bp, Arabidopsis thaliana landsberg
tttttcaaagagctccagtgctttcttccaatctttcgcttaagtaaaaaccaaaataagattatcagtattttctccataaaagtttaatccaagaaagtcaatgcaatcgcaactttccaaaaccctaagataatgtaaactacatctcaaaaactactttgatcaaataaggatcttttgatgctacatgttcaccaaagttctgtttctccttaatccaccacgtattctaatgatttgacgtagaaagctcaaaacttgtaagtaataataaaaactcctgctacagcaataaaaggcacatacgttacaacaagctcccatcagtgagctatatgatatagttccaagacgtatcccttgagattttgcatcataaagaatgccaaaagcctcgtctaacatttttgcatgtcctgcaacatcaatcaatgcactaaaaaacacctgcataagatgaaaaccaagattcaataaatatgtatgtataaattcttgtaattaaacacttgcctcagcgactttcatgagttttagcagatatgtcttattttaactcaaaaatgaatttgttagacatacctcgtcaggggtcacgtctttttctttcatgtccttgtatatgctacacgcaaaatcccagtccccagacttgctgcaactattcacagcaatggtatacacttctggagtacccctgattccatatttatggatcatctggtaaacttcttttgctcgttcgacctgcaagaaacttattctcaatcagatggaaagagcaaaaaacagaagaagtaacaggaaaaaaaaagccacacacctgaccagcattacagcatgctttcatcaatgcaccgatcgagatatgatcagggtctatagggtgcgtctcagccttcatttcagctaacacatcaaaagcacggtcgacagctcctgattgaccacatgcagagatgagggcattgaatacaacccggtctggcttaacattctactgcatcgaacatgtcatcaatgtaataattgatttgagattccaaagcagaaatgaacatataagcagaattaaaaaaaaaaaaaactgtagccatgaagaaatagggtattttttgaaatctaaacacatgataggagggcatccaaacttgtggcatgcttaccttagaccttaaaattccatacgcaccaaatgccttagctacttgtccagctctagcacagccatcaataagtgcaccaaatgtgtgaagattggcttccactccagaatttgacatctggtggaacacctgacaatataaccacacagagagaaagagagttagagctatggagtttgagtgcagtcatattttgaagcttgattagacaataataacatttcctctgtcgggaaccaagaataacatacagaaccattcagacaaacattagactagtatcagtgattttccccagaaatctatcatgcatcatgattttgacagagattcaaagaaccagccaaatatgtatctttgtccaaaataactttccggcacaggaaggtttctatacctcgaacattgcatcaacttttccacttttagcacaacttgatattaaagttgtgtaaagtttgcaatcagcagtcataccgctctcttgtaccagacgtaacactccccgagctcctacataagtaacaattcaacatctaggagaataaaaaatgaataagaccagtgatttaatactggaaatatgaaatatcaccttctatgtcctgggagcttgcgcagacagacattaacatattgaatgtgctcatggttggatttagaatcaacttggtaaagcgaaatgcttccttgacagccctttgcttcttgcaggctttaaagaaactcgcatgataaatctgatgtgaggaaattgggaaaaacagatcagtgacaaactcccaatagaagcaatactaaaggtttcatccatattgctgaggaaagcagtcgtaccttgtccatgtccaatagatccctttggtccaaatcttcgagcaagcttatgcaatcctttatcctgttataataaatattaacactctcaaagtcaaacaatctagaacttctcattggtactaaaacatccaagtaaagaattagcagtgacagaagaggaaggaaaggaaagccaagattcaaaccagataaaacttattaccttccatctctaagtaaacggttgtaagcatcactagtttctggagaacgtccattactattatgtagctcaaaatttcgagcagggaactggggcatgctttcatcaatttggtgacccacatgcttcccatcacttggaaatttccagtctcctttaacatctttcctaatgtgggatacaccaccgttactgtgtgccacaaggttttcttcttgcacatcacctgaaacggaaattaactttaaggaaacattgtaatggattggcaatgcaagcttcttagaaagcaaacataagattgtgtcaaatctgacacagtaagtacaacattgtcaacgtaccagtagcctgaccagaactctgtcctgggaactgagtatcaagtactccattgttcttgtggtccaggaataaactattagttgcagaagtaacagcaggagagacggctttaagacttggcaaccgtgatgacttggctgatgaatgattagacccatagaatgtgtgaatctcttctctcttactctcggcaaagatgctg

SEQ ID NO: 30576 - DNA, 1805 bp, Arabidopsis thaliana landsberg
  unsure (1)..(1805): unsure at all n locations
ttcttggtttgtaagcttcagttttgtctgttccttatgcattcccaggtaacatctttacgtcaaagcgtgtgaagcagagctcaagcttgagacacctctaactaatctgaagcttttgtgaatnnnnnnnnnnnnnnnnnggagcatgtgaccttactggctcggttcgcggtgaacctacacctataaaatcgactgtgactaaagcagtggctgagttccggcgaacccatgcggatacatggaacatccagaaagactcattcaccgaagatcagcttgaggtaatgagtgtggattttacatttacttttcttgatttacaaatgcatagacaagactctgttgagaaatcagaaacgtgataaataccaaaatattctagttctcgtttttatggtttaaatattcttggtgatgaaataatgtttgatattttgttccaccatttgcagatcttggccgatacatcttcctcttcctcgtactttgcttgattaatgtcgaggaactgagtctcgtcaaaagacgataatactaaagtaactccaccttttattgatttttaattctgtgccaaaatagatgtaataataataacatgaaagttataaaaccatggtttcggtttatatatcacagtgaaagttagagaaaaggtttcgaaggctttgccgaaaaaaaaaaaaaaaggtttcgaaggaacccagaaaacaacaaaaataaaaaattatgagatgggggcatgggatcgttacttccctttattcttcttctctgaagtgaaattatatcgataataaacagatcatatatgggccaacaagttaaacgaaaactaagaaaagcccaaagagaagtccatcgtttgcaccctaaaacgattaaatacggaaattaaaaggatttaaaaaaaaactacactcgcgtacgaaataaataaaaaccgcaccataagcgcgtttagcgcgtgaaacaaaaatccgtggactatataaccctccgatttgggtttttttgcataaatgaaaaaataagaggaccaacagcgcgtgggtcgagattttcatcagtcttcttctgtcagaccaaaagttcacgtttatttgccgactcgttatccaaatgtgagccaacaacaaaatcgctatgcagaaaatgttttacctcatttttttaaaaggtaaatctggaaaaaaaattctatttgtgagttttcatttgaaaaaataccctatttttttttcttttttgaacaattaacttttaacatataaaaatactaaaataacctcattaaaatttaggaataactaaaaaaaactaatacttaaaacagaaaaataaattataaattaaaatttgatgtaactaataattttaaagataattattatcttaaatatttttaaacaaaattttgtccaaaaagtaaaaaataaactttattaagtgatagactttttaaaaatatttttaaatattattttattaaattttaatatatataataaataaattctttatctcagaaataattgtaaaaacaattaaaattcaaatttaattcttatcttaaatatttgtaaataaaatttcgtccaaacaaataaaataaattttgttaagtgatagactttaaaaaaaaactcgatattattttgttaaattttaaaatatctaaaataaataactctntatctcaaaaatagttgaaacataattaagaattcaaatttattttattntaacatattaagaaattacaattttataaaaatagangaagatgtatttttaaa

SEQ ID NO: 30577 - DNA, 2395 bp, Arabidopsis thaliana landsberg
agcgtttcaatgctttaagaatggtatggggattctctcaaatgcttcctctccacttattcgaaaatccaaaaaatggatatatattcgacgggcaaaaatgcgagtttggtgttgaagtgatggttgttccaccccttaccaattgggaagtgatgtcttttgatcagaaactctcaccatccacattctcctggagtgccaatggtttctccttattgacagagaatctttatgtgtcaaacaacttttcagttggaggaagagaatggtgaggctaataagtcattgaatatatatacacgtctatgtatgctaagtgtatacaaaataatgtgacttttctataggtgtttgaagatgtatccaaagggaagagaggcagatggcaaatggttgtccttatttctgcatatatatagctgatagtgaaaccttttcggaggatgagaagatttacgtgcatgcagatctccgagtattatacccacgtccacatgtatacaacaatcacgtcacacagaaacgtataattaactttgaaacacaattttctatattcttgaataaatcacttagttgcttttttcaagtcttaactaaattttcaataccttacatatatttatttttcttgcagttaacgtctgttacaagaaatcaactcaagggtggggttgcgaagattttgcggctatagccaagcttcgggagtgtaattacttggacaatgacactttgacattggaggtcgaatttaaagttgttgctacaaccaagtattctcacccatgatctaagctcttcttgtagaatatctacaatattccatattctactacaagtctagtaatctacaatgccttgtttcatacgatttctagtaattagttcctttttagttaaatcaattctacagtttatggttccggattcatttcctgctaactaattatatcatttttttataactagtaatcattgaagcttataattgaaatctataactacaaagcctagtgcacttacgtccagaaagccaaaataattaggcttcctattaacacatatatttatatgtttcttaagaacttttacgaaattacctgcatgtagttaaaataataaaatctaaactaattgtgagcacaacaataatccgccacgtcttctaaacctcttccattcaaaactcttcactatccgccacgtgtccccttcttcacactctttttatcttcctccacctctaaaactttctcaccacattttcccgagaaaacaaaaaaaaaaaacttacaccaaaacgatgtctggaggtgtcggtccaacgtacaacgacataaccttacccaaagaagaagaagaagaacatcaaacccaatccacctcaacagtatcatccaccggaaaacccgccggattcttctcattccgacaactaaacatcctcgcaataatcatcgttctctccgcaagtggtctcgtaacaatccaagatttcatattcacgatcctcactctcatctacttcttcttcctctcgaaacttatcttcccaccacacaacaatccaaaccgagacgctcctctcacaagctccacaaacaaaatcttccgtatctatgttacagcggcggggatcgtcgggcttatcattccgatctgttacatcttcgaaggaatcgttgaggatgataagaacggtgttagcgcagctgcaccgcacgtgtttcttttagcgagtcagatttttatggaaggattagcgaccatgtttggcttctctgctccggcgaggattcttgttccgattgtttacaacgccaggagggttttgactcttgtggagtggattatgagtgagttctcgagggaggatgtgacggggacggtttctgcgcggcggatgtatgccgggaaagttttggcggcggctaatttagggatttggtcgtttaatctctttggtgttttgattccggtttatctacccagagcgtttaagaggtattacggttctgataaggaggattgaaatcccggtttagttccggttccaataaggagagtcaaaacccggtttaattcctttgtggttcacagctcttgttgttttccctttttgttctgtatattatttcgatgttttcttttgaacaattcagtttatgtagtagttcacagttgtattagatttcttacgataataaccgaatctatgtttctgaaagaacagaaatgaaaatgttttagtaatgatatagaataagaccattcacgatctcagttcaaacaatatatttgtatgaaacagtaaaacatgaaataaacaatttatatcaatgtaacaagattagatgtaggagctgatccaagaatattccaaagtttt

SEQ ID NO: 30578 - DNA, 2278 bp, Arabidopsis thaliana landsberg
  unsure (1)..(2278): unsure at all n locations
tgtcacatgaccccaaatgaaatcccattactctcatctaatatattttccatttatacacatataacagcacaaatccacgaggagacacacctcgtacgtattaagaaagtcacttcaaaaaatggcgcaaccgcattttctactggtaacgtttccggcgcaaggtcacgtgaacccatctctccgttttgctcgtcggctcatcaaaacaactggcgcacgtgtaactttcgccacgtgtctctctgtcattcaccgctctatgatcccaaannnnnnnnnnnnnnnnnnnnnnnnnnnnnnnnnnnnnnnnnnnngattcgacgtacggagcatctccaacaccgacgacgtccaaaaccggttggtacacttcgaacgtaatggcgataaagctctatcggatttcatcgaagctaatcagaatggtgactctcccgtaagttgcttgatctacacgattcttcccaactgggttccaaaagtggcgcgtagatttcatcttccctctgttcatctctggatccaaccagccttcgctttcgacatttattacaattactctacaggaaacaactccgttttcgagttcccgaatctaccttctctcgaaatccgcgatctgccttctttcctctcaccttccaacacgaacaaagccgcacaagcagtatatcaagaactgatggattttctcaaagaagaatctaacccgaaaattctcgtcaacactttcgattcgctggagccagaggccttaacagctttcccgaatatcgatatggtggcggttggtcctttacttcccacggagattttctcaggaagcaccaacaaatcagttaaagatcaaagtagtagttatacactttggctagactcgaaaacagagtcctctgttatttacgtttcctttggaacaatggttgagttgtccaagaaacagatagaggaactagcgagagcactcatagaagggaaacgaccgtttttgtgggttataactgataaatccaacagagaaacgaaaacagaaggagaagaagagacagagattgagaagatagctggattcagacacgagcttgaagaggttgggatgattgtgtcgtggtgttcgcagatagaggttttaagtcaccgagccgtaggttgttttgtgactcattgtgggtggagctcgacgctggagagtttggttcttggcgttccggttgtggcgtttccgatgtggtcggatcaaccgacgaacgcgaagctactggaagaaagttggaagactggtgtgagggtaagagagaacaaggatggtttggtggagagaggagagatcaggaggtgtttggaagccgtgatggaggagaagtcggtggagttgagggaaaacgcaaagaaatggaagcgtttacgantggaagcgggtagagaaggaggatcttcggataagaacatggaggcttttgtggaggatatttgtggagaatctcttattcaaaacttgtgtgaagcagaggaggtaaaagtaaagtaaataaaggacaaaagagttggtgtctagaagtggcggagtgttatttgctaatactgtcactttgtaatatcaaattcaattaaaccataaaatttactccatctagataaatatgttttttgaataatggtcaattacaaaacatgtttgattgaatcacctttttgagactctccaagcaagcgtgttcgatcgatgggcgtttagccattttctacctccgttgttcttccgattaggtttcaggcgagcccgtattgtgattgggccatctcttttcgttttggtttcttgttgggctttcggccctattgtaattttctattacaaaaatcaaaaccttttgacagaaaaaaaaccactcagccttgccaaatagaaaggtccaagatatttagaaataattatgactagaattagtcctaactgtatttagacgcttagaccatccttaatggttggatccaaacataatttataattttaatattggaaaatcaaaaatttagacactttcagtgtttattagttttgagacagcccaatggtggatctaaaaattgaggatctaaaatttcaaattttgaaaaatgtgtattcttgaataacttgacatacactctaaaaaaactcgaaatgtacacaagcaataaactcaataaaacacacaacacaacacaagcatttacttgatctcaaacataacaagtttaatttaggaaacaagaaggaatacaatgaacc

SEQ ID NO: 30579 - DNA, 4864 bp, Arabidopsis thaliana landsberg
  unsure (1)..(4864): unsure at all n locations
aaaagttcaaaagtgaaaaattcaagaaggatcttaatcaagagatgatcagcagngcctctactgaagaggggtacaagaagaaagtcatccaagaaaagcttgatgatcccggttcattcactctaccatgctctctaggaccattgacattcaataggtgcctttgtgatttgggagcatctcttagccttatgcctctctctacagctaaaaggctagggatcatggaattcaagttctgaaacttagccttactcttagctgatggttctgttgcacatcctcatggtctagtagagaatctgcctgtcaagattagaaatgttgagatacctacagactttgtggtattggacgtagatgaagaaggcaaggatcccctgatcctaggcagaccattcttagcttcagctggagcagtcatagacgtcaggaatggaaaaattaatctgaaccttgaaaaaggcatcaagatgaagtttgacatcagggaagcttcaaagaaatcaacaacaggaggtcagagttttgggattcaggacatggatgttgatgaagaaacagaagctgaaacctcaccaaaagtcaactatacttctcaactcaacaagctgaagagaactattgaccacaagaagagagcaatagaagggttagctcagactgaagatcctacagaagatgactggtatgagatgagaaaataatttaaatggcaaagaagagtcatagagggattatcttcaagggtgatgaagctgaaagatcaactatagatgtttgaaaaaagagttaataagttttcaaatggtattgatacagaaaagatggaaactgcactagctatcaaggaggacgaagatttcacaacnnnnnnnnnnnnnnnnnnnnnnnnnnnnnnnnnnnnnttagaggaaaaaagcctagagagcaagttgttgagtgaggaggaaacccctattccgacttattctccaggagtgcctaaatagtccacaaacccctctactgaagaagaacacttgacacttgactctgttgctgaaaaacttctggaactcaggatagagtaccaagctcaaaaggataccattgggaagttaacctacaagatgaaagaactgaaccatgcaatcttggaactttaagaaatggttaatacttaccccggttttgaaattgagccttggtcaaaagaacctggttcagaagaagaagactactctactgatcataaagaagtttattttgaagaaaaatcaaatgagtactcatcattacatatgtcaagagaggatggagtgtatggttcaagcattgaagattcaaccactaaagatgaggacttctcagttcctcctttcaacctttttttgactaagctttgtaagagtcaagcttagtgacttaaaccaagctcacttgggaggaagtcacatgtctacctatgtatataactttctatttccttgttatttttgatgttttcgtttaagtgtttcaaatttattttattgacctttaggttgtcaacgatcgagtaaattcaaaccaagtcaagaatcatcttaaccgttgatcgagtaaaatgaggaggagtgttttaagccattggattgaatgaccaaatgggagaagcatcttcaccgtttgatcgagtgatcaaaagcaaagaactctcaaccgttcgatcgagtattgcgcatttcaagaggatgctcgaccatttactcgagcttgaattatttggagaccaaggtataagtcgcgtgaccccacttgttcccccatcactccattactctatggacaaaacaattacccacaccctcactgtttccaactcgcttttctatcctttccaaagagaaaccaaagaccagccgccttcacccattgaaatcgccaaaccatctttgaaactctctctttcatcatctcatttttgcaaatcctctatctctcatcaatcatcaaaatctctattccaaactctccctatcactcttcacgaattcgttttcacttcaccatacctcaccaaagttactcgatcacttccaagtccatcctcaaattttcaatcggtttgtaagctcaatttccatcactaaaaagcgaatcctttccactttgatacctcttggagagttgtttttactgctttgttgaaattccccaccaatttgcatggattcaagaagaaagagttcatctcgggctagaagatcctctattgataatgaagaagttgaggcttttgacatgagtgacatgagtgaacgccaaattcgccaagctcgccgtgctcaaagatcaagcttgattcaagggggaagttcaagccgttcaaccatgcaaaaagaagaggtagctcggggaaagagggttgttgaggttgagaaagaacaacatgaagaggcagtctttgaagaagcgattcctgaggaagagattgagatcattggggatgatacaccagccccagttggaagacaaaatcggccaaggagaaagagagagcctaccccaagcgagtactatcaataccttaaggaattgaagtttgagggaacaactcagcttatctgtcagaaactgatggtcttgaagcacttggcgagtaacttgtcttgtttcttgcaccacttctgcagcttgttgttgttcctgtgagcttcactcaagctcttgctctccctcgctggaggtacatgttcactaaaatgatacatcctagtgtcaaactccacttctctgtcttcatccatcccatcctcagcagcttcttctataagatcatccacatccaatggccgatctttctcatagtagaggtttccaagctcatgcctaaaatcaatgttatctccctttattatgcgtgtaacctcaaggatggggagaaggatgatggctctcttatccgtagagtactcaaacatgaaacggtgcatgtcgccaaccattgcgaactccaggaactcgcagtgacatagatgctcgatctccagtgcccgtggctcgagttcatcagatgtgattgggactccacaagcgatccgaatcggtgttacaacaccgcctatgcaaatagcgccttgtgctctcttatggttatgtggattagaagaagtacagagagaggtgtgtcattgatttcaccttggagagacattttgttcttagtttggcggagagtgcctttgagagccatagcgatcatctccatatcagaattggtaacagtcgctgtgatctcttgggagtacaggacattggctatagaatgctagaagtacctgatgacagggctgcgtatctgattgctctttgacctggaagaattcagcggtacagagctgccaatggtgatccataagtctttcaactcttctctgtcatacttgggcttagtacccgttccactggggaaaccaaacgatccttccaagcgcttgattgataacctatactcatgaccatacacagagaatctcaagaatcccaatccttcgcattccaaatcattagaggtcataccttcgtaaagctccacttgcagtgtggagaggaactgaatcgtttcttcttcatatgctacatacggataagccatcagagtgtccagatgacaactttggtacaggtgctgaacatcttccaacaatccgagttgtgcaagtgaggtcgagcaaggatacctcgtgctatagaactcattcagcttgaaaagcctaacatattcctcaacaggcaatacgtcgggcttgtgcagaagtttggtagctctgcgagtctgttcaagcatgtacttgtcttccagatcttcgtctataagctcaaacctctctgtcatcgctctctttcctcgggctatctcagctttccttctgaagctttcatattctctctgttctctctctagccttgaagatgacgactctgtctcatccatgttgtagtcaggatcaacagaagaactgccactgtaattgctcatgattctcctgtagagatttagaactcaaagctcaaatgtcaataggttagtctcaaagatagcaatgaaaccaaaattattgtcaataggcaatgaaatagattgaattggtcgagtacaattctgtactcgagtaacctgagctgttcctgagcttagatgaactggatcgagtatcttctcagtggtcgagttggaatgctacagtaggtcgagtaaatcgtggaggtagagtgagtcgtgaaacctagaggtcgagtaacttctctgaagttggaaggctctcctgaattcacgaacaagaagccgagtagattttgcagcggtcgagtgctttctcgaggtcgagtgatagtatgcggtcgagtagataacgtcgtaaccgagtggtcctggagacttcgacggcggcgcagaggtcgagtggtctagtagctggtgtttcaggagtgctcgattacggcggcgcggaggtcgagtgacggaagatatggtcttgtgatggcggtgtagaggtcgagtgactcacggaggtcgagtggagtgatctggatagagtggctctttggacggcgattcgtggtgtagagagaatggagtgtcggtggtgagatgaaaagaggtaggtcgagtgtatttggagaagtcgagtgacgcttcaaaatgagtggtctaggttgagttatagattctctctccagcttatcctcagcgcgtggtccacactctgttgaatgagaaatttttgcagaaaacctactttaaactgtaggaaatttctgcaagtctctgtagcttcggttggtcgtgtaaaataataaaataaaagtttttgggttttaaaacatcacacatgct

SEQ ID NO: 30580 - DNA, 559 bp, Arabidopsis thaliana landsberg
agacgcggaggaatcaacaaaaacagcaatcggtatgatggtaaccagattcagccagttcttggaggtatacttcaagcaagtagcttcttttgtcgaaagtaaggagatcacgcgataaataagaccatctggtaaattactgattctatccattcttttctcaaaccctaaagaaccctcttttcactacccagaaaaacctcaatttctaatggaaccttcagtgacttgacttcaacatcaaccaaaattcccaaactagatcaatttcaaaggctaagacgagcttacttcacatgtaggcatgaagcagaaacctagaaatcatcgcaatcgcgtttatgcagaaccaagaaaaccgaagcgtaatttgcagaaattggggtagacgagacactcaatccgatcaatttgagagatttctgaagcgaaattgaatcttcaatgagaaatggacgaagaagtagagcggagccgtagcattttcttgagagcagaggaaagaaatttgaatttttattatctattaattttgctcattttttatatactcgga

SEQ ID NO: 30581 - DNA, 187 bp, Arabidopsis thaliana landsberg
tggacaaccacatcgagtttggccgatttagaagttatctaaggcattggcaaaggaagtcgtggtaatgtccagttggtcaaacacaaactcactcaacagtttttcgctcttaaggtcgctgattcagattcttgttgttacttctttttctagtgctttcttctctctcgtctcacaaagatac

SEQ ID NO: 30582 - DNA, 2506 bp, Arabidopsis thaliana landsberg
acaaggaagattaataaattcatcatctccacacatgtcatatgggagagcatttgagagaatctgatcttcttatcaagaattttttattatttgtcattagctcattattatgtaaactaatcactctctatttctttctatcataaaacaaaatctgaaattataaatgccacgtgtctaatacaatataactctgaactctctcaagtctcttcaccttcacacattttgacgaagaacactgttttatctttctgatagctaacgctttggatccttgtgtggatctactccacctttgattcaaccattttggtttctttgtcttgattttggagatttttgaggttaattgcttgaggagaggccaccaaattcgtaagaacaataggagattgttgtaaaaaggtgacacaaacaagccaacctggttactcatcattacagtaagtctctgtgacatgttttgatgcagtgcgcagcttgttatgcctaaatgtacccggtttcgagcagtaaagctccagactttagttgaccggatcggagtttcaaaagaaaggttgctttacaaggtttaagcttgtaagaactcaaacattgccttagtttttgcactgtttagattatactgtgtctacccttttgtgtagcttttggatctcacttcaaagtatttatattgcatgagttggaacaaaaaaagatgaagactttaaaggtctagtagtcagattctaagagatcaagaactaagcatcatcattatcttgtatgttcaatgcgaatttaatagattgtagatcatgtagaacattatggacccctttgcttagatcttcaaattgttgctttggtatctgatatgtcacttcaccatcttcgccaacttgttcccgtagagtcaccacctcttccagtaacttattagccttactgatatcgagctgagtttttattggtgattcttgtttggaaactatgatgcttgtgtcagtatttctcttgacaacagaattgcctccggatgatgaattaccacatgagttgacattttctgaggatcttggtgatttattccttgttgcagaaggagaaccagaaaccgatggtgtcttgttcaattcttttgaaactcgcgggcttgggggatgattgtaaccacgtgaactggaagcttcatgagatcttggtggcttcttcctcgttgaagaagaaccagataaagaagatgacttgtatggttcttttgaagctcgtgggcttggggtatggttgtaaccacgtgaattggcagcttcatgagatcttggaggcttcttcctcgttgaagaagaagaaccagataaagaagatgacttgtacggttcttttgaaactcgtgggcttgggggatttttctgaccacgcgagttaatagcttcaggagatctttgtgacgtcttcctctttaaaggataactagaaacagatggtgtcgtgttcgattctttggaaactcgtgatcttgtggagttgtggtgctttatgtagttctcttgcttgggaggatgagcaatagtcgatgtatgtcttggaacccaaggagaaaagcttgattgcttggttaagtaggctaccccaggtaacattttaggttttttgacaggggaatctgttaaagaaagttaagatgtcaatccagaaacaagagaatcaacagtgagacctgaacatgagagcatatcattttaccgctttgctttggcgaaaacgtatgtgtcttggatggagatctcccaggcgagctaggaagctgaaacgtgacatgaccctgactctttgttccccccgagcccctgagagctcccttaagatccttaacatcatccgctgctcttcccgagcttctatcagggctctttgtcgatctaggtgaggatcgctgaacccatttaagattatcagagcttctagcaggactctttggcgatcgagctgatgatgtctcaacccattcaggcttatcagaacttctatcagggctctttttcggtctaggtgatgatctctgaacccattcaggcttctttataggatgcttagttgcttgctctgaacccgtgagactccctgcatagctactactgccatggcttcgaccatctgctctactcacctcgatgcttgatccagtaacagatgtctctctttttgtctctatttccctcttcttgaccacctcttgatcttttccctcagcttttgctgctgatgttttctttgttacttttgtaggagtcgttgcagcagttgttgttgtagtcacatgtctctcttttgaatgtgaagccagaagcgttttgaaaattttctcagcctctaactgcaaaaccgcaacagaaagtttccaccaccgaatgtacccaaccgtaacatcagcctcgtgaagaaaagcagagaaagtacaacattccatcagcaatgggacgtatataatctttccaggccaattcgggcgtct

SEQ ID NO: 30583 - DNA, 3364 bp, Arabidopsis thaliana landsberg
aattgaaatagtaaagagacgataatatcaccagggaactaactttcaggttcttatatcgatcatcatgctttgtagaatttcttaaacccatcatcttcattattcccatcgttgaggagatgccattgctttcttcactgatgccagtatccttagaccgaacagtctctggattatagatacaaacatgagacactcaacaaaagaattctaaggtcgaagcaaaagtcagggacgctcacttgatactgcagcgacttgccccttcttacttgtctctgtgcatgactgttctccagatttgttaatacctgttctgggcagtgttgcagttctggtccctatttaattcaatccacattagaagatgcaaatctcaatctgaatatagagtaacttttattagcttatgttatggtattaggcctcaccgtttgaaggatattgtgtgtttggacaaccaaaagagcttctgactcccaaattgttttcgtgtttgtgactttcctgcataccacttacaaaagattgtccattcatttgcacagcagagctgtcaacagaatgccttctaggatttgtttctgcagcataactgttgcctctcgactgcaagcaaaatcaccaggtttaaattcaagcacagttttgacttttggcaagtaagcacaacagatttacttctgttatttaatacagggagaaaaatagttcaagaactggttagtgcttaccttatgttttatgtgactcgtcttgttatcgccaccagcacaagcagcttcatcagaagaatcaaacacagtagcactgtctcttctacatgattctcggttggccttggaagaatgttgttttcctacgcttttcctcccttgcgtgttgatttgtggcgtaatatcattctgagagatacccaagctagcaaaatccacagagctttttgaagtctttccctttgctgcctgcgtagtattgttactatacattgtagaatccatgccatggtcatacaaaacagaatctttctcgaaggaaaccctctcagatgacgaagagcaagactccactgggacacattcatctttgtgagctaccctccagtgaattatttgacacttcccggagctacaagcgtaaacaatcaagacatttatgggtcaaaatgtcagcaactttcatcggcaagagagcatcatataaaaagataaaagagataaaaagaaaaactaagaaacgttctgaaataataatgacgtggaaatataccagtatctaacagatttacatctcgagcaacgtgtcttagcaggaccaaaacaccttgcacatacatgtaactcattattattgacaggagccacaactgtaaccccacatgtagcagtcacggaatcagatctctgctcggctacagtttctctcgcaccagcgtcaaactctgctcttacagcaccaccaccagcagaaacagtcttggtcctggttctttgagccctattctcagtagccacactctcaaatcttacacctctatccgcattaaccacggtctcagctcttaaagcttcttcagctgccatctgagccagcaagttagcccttactcttttttcagaaatgttactccattttcctaataaaatgtaagctaccacaggaagtacaaccaaaaccaggaacaatattggtatgtccgctccccttggttcaagcatgtcctcagacacgcattcatgacccgatcacagctcgtgaaaatcccttcaaactacatgaattcagataaccataatcacactcctgatatgcgccaagatctattttcaggtccagcttgtgaagctactgaagaactcggaagatggatagccctgcatttacaaataccaatagaatgagttcagtttatactctcattattccatcatattatacacagattcaataaagctcaagatggtttccaagggaagcccaattaaatctagtctccattcatagtttttcaacaaaagcaacaagaaattatctcttaagctctcaaatctaacaaacccccaaaactgaataaagcatctcactgaagaacccaagtctgctaaatccccgattcaaagcaaagtacttgaagatgagtctgaaaaatcccaaatttcaggtataaaacaaatccttttccaaggacctggtgagaaacactcgcgatccaactagttaccccaaatccgtacagacctaagcacattattctacagagcagctcaaaaaaaaaaacttctctaaccataaaatctgaggtgcttgaaagtctccattgctctcgaatcaaagattccagtacccacaaacccttataacagagtagctcaagaacaaattttgaccacgattgaaaaaaaaaactaagacacaagtcggaagaaaaaggaaagagccgaactttaagaataagaatttgggaacataccttaattaacgagctgaatacaaaaggaagaaaaaaccctaaatttcttcagccttatcttttagcttctcgtcgtcttgagagctcggaaatagatgctttgattcctcgaatgggtaagaagacacaaacagtctctttgtctatctctctctttcttctttctaaaacacactagtttctctctcctcgtcccgtgttgtttatgctcttcgttttcacactcctcgcatactctgtctctctccgtccttcaggatgctgtttttaaataaactaataattaaccaaaaatatagaaagtagattattaataataattttataagctcattttgggtaataaccaaaatataggtagacatttaataaattccggaatactattattttatcacacgtaattatgtaagcaaattgataaaattattaaatgtagttgattttttcctattcaaaataccagaaaggaattctatactccataaaaatagtctttcattgtcctaaaataatatgtcacattaacagtaatatttttattatgggatttttaccttgataccttttgacaggaacatgtaagttttataaagtatgaaaatgactgttgacgaaatctgaaactatgtaataatgaatcttctaataattaattttactttttctttatttataaaacgtcacgtagaatatcagtaaaaaaaattcgaaagcaattataaaaatcagaaaaggtactaaataacaaaatctgttattgtcaaatcaaaaacgaatggcaaaacacaagttctgtatctaatacattttctttcaaacaaataacaatactagaatatgatttaaaaagtgacaaaaaaaaaagaatatgattttaaacatttgttt

SEQ ID NO: 30584 - DNA, 915 bp, Arabidopsis thaliana landsberg
ctccaatgtctcaattccatgtccttgacctatcacgtttgaaaacttttctaggagaatccaaaacagattaatagatttagagttaaaaaaactaagattaaaaaaaaacaatacaatctgctaaaatataaaaatgtaaattaaaggaattcatgaaaaataaatgataatctttcacatatagtcaactttcttccacacacgctatttcgaaaaaggtaagctcatgagccttttacgttctcttaaagatgttgtgtcaaaactgttatttcctctaatctgtagttcaccacatacaactctaactttggtgtggatcatatgagcattttacgttcttcttcttcattcccctaattttttttatatgccttctcgtcattctacggtatctctttctatttgcttccacgttttcttctttttttgctttctctctcttatcttcttgctttcacttcctttctgatagggaggcggaagctacgtacggagaaagacggaggctctgttttgagaggaagaaaacagagtatgaagatgaagatgattaatgatgagatgagatgaaacggtggtgagatgatagaaccgagatcgattccaggaatcgatatcgaagtgatttgcaagtcctccttgcagggcttaagacaaagctcttttggttttctataatagatttcaaaacaagatgaattacaataggtagctgcttcctctattattgtagggaagtagtagtgcataaataaaacctaatacgatttcctaaaacacgatgagaatactcctcaatgaagaaaatagaaaacttagcataatagtaaacttgaacaaaagtcaacaccaacgacagtagcttgatgggcaaggcaatcacgacgaggccatcaaaagcttgacggt

SEQ ID NO: 30585 - DNA, 3071 bp, Arabidopsis thaliana landsberg
atgcaagcaatggacaattggttgcagaggttatggatccaaacatcacaactattactccagtcaacaagttgcatcctcgcgatgatgttttagcttcaggaagttcaaggttcgggattcattacccaacagctacaatagtaaccgttggtggacactttttcttattgactgatctctcattggtgtggatttggtttgcgaaatccggttttgcaggtcgctgttcatttggaggccacaggataaaacagagatggttgaggagaagaaggataagaagattatcatatgttatggtgacagcaagaagaaaggaaagaagcaaaagcgtggcagcgatgatgaagacgatgaagatgacatatttagctctaaaggcaaaaacataaaagtcaataagtatcaagcaaaaacaaccaagaagacaaaaacttaatatgagtgaagaaggtcgttatgtataactaacttactctgtttttgtaggttttcttgtacagagtctgttttagtagcatcccctgttttgcctttggcggcaattttgcttcttttttttttgggggcgcatgatcggcttttgtatggcattttcttgaaatcctttttggtgattcttaagtatgaattgtagtaagaatgtggaatggatcaatcttgaatcttctcttcagtttttactctcccctgttttctcttacttgttggaatgattcttgatctcgctgagtgaagagtggagacatgggatgaaatgtctttactcttacgtcatcttgacagccaaaactcatctgtactacgtatgcaataacatcgatagacaaactgagtccagctaatcatcttgttgttgtctcaagtatggtctgccactacttcatcttattatatgtcacaatacattcacatttgttcggacgcgtttacgaaacctgactggaattttggttatccactgcttggaatctaacttagctattgcatttcactgcaaaggatttatgtttaatgatttagcttaaaaggatttgtggaaagctcattattcaaacaaacaaaacttacatgaggattattgatcaagtacatatataccgtgatctacattgctaatgtacaacatgtgttacaaaggaatgagtttttcatctctcatcacatcaatccaatacaaaaccgaatctagggttctatatttcctcttaaacccaaacctatctactttttctcttttcccaagaagcttaaacggacatctaaacagagcatccaagaaataccaattcgccaaatcctcaatctctgtcctaacaagcttctccttcacaacaatctcatcccacacatgttttctctcaaccatctctctcccaaaccagaaaccttcatcaaacatggttgtttcgttaacttgtacaccaagtttcttccctatttccggccaaatctccttccaagtaaaccctactccattaatggcgttaaaagcttcccctttctcgcgtactttcccacttgttgcagcgaatatatgctgctccgcgactaaattcgaatcagagccatctatgtaactctcttcccaacattctcttgttcctccaaacacaaaaggaagattcaaatacttacacatcgctccataaacacaaagacttcccatgaagttgtacagagttcttgaagagcttcccattagcaaaccaggtctttgaaccgaccaaacaacggaactacgagtgatcttctccttcagcaagtcctccaaaacatagtagaaattcttcccagagctctttcttggacactcctcgctgtaataatacaaactcgaaccttctccacgagccattgtctcttccaccaaagacacataatgcttcatccccgtttgaagcgagaaatgctttaacctcttagcgtttgggagaatcgcgtccaaagcgttcatcagcatcgtcttgttctgtacgcaacattcgtcggtatccaatggaaactcaccagaccacgtgacccaaaacacgtgactcacgatgtcttgtaatggagacaacctctgtttagtctcagatgcgttaagcagatcgcaggagatgaagttgtacatcttcgtcatggaattgatctccgggttacgcgctacgccgtagattctccatcctggtttagacattaatagcgtcttaacaatctctcgacccacaagcccggtgacgccaaagattaacgctacattctcgtctacttcgtttcttctcatcaagctgccattttcagaccccattgtgattattagtgagttatggactttgatcaaagcttcatataaacgcttagagtaaagacaaaaaaagtttgtgggactgattcaacgtgttttaggatagtttcaagactcgatgcttacctgttttaaaggctatgataaattatccaaagcaagttgctttgaacacagctacgatgtagcataacgaagcaacatttgtttaagataaaatagactaaagtcaaacagtgttttgggtttcatgttaacgtgtttatcaatttaatttgtggttctggaatgtgttacgaaagcaacagttgttacaatagttttttaaggaaccgtcgtgtacagcattttgtccggttctcaatctgtctgtcaagattttgcgagaggcaaagtctggcccgtggttgctggccggcttttaaaattatagtacacttcaagggggtctctactctaatagtattcattttagttaacagtctcaccggtcaaaaccgaatattagccgacaacttattcaatgaactagttatatatacactcgtgagtcgtgatgattggtttttcataactagaactcatgtacccgaaaccaaaccgatttgagaactaactgtcgttcgattcatgcagtggccaaacatgtattatatcgaatttcatcaaatgaaacaagttgaccaatggaattgagaaagtcagttttttgattagcgaaatggaagaccctaatttacaatatcatacaactttttgattgatcaaaattattctt

SEQ ID NO: 30586 - DNA, 3712 bp, Arabidopsis thaliana landsberg
gcgtagatcgcgagtgagcaaaaattgggttcttcacttaaatcacacatcgatttagattcagtatgttgattttgtgttttgttaaatatttaatgtcatgtgatattattgattgattttcatcggatggttaagaaattggattagttcaaacaaaaaaatctggattaattcgttaccaatgggtcatatagtcgagactcaagagaatgtctcaatgatatcatggactaattttcagaagatggattatagcaggagttaatagttttccagaaacattgagctgtcatatgcagtacacatgctcaagcaaaaattcacagttttgaaaccagcgtaatgtcataggtgttaacacgcgaatttctccaatatgcaatactccgtttttgccgttaactttatgagcgattcgaattactcatgtatacggatcgtacgatgcgatgaatacatttacgttataagaagtgactacaaccattcttaaacatgtttacgattcgcacataagatctctcaaatcagtgaagctagaccaataagaataaatttgatatgaatcgtcgtcaaaacaaacactaaatttctcactgtaaattcgctggtctcatagattaagaataaagtagttacgaaatcgaattccactacaaaaattaaaaaagaattcgatgacaaaagaactctctctctttgttcgttacagcaaaacaagaagattctcattctctgtttttgattatacaaaaaaaaaaaaaaacatgtttgaaaatccatgtcaagctcgagatctctccccctttccacgttttgagtatcggagtttatcttcactcacatcactaaccaccaccggtggtgatcgcgcgtaccttgacggcttcctcttgaaatgcctatcttcatcactagattcataatctgctacttctatttccttccgactactgtgtcggtgaactgatgttcccacggcggctgcggcagaggcggaagcagatggatccgtaacagaagtagaagaagaggaagacacctttcttcgtttaccagaagatgtttcttcctccggaaaacttatccgagcgaatacgctagacttaagattattctcgatctctgctttagtagcagggactggtggctccgatgaaggcggttccgatctcttgcggtggtgatgttggctgcgttcggtttcaccacggtggtggcgatgatctcggcttctgtcttcatcgcgacggtcgcgagtacggtcgtgttcacgatctacgtcttggtgacgtgacctctcacggtcgcgttgccgatctcgttcatcaggataacgctcggattttctcttggagtcgcgagacggggaaatgtttttacgcggaggcggatgctctggggatagtctcttctccggtcgtctccggcgatcgtaatcgtggattggtggtggaggtgcttgtctctgtaaaacaattgttagcccaaattattataataaaatatgtattgaattcggcccacaaataaaaaggaaatgggctcaatagcccagttaccgtcgtcacctttcggttcctacgcctactattttgcattttaggctttttagccatctacccttctatttcttttcctttttattcacagcccttagtttctgataaaccccaattttatatttcagaaaattacgttagaaaccaatatattttcccctttttcaaaaagaacccattttcccctagttttcttcaagtttttttttttttttttttgggttttcaaaataagcaaaatgagggaatcagggaagagaatttggagccattttctgatataataattagcatataaccaaaagtagatgggagagagcgaagcacaggtgaacaaagaaaagaagaaagagagagcgagaggggaagatgagtcaaacaaaaggagacatgcagatttattagggttgatggatgatgcagaggctgaagtaccgttgttcatcatcgttgtgctattctctccatccctaaacatcttcccgctgtatatacaaccagacaacaaccaatgtttaggttttagcatatccttgtttgaatctgtagtaaaaatagagtgagtgttttctttttacccttcaggtcgtctctcgttttcacgttttcttaacatctcagcgtttcgggcttcggcttcatctctgcccatcatagcacgttggagattcattcggtttcccatttcagctaggtccctgcgcatgcacagaaagttccatcatgagacttgttgagaaagctttattgctcttctttgatagagtgagtgttttacctatggggtggtggtatattagggaacccaaatccttgtgccatgaatggatctggatgcatcatattcatacccccaccaaatcccatgtccattgggtttaatccgtaacccataaatggaggcattgcgcctggaaacgggcctccaaatccattgaagccagggtgaaagccattgaagccaggttgaacaccgttgaagcctggttgtacgccattgaagccaggttgcatgccgttgaagtactgcggacctggtcccatttgcatcatatagtcagggcctgctagatctggcacaggattccattgcatgtctgcaataaatcacataaacaaaccatcttttagacctcccattcgattcacatagacttcgaaactgacaatgtattgccttcagcgtagcaaagaaagcttttaccattcccaggcactcttggtttctttttcttcttttttcctgtatagagacaataagtacgtattacattgatgaatgacaacaagggttcctcagtaattgaaaaaaaaaaggttcatgtgaggtccagcttgattaatctcagtagggaaatctgaactggactatcagtcaccaatcattcgcaatgtccagtgaagctaatattagtacatctttattttacctggctctccagcagcaacctgctgctgcatttcttccttgggggcttgcgtattcaactttgacactgttgcttctttcacaatcacggacccttgagtgctttcacatgcatcaactggcttttctacattcacttctgcagatgcacgaggggcacttgtgatctctgcaacttccattggcgcctttaaagttgaagcatcattattgttactaagtactggtttcttctcgcctttagatgcaacagatgtagtaggagatagagccttgggaggtggacagcgtgcagactccaaatctatattgtccatgataattcagtagtgaggactaatcaaacaaagtttaaaaacacatgaatttaaaataatgacggacctgggatatggccaacgctgcccacattctcagtgctatcgtttccagcttccaaaatacggtttatggtatccctgagggtcttgtttggtagaaggtcgtcagcaagtacatctgatcttccacaaacacacattgactttgaaataatgtgatctctgatacctgaatcagtgaaaaaggataataatgtagaactggaactgacaacggtcagaaaaggtttttgtggaacagcagaatgcattaaaagaacttacacttgtcacagaagctcttgtaacaacatttgcttgtaagcgcagcatctttcatcacttctttgcataataaa

SEQ ID NO: 30587 - DNA, 831 bp, Arabidopsis thaliana landsberg
tacaatatcaaactaaattacagatttaaaacgaaattaaggtttgtagtagaatgcgctatttcacctagtggaatgcatggtcttatatagtactgaagaaggaaggctcatttaagggtttgaaaacgaatattctgtttagtttgtagaaaaaaatttcgatttaaattattataaattttagaaacttgatgaattatagaaataattaatgagtttcttaaacataaagatttaaaatccctaaattgatgtgaagtaatttttgaaatgtgttgtaaattatttttcaaactatgcttaggatttttcaaatttaaacaatacataatattaggaatgttacctaatagaatcaataagttcaagatttgttaatgattgagttataactacagagctaattcggtagttttaatgattgagtgatttgttaattctttatttaatcaaatctttgccaaactttcctaattaaaaccatttgtttctttttaaaatcaatttctttgaatctttgtttaacgattttatttaaaaccaaaatttatgataacgaattagttttatgattgtaatatttaaaaatatttcctaaactatctcaaagaaatcataaatgctaaatcagttttgataatatttatctattttaattataagaaaaatattaaaagaaatataataatgttaatttcacattttcagcatcaattcggattattaataaaattagattttataattaactggaatcaaagtttgttatctttttattacaatttaaatattagttgttatttgataatttagttactatttagtttt

SEQ ID NO: 30588 - DNA, 2523 bp, Arabidopsis thaliana landsberg
  unsure (1)..(2523): unsure at all n locations
aaagcactccactttccagtgtctgattgatagaaaaaccttgacttgcttagattcaattgagcaataagctttggaaagttcgatgcactagtactaagtttttatgggttttcataatgatatgctgtcgcaatgacatcatttgttagagaatctagataaccacctggctaaattagttgattaggcatgtttcaatatgtcttgaatccttgaaaacacttccaagtataaggaagaaaggtagctgctttgctgagggagtttcttgcaaaagttcataggcttgtattgtatagtctgtaagtttgggaactatgttttgggaattgcgggtatacggaatgcacatttttctgtaattgttaacgttttcatgatggtttcttgcagatgccattgtctgtaacaacatattggcttgctgtctccagacacggatccatcgaagaccaagacaattttagtatcggtatgtgcggcaacccattccaaccaaagatttagatgaatcctggcccctgactacagagaacccttttgattaagcatcgtatctttatacatagctacatggattatgttatcatcatacagtatgtgattcatactctgcattttgaattttgttactttataaatgtttatggagcattgttcataataatttaagtatcatctaacttttcaagatggcggctgagttccaacaatctcggaacatgtttattgtatccaatttctaaaaacagtaagtaaattgatatggtgataatgatgttgacccaaatataagccttactgccttagagcttgacacagaaagtgttatgccggaagcaagtcatcaccataaaccataatcaagttcctctcaagaaatattttaatttacgattagttcatacattattctagtgcattacgtcaactcttaatttccaataattccatgacctatgtgaacaagaaaatgctgacttcaatatccgcttattataatgagtttgacgtatcttatgatgttaatcaataattgctaaccgaattttagattaataattttataaaatagctttttgttttgcttgtttaggacaatcaatttaaggtttggtttgtacgtgacacaaggcaacataaagggtttaggggcggcttttctagaacacaagtcaagcaacaggcctctcataaagtcaatgacagaaaattttcttcttgataattatttacaaggaagatcgtcttcttaatataatgattggatgaagaaaataacacctttttgattattgtttgacagaaaataaaacaggaatttgaagttacactttcttgcactcttccttttcgatttttgcctcattgttgtcttcttctccactctttgcctttcttaagtcttgctgtctcttatacacacaaatagatgcaacatatatatataatcatgatgccttttctcatttgtatccatcatcaacgaaatcctaattaataacgaaaaggagaattctcgtaaggtataatgtattgcgagaatattggagaagatgatcggagcatccatttgcaggttttgtttcttcttgaaactacgcatataatacgttcaattnnnnnnnnnnnnnnnnnnnnnnnnnnnnnnnnttcgatcattgtatatatgatatgacatgcctcgataggtttgctctaatagtagtcgttctacttggaatgacgtttccatttgtaattggaagcaactcttcagcttaatttgaaatgtcgatattgaactctctataccttcaatccttcataaatttcttataagtagtaactaccttataataattttaaaaaattctgcaaatattaagattgttttataacaaatcttcattttatgtcatacaacagccaaacgtgtggtatgaaactaaattattatccatttatttgcataaaaagaaaagaaaacttcgaatataaaaactttctaaaattagtaataaattttcatttaggtgttggagctccaaaaattggaagaagcacgaggctcaagcgagaccgttttggattatagaaacagcgtcgagaaaggagacagcggcgaaaccgcagacgcagcgtctgtatcttccgcgatcgcgtttcacagatcaacatcacccgcgccggagcagaaactcacactcttcgctctccgccttgcaatcatcgagaaaatcgccactaatctcggaaccctaggtttcatttgggccacggtggttcttctcggtggattcgctatcacgctcgaaaaatccgatttttggttcatcaccatcattctcctcatcgaaggcactcgaatcttcagcagaagccacgagctcgagtggcagcaccaggccacgtggactgtatccggcgtcggaatcagtagttccgcgtgctccaatcaagctcaatttcacttctcagaaatttaaaacgaatcaggtttcgataatctcttctctctttgcttaatcgaattggaat

SEQ ID NO: 30589 - DNA, 3448 bp, Arabidopsis thaliana landsberg
atcctaatttccttgtttgaagagaatggatgcaagaccagacctccatccgaaatacgctgttggcataggccttttgtgtaaaagtgatgccagtccggctgataccccctgaccaggcagcctcaccaactcctgactagcaatcggctcagcaaacctgttttacaatcccaaataactttttaagtaagttactctcaactctgcgaaggaaaacaagtgcacatgcttcatgcttctgtgtgatgttccactataatgtattttagtaactgttcaacagactctaaatagatcctcacttttcattcaatgattctataggacaaaatttgggtagtaagtgattcacagtagtcaatatacactgtatttaacccgtccaaaatccgaatgagacacctaattactcaaaagcgaaaaacagatacaagattcacttacaaaggggaaggtgtaattccttcataagcaaaggaactgaacccttgtctttgcttgtgcttaggattggaagagcatataacatacacacgtccacgacgtttcactgttttacaaaactcacacatcttcttcacagatgatctcaccttcattgcttctcactctgcaattcacaaccgatcattaacacaaaactcattagatgaaaatgaaagagaactcttcaaagtattcaactttaagattcaaaactaaggattgtatcctctaaacatatcatttctacttaatctaccagaacaactgcaatccttagttgatccgatgatggaagcaaaagtaaaacgaatctgaagcatccatctctaactactcggaatcacacaagagaaaaccctataatagatccagatacgaaatcgagtgataatcaacgagaacccatcaaccgaagaacataaaaatacctgcgaattcaaaggcgactacgaagaagagcaatcgattcccaaatgcaaatgaaagggttttacggaggagttttgcacagtcagagtacaacatattttgggcttttaatgggctttacccgtaaaaatgatccggaatttttttgacccggattattagatctaaatatccgatttggagcgttgaagcgatttggccggactgtgttaccgtcgacctagaaaatctgaggttttgaccgggaagatttttttctgtacgatatggatagcgacatggaaatctctctcgacaggcttcccattaaacgattggaatctatcgaagaaaatggcgccgagcgttttccttcgtaagtgttgtctggtgtttgagaaacgagacaaaatcttcccagattgttttgcttctaaattattccttttgtttttgacgtgtagtgatgttgattacgatgataagagagtatcgctgattcggagaatagacttcgcgtgggcgttggaagaggaagatgagctgaagaagaagaagcagaagaaaagctccaaggatagcgtggagcaatggaaatggaagggaatggttgagaatttgcaattggctcatcaggagctcactgtcatcattgaccttatcgacacagtgagtgactcttgttgataatagataagaattttgggatattcatagctcttacagtgtctgttttattggtttgaatggaaggagctgaagtttggtttctgatatttgaatagagagtaaaacttaaacaatttatcttctgattttatctttgaaggtccaagcaaatgatgcagtaacagttgctgggatgaccagacctaagccgatgccgaatgagattctctcggatcttgctgtgtctactgctaccaagctgcagggctaccgggtaatcagtagcttactttcttatgtgcaatttaactttgcttaaagatggaaggattcttgtaattgttattagttaggcactttttagtatcctgagaaactgttggaaacattaacttggtttcgtaaagagctttataactatataattgtctttggatggtatgcttatctcacttctgaatatctgtttcctctgcagaatttaggaaactactttaaacaatcagcaaaagctttagagcagaaaatcaatcgtgaagcaaggttttatggtgctcttatcaggttcgagtacttgcttttcatttaatgtcagtggctattttccttagtactattttgcaacttttaagaatttgttgtttgcattcttgatactagttttaggtagcttacaatgtcatagctatttgtgttgtgcacagataattagcgtccgaattttggatgtagagttattacgcacgtaggttttgtaatatgttatgacttatgactgacaaacgtgaaagcattttattattcttgtctaatgtgaaaaagttctaaattttgacttctacaccgtctctgttactgaacctgcatagtacagtacttcaggaacatccattttgttgtgtagtgactgcttaagattatgccaacacaaattagagaatttccgttgaaattgctcataatttgtataaaatgataagctgacttcagcttccaaaatagagattgatttatacgtgcaaatggttatttttgctatactaacaagcttataggttgcagcggaactggaaagtcaagcgacaacgcatgcttgcttcaaatgccagcaatgagggcttcaccattgatctttctgactgttcattatatgatccgacttctggttttcgcccatctacactgtccactattcgtgtagatcatgattcagctggtatgctggccattaatgtaccccaagattcatggtactctcttcggtttgggtatgttggcttaaatccgattggcaactcaaacgaatctgatgagcacatagactcgactactggtcacgatatccctggaacatcagagaagcagtctgcaagtgacgacaaatatgttaaagaaactcattcgctactgagggaggtgcataaatcaatttttgctgagcaggtggtatttttgtcatatatcttgtagtacgcttggtatatctcttcacgactatttctcacttctttggtcttcttaccagttgtttgacatgctaaatcgtgaagcattcaatgaaggtgtgggattcaacataagtggactacgagaaaattttatggaaatgagcatcggccaaggagcttctctgtttgtgtctctccacccatcaggcaaaaatcccagcatcaagaagtcggaatctgcaaccttgctcattgaatcatctggcagagtagaaccagcagaaggaggagactatcgcttgaagaagctagggttccctaatcgcaccagctatgaaatatacttgcaacaaatttttcacgagcatgcctttggaaaagctaaagatcagctcaagtcaaaaagtctcagagcatccaatcaaacagaaaag

SEQ ID NO: 30590 - DNA, 2063 bp, Arabidopsis thaliana landsberg
tatctctcttacgtagacatctgttgtaccacatccgtagtaattttttttctatcttataactgttattttataaataatttatccatttattattgtatatttagtccaacgagtaagagaacaggtctaaattttaaataaaatacttgtatttcatgtatttttttgtttgggtattcagtttttacaaaatttagtacaagaagaatacacggtatagtatagcaaaagttactgaatctaaatctaagacaaaatggtccaacagatatttgaaaagcgtggaaaacaaaaaaacaaaaagatatttgaaaagcaagctatgaattattgactccaaaatcaagttagttccgcgctactcatttattatgtggcttgcgttcctgggcagattgcctactaaggacaggttgcggggctggggtattaacgtcacctcagcttgtgttctctgttctgctggcatcgagactcatcgatacttattcttcgaatgccccttctctttttctgtttgggaagctttaacttctaaagtttggcgcttgccacccttggatcttctctcagtctcatcttagattttacagcgcaagctccaacctcaaactctctcttctgtcatcatcaacctcatcgctcaggttgcgtgctatctcatttggcgcgaacgaaatgcaaggatcttcaccaacatctccacttcggcttctgtgactaaggctgccgtggaccgcaccgttagagaccgccttctatccttccctggtcctccttcttcttctatttctcttcttagtttctactttggttgtatctccttccatttctagttgttgcttttttaaataagctgtttcagcattgtacagaaaaaattagaaaattggtataaaatttaactttttaccaaaaaaaagttagccaatatatatccgtaggtagaacaaaaggtctccgtgaaaatgaatagtttttttaaacatattcacttttctttccccccttgctatatattctggtaagtaatttgttaatctatctggcttggtatctgagattaatttgatcgattctatacagtctttggaattttggaaatatacttctactatatagtaataacaattaaattattcctaactttaaaggttgtagaaataacattacctaataatagaatggtagagagtcgaagtatattgcagcacgagtccatctcgcaagtgatgaaccaagtgaccgtctatccgcaaaaacccaaaaacagccatgtccgcctgggtgtcacttgacatgcgagtatgcgacttagcatttgcatttgtgtattatatatttggacctttggtgtaatgaaaatataatctgaatttgcatcaattttaagttttaatgaatgataaattatagtaatgtataacgtaagaaagcattttaattggaaagtgacgaaaatgatgtttggtattctttgttaagtcgaacatgactggaacatatgagttcccaaaatcgtggcccccacagtgagtgtcggtcgtgggccgtgacctattgacttcaatcacatgagctcctctctccggctttcaccactcatcaccgacacatccaattcatatttgttttttgaatgtttgaattattttgtatccaacattaaaatgtgtgaatacaaaaaaaaatccaataattttcgaaacatttagtcggttaaacacaataatgttgcttgagtctggacttttagcccttctattgacacacaaaagaagcatataagttacgtttaatcaaactagtttaactttttatgcatggcatatatatcacacatcagtcaataattacttcttcactgtcaagaaaacaagggaaaattatcctcgagtgttcatctattattgaataatacctctggagagtggagacattacaattaaaagttaaaatatactcatatatattggaatactgatatgtccattaatataaggaccgtaagaatgaaacaattcatcggaaaaataagcatttcaattttttctctacct

SEQ ID NO: 30591 - DNA, 1676 bp, Arabidopsis thaliana landsberg
attaagtaatccaaagtatgcagttggtccatatgggagatgagagataatgagaccatcaggcacaccgcggtgctcatgaaccaatataacatcagtaaaatcatgggaacgagcagtttcaatgatctcagaaatgacctgcaaattaacagagtgggaaagaaacttagattacgattcgaatgcaacatagtttccatgttacacttacatagagaggttttgtgttgaatataagtgtcagtacaactccagcttaaatgatcgtttatattagtcttgcttttatttgaaatctagattctgcagaattggacagactcaactactttttaaattataaagcttgatctaatatgcaattcattgatatgaccagtgttgcgcataaattcaacaataatctgatacaagtctatgcacatgcaatagttatacccaggaaacaaaagggagctaataccattggcaatcaatttaacaacatagatgaagaaaccacaagcaatgatcaattgcaaaacaaaaccagattacagaaaaaaagagaattagatatttccaaatgactttaagtgcagaagccagaacaacacacatacttgactaccacgatttattctctgagagttaggaaacacaaacttcaattcctgcaacagaaaccacaccatcaatgaaaaggaatcaggaacattataacgtcagcatctattcaacgacggaaactaaacaaaacaataccttagtgaatcggatgagcggagcacttggattcctagaagttgtcaacaaaatctttggatctgcttccgtagcatttgcatattcatcatcgatatgactccgcggaactagtaacaacatgattagatgataaccattagctgatgccacaaaccattcatatcacaggttcaaaccaattggaaaaatctagcttccaaattcttaccagctgtgttttggtcttcaagatcaatttcttgtcgaagcttggcttcgacgtttcggagctcagtaggaatcggctttccttctgttaaaccatataaaccaaaatcagaaaaacgaaaaatacacatcgaatcaatgattgtttcaacagatactgaaaaaaaaaatcatcactagaccttgaagggcttctcttatcagccgcttctgctcatagaccttacgctcatcaccttccaagcttttcctgtagatatactctttttttaaccttacgagtctgcgttgcatcgtgattcgtcgtgaggctaaaacacggatgtggcggattagggttttaggtaagggtttcgagagaagccggaagaagaagacgactgaagaaaaatagcgaagtgttgagaaaacggcaaggtgtttgtcattcaaaacgtgaggcggagatagctagctattttgggccgtttatttattatgtgggcctaaagaagcccataggaaaagaaaaaaaatagtaaaaatggtaaaaaggtgccctcacgcaggatcgaactacggaccttcagtttacaagactgacgctctaccactgagctataagggcatttctgtcttaaataatactgtgattttaatattttattagataaatctgtaagaccattcataatttacaacaaactatactttgaacagaggtgcacaacatgaagatt

SEQ ID NO: 30592 - DNA, 2459 bp, Arabidopsis thaliana landsberg
  unsure (1)..(2459): unsure at all n locations
ttttaagctctctctcttcaagtcttcttctctggccttttcttccttcttcttaatccattaaggtttgatcctctcacttaaattaggattatatatggctacatttgctagaagagcatatggattcgggagagctgacgaggcgactcacccggactccattagagccactttggctgagtttctttccacgttcgtcttcgtctttgctggagaaggctcaatcctcgctctaggttagtagtttatacatacatagggtcatagggaatatcccccaaaaaaatatatacattttcagctatatactgttagcatctttacttgaaagagtattagtcagaacaaacactagtactctagtagtatagctcctacacaaacttatttatataatcaattttagaatttgttttaataaggaatgaatatataagacttcctttgactttagttatagtgaatgttatcgttggaactatgcataatcatgcatgcatgtgtgatatgaactatgttatatgtgttattggacagacaagttgtattgggacacggcggctcacacggggacaaacacgcctggagggttagttctggtggcgttagctcatgcattggccttgttcgcggctgtttctgcagccatcaatgtctctggtggccacgtcaaccccgctgtcacttttgctgctctaatcggaggcaggatctcggtcattcgagctatctactattgggttgctcagcttataggtgctatcctcgcttgtctcttgttgaggcttgccactaatggcttggtatattacttctcatcaatctctatatattactattgtctttttggtacggttttgtgttgacacaagaactttgtatatacctctgtaaatatatgctcatgaatgaatgtgattctctgtgatgcagaggccagtagggttccatgtagcatcaggagttagtgagcttcatgggctactgatggagatcatacttacatttgctttggtttatgttgtctactcgaccgcaatcgatccaaagagagggagtattgggatcatagcgccactagccatcgggctcatagttggggcaaacattttggtgggaggaccctttgatggagcctctatgaatccggctagagcctttggtccagcattagtgggatggaggtggagtaaccattggatctattgggttggaccgttcatccgtggtgcactcgccgcacttataaatgagtacannnnnnnnnnnnnnnnnnncgaacctcctcaccacagtacccaccaaccattggctccggaagattactagaccggagcagtcttcatgtagagggttctctctatgtataaatagtctctgtgtttgcttgtgttgtttgtctctttgcttcttttgttttcctgccatttcctatgtataattgagtccacaccaaaatctgttttcttgtattgtatatcttacagaataataaagattttcaatgatcggataaatatggggacatctatggctttctctcaaagctctgtacatatgtaacaatgcctaacttcctctgtttctataaataagtttttgcatctgaaacctgcaaaagcttcttccttctcatgttaagaaggtcctctcatcttttcaacaatctgtctactcttctcctccatgtgacgcctcttctcctccaatttctcccccattttcttcccaagatccaacattcttgctcttcttccctgttttttcccccttgaatcatcttcttcgcttgaagctacagacctagatggtgactgaacagcagaaacctctctggtactccctcttgagttcgtctcctgcttgttactgctgctgggtaccagtagtggagttttcagttcttccaaggatttatcattctctattgttacagttgtggagtttgacaatggcgtagacataatagcctctgcttcaatattcggtttttggaaagcagtggccgctttctgcacttgctcagactgagcacaggaggaagaagccaatgtccctatttcagaaataatcttctgggtggcgtttgcagttctctgcatttgctcagcttgaagacatgagaacgaagtcggtggcttgtcagatttagatctcgcttctgttgcatgggaggtattgtgatcgttttcttgattcagccacatgaatggagcggctttgcgttgaacccaatcatctttttcagcaatcatccaaggaatcgttaggctttcacagttgggaagaaccacggcttctcgtattgccgtctacagaatcataatgttatcacattctgtcagctcaaagtcctctagagaagaaaagaagagaatcccaaaggagaaagaaactgtaccttaaaccggttgatcaagaacattgcaacatggctgttggtgatggtgtgttcg

SEQ ID NO: 30593 - DNA, 2223 bp, Arabidopsis thaliana landsberg
tatttattttgtactagccttaaatgtgaatagtttttattaattaaacgttattagttcatcatagatcttttatataatcaccattatgatttgaatatgattgcacatttctatatgaaaatatgtgacttctaatataatattgaagtgaaattaccccagagacggctgtgctgaggcaggagtggcatttggacccaaaggagtcaccgtggcattggagcaaatcgaagacaatgttgggatccttgctaactttgtaagccacaacattagagacgtaggcgtaaccgtatctaagatcgaggttagagatgttatgaagaacttggttgaggttcttctcaaacgtactcccatgcgtgtatctcccttgggtgttgttgcattggtggttcaaatagtcattggtaacgttctgggaagaaacattgtgtacaagaagaagttgtatagccaccacgaccaaaatagggaccgatccaaaaatatttgaagacatattattggtttcttgatttttttttctggagattgtgttttgttcctgtttattatgagataaatcgtcgaggagttcgaatgtttataatggagacttgatgatgagggatgttggaccttaaatgaagctgttttttttttttttaacaatattagaattggtggaaatattgaccttatatacaaattcgattgatcattttatttctatatataacacatgttctattagtctgtaagaaaagagagaggagttggacgttgagacttggtatttgcgccaagaaaagagcgcagatgaaatagtcaaagttcgaatgtttgtcggattttaatctcttagagtcacacgatacgttcgcactatcaacctgaaatgaaggtattattagtttattatgtagttatgtaatgacaagaatccctttttcttaaaatagattggatatattacaacaaaaaatacaaagtcatcatgtaaataatccaactttgggacttggaaaatatatgtggtttgtaccattacatagaaaataataatatgtggaaaattatgttttcaccgtttcactttataagatattttgatttaaagcacatattatcataaaaattacataaacttgtaaaatacttttattttattcacattaaaatcatatcttggtatctgattaaaatgcaaaacaggactatgaagtctaaacatgttagtcacccgaatgggacacaagacactatagtaaatagactttctcttgtctgaagtcttcgtttatactgacatgtgtgaggaaagtaagattaacaaagcaaactcgctgataagaagttgaaaatataaactctgcaaatatttccatccttttgttgtccaacataacaaattaaccatagccattccggtgaaaatatcggagaagatataagaggggatattagggaagacgtcagagtgtatagcggcaaaattgcaagaacgtacactggtgaaaactaaggattggagtcgggaaggaaaaaaaaaacagaggatagtaccaaatttttactccttttattgcctgtatgttgagataatcatcattgaatcagaaagttcaatgaattacaaatcctctagaccttacacatttaagcttattcacacatttttcatttggatgaaagtaaaagctcttaaatattttctcgttgcaacatcttaaagttaataaaattaacttgtgctttagtataagcagtaaaaaaagtatagtactatctatttgctcaaagctcttcttcaaactacaacaatatacatatggggctctcatcaaagagtctcaagtcttcacaaaagggtaaagctcatacctaaaattacagctcggactcaaaactcttcctccttgtttacccttgcagcatttgggaagcttcgacaaaatataactcaaacagacactacaatttttagctgataagtccttcgtacactgtaccattgcgtacactttttttttcccgaggctttcctcccccgctgaatacaagtagtctctcctataaggtagttcttttttactaattgctttctccttcagcgcatagagaagagccctcgtgttcttgttgaacgccattgtatcgctgctcacatccttcgcgttgtacatattgaaaatgtgtcgctaatcgatttcagcaagggtatagatcgatgaaatg

SEQ ID NO: 30594 - DNA, 4220 bp, Arabidopsis thaliana landsberg
tcaaccattggttttttttttcttcctttttgttccgattccagatttgaatcgtggatttgtgagtacttacaggtcaatgcagttgaaggtgaaaacattggaagatgaaagagagaagagcttgaaaactgagaattcagatctagatagaatcgcggagacgaaagagaaccacactgaatcgggcaacaactccggcgtaccggttactgagctgaaaaattctccagatccgaatgataatagtcctggaaccggatctgagaacacgaacagagctgttaaaatcgctgaaccagtggacgaagaaccgaaccggatcggcggagaagacaacgacgagaagccggcaagagaggattcgggtagaggaagttgcgagagcgtggcgaaggaatcggatagagcagaaccaaaaagagagggaaatgactcgcctgagttagttgagtcaatggacgagtcgaaaggagaggaagatacgaaagaaacgagtgatgggcagagctcggcgagcttcccgagaaaggagacggtagaccaagaccaaccggataacaaagatcaatctctcaccgtcaataagatcttcgttgaatctcagccgttgagtgatttcatcgagattcttcagtctcaccccattggctctcacttttcgcgccggctcgaaacccaggtaaaaaaaattatgacattgtcagcaattcaaattctgtcatttttgtaatcaaaaataattttctacattatgtttgattctataataaacaatcctttatttaagataatctgccgatggttaatttttcctttaaatgaaaaatgttctactgtatttattttagtatcatgattaattcatttttcaaaaggcttgtgtcttaaagcctgagtcttatttgtttgattgtgaagttgcaggaaacatccgactactataggataataaggcaacacatagactttgagatgattcgaagtcgtgtggaagagggttactacaaaactgccaggaccaagttttttcgggatttactgctactaatcaacaatgtgagagttttctatggcgagccatcgcctgagtttaatgcagcaaaacagctttaccaactcatcaagaaacagatgagtttcaagattcctaaacaaaccttaccaccaccaaaagaggatgccttggtgacgtctaaggaggaagtcaaagtctcttctcttaaaccaacactttcagtgcctattatagcttgtcggaaacgtagttccttggctgttagatctccagcgtcagtcactgaaactttgaagaaaaagactagagtagttccaacagttgatgagaagcaagtttcagaagaggaggaagggagaccctctgataaagatgagaaacctattgtttctaagaagatggctagaggagcagcaccctcaacagctaaaaaagtagggagcagaaacgttaagaccagtttgaatgctggtatctctaatagaggccgatctccaaacggtagctctgtgctgaagaaaagtgttcaacaaaagaagggtatcaacaccagtggtggctcaaaaaagcaaagtgctgctagttttcttaagagaatgaaaggggtttcatcatctgaaacagtcgtagagacagtgaaggctgaatcctctaatggaaagagaggagctgaacagaggaaaagtaatagtaagagtgagaaagtggatgcagtaaaactgcctgctggtcagaaacgattaactgggaaaaggccaacaattgaaaagggtagtcctacaaagaaaaacagtggtgtcgcctctaaaagaggcactgcttctctgatggcaaagcgggacagtgaaactagtgaaaaggaaacaggttcttctactcgtccgaagaagcgttcaaagaggtgatgagttattgcaatacttaactatcttctatgggataaagagttttctaagaagtgtactaggcagtcatttaaaaaagagtattggaattgtttatacactactctaattccagatagcagcaaaatatgagtttagtagaccgtagaaagagccagagatctcaaacaaggttataagagcgttccaatgtagaatgtttcatgcatctgtcatcttcagcatcctactgcattggagattatgcgtcaacaacagcctttcccttatcaacttttctgatgacaggaatcccagtgctagttttgccaacctaacagaggttttattgagaaattttgtcagtgagagagtttagcattacaagagaatttgttggagctgttagcaagatacctcatgaacttgcttcttgttttgagttgtactggtttcgtggaagagagtttcgcctggtttaggagagcatttccatactggtaaatctggatctccctctggccatttcatatcctctgcctgaacctgcaaagagtttgagatcaggggtttcagctgctgacaaaaaaggggacgaatataaaacttgaagaagaggaagaacaatttgattttacatgtctgagatcaacccagttgcatgggtcctcataatccttattgctgaaagcactcaacaagtggtgcgtttcctgtagattcaaaactatatttcttagaagggctgagatctgacctgatgaacaacacacaagtaaacatgaagtgacttaccgtatttgcgtcatactttgtgatgaggaattcaatgtactcgtcttcgtcaggcatttgtatatggacccgtcttccaacaagagacccaggagaaacctggccccagctcgagtcaggtgaatcatcagaagtagaactcggttttgcctcttcgtcttgtatctttgcaggagctaaaacctttccatcttttatctttgcaggagctaaaaccctgtcttgctaagcaatcagaaagacatagaattaaagccagattgaattttttaggagttggaaaatgatgattatcaaaacctacaattttggcattgtcatccttgttcagtttgatacggattatcagaggttggccatctacgccagtaatttccggttcttcagcgacagtaagtttctgcatttccttctcatcagacgccaatgaaacattcctgagaaacagacacaaacttagagaagcaaggggagaagatcacatcgttgcagtagtaaaaccaatgattaagatacctcaattgcaggaccattggatcagcttcgattgcattgtgataagtctggtgagtcttgtactcaatcttcaattctttcaacagttcttgcatgatcacgatccttgactgaagaagagaagacatgaactcaagttccaagaagcgaatcaaatgcatatacagaacaagaacgattagattacgctggatattgcaggagattctgctttgaaggcatggagaacataatagtaagccctatcctggagcatgctgagtttcactttcttgtccaaggggctgaacaggatatcatcgtcacctttatagctcggcacagtctctgtgttcttgatcggtatatcagttgattcttcttcaacggaatcaagatcagaagaaaatccatcaccgttcatcaccgatcagtctggttccatcaatgggagagaaaacagaggaatccgaaactctagaaccctgattgctgaaatcgcaaaacccatgagaaagtgaagaagagacttacgagaggaagaatttggggcttgatctttgtggtccgacattgttgagaacagaggaatcggagagaagcgtcttgttgaagaagtttgagagaaaccctagagatagaaggatcttcaaaaacgttgcatgggtcgtcgataagagaagaagttacgaaagttttttttatgtgcttttcgagattttgaacgtaaaatagtgaaactatacttcttgtagaagaaggtacttcttgatcacttgacacgtcagcaattgaagagtgagtctgcggttaatttcaacatcatttactcaatactgtttggattggtgactggattagttacggattaaaactataatccaacggttgtggataatagtagtagagtttcaagaattaatacttggctagtgaaaaatagtcagtgtcattttattttttttggcattaaagtactgtcctttataactgcgctactaacaaattgttttagtaaaaactaaaat

SEQ ID NO: 30595 - DNA, 1015 bp, Arabidopsis thaliana landsberg
aagcccactgaggcagatactgctgcttaaaaacctcttttgtttccttattcgctgcttacatctgtgtgaattcagtctttgcatttcattatgtgttataaacagctgagagattttatggttcatgtgtgttattaacataattatgtcatattggaatgataactttttatgttttagtcagttaccattgaatagtggttaatatctcaaatcaatcggttaaaggatccatccattttagggttaaagtagagacgagagtggagaggtttacataaaacatcaaaacgctacttcacatatcatcattatcaaactcgtgtgataattaaaactcacaaacaataaaagagaatctcaaatgtgaacgttttacaaaaggcttttcttctttcttccttcatctcccttgtaagcttgcaggggacctgcaacctctctcgctgcctgcgtcgtcttccttttcacttgcctctaagcaaatgccattgttgttgcagacactgatctctgagcttgcgttgctgcttgttgctagtggagaagagtctgaaacattcatcggtctaccacgtgtatgtccagacctcacactgtacattgatgatgctggaatattcgtcattagtggtctcaggttccctggaatagttctacgtatatcctgttttcatcaaaacgtttgatcatcagttaaacgcaattgccaccacttgaggaagagagaagagagagatacataccatatgccttattgccatatcaagggacttcttggagagcgttcttccaaatcctgcactgtcgggtgatgaatactttgcagacaagttaccatgaggagaacccttgtcatctgatctgggtggagcaagtttccgcatgtttattactctctccaccatttttgttccgatcatcaccggactaacattgtcactggcttcggaatatacacgattaaccgcaggaacagagctaccactagagtacattggtgctcttcctc

SEQ ID NO: 30596 - DNA, 1615 bp, Arabidopsis thaliana landsberg
ctggaggtgtagtattgatggggttggtctatttaggttaaagcatgtaacttcgcctgtgtttaacatctcaagtggtgctccaccatctcggaaggctgctcctgatgattttctcaattctgaaggcgataaaaatgactatgaatggtaactttttgatcacaaactttcatgttgcgacgctatggttcattacttcagtaacatattcaccggtgatggtttgaattttcttagccaccttaagtgcaggcggtttaagtattctttgtgatagtatagttactgatttgctgtatcttaaccatgaggttctgaagtaatatatgtgtggtagttttgtttccttgaaattgtgttgtttcttcacattacatcattctgtataaggcatgtgtttaatctaatagactcgaatttggtgtcacaatttggaaccctttgtttgtgaggtgtgcgagtcttgcactgaattcttatcaagtttagaattttgcagcataaggtgttcatcattccagcatctctgtttacctcttcttagacattcatatactttcttgaacaatatatcatttatctgtttatcatttccagcctaacttcttcttgtctttcgaaggcttctgacccctccaggtacgcctctatttccatcgctggagatggaatcacataggactatgatgagtcagactggtgattcaaagagtcgcccggctacattgacttccagagtaagaatgttattgcttagtgttctgacctcttttatcaactcctggaatggatactagataaacaacctaatgtagtgcaaccagtattaaaataaagctctgctgttattgtttatatgttttgaatcgccactactagtttaacctgccgcatcagtctgtgacgtttacatttcaagtttcatgatttacactagtaaatcgcatttatcgttattgctatgtgggatgttgctctggattttttttagagtagcacattttcactacttcgttatggtaacctatgaattatctgtcgtagctggcaaattcctcaacagagtctgctgcaaggaaccatctaacatctagacaacaaacttcttctcctggattgagctcttccagtggagcaagtcgaagaccttcatcatctggaggacctggatcaagacctgccacacccactggaagatcatcaacactgacggcaaattcaaaatcctcaaggccttcaacacccacttcgcgagccactgtctcctcagctactcgaccttctttgactaactcgaggtccacagtatctgcaacgactaagcccacgcctatgagtaggtcaacaagtttatcatcatctaggctcacacctactgcatctaagccgactacctcaactgctagatctgctggttcagtaactagatctacccctagcaccaccacaaaatctgcaggtccttcaaggtccaccacacctctgtcaagatctactgccagatcttcaacaccaacttcaagacccacacttcctccatctaaaaccatatcaaggtcatctacaccaactcgccgtccaattgcttctgcaagtgctgcaactactacag

SEQ ID NO: 30597 - DNA, 3997 bp, Arabidopsis thaliana landsberg
taaaccggtataggtgtctaatgtagtccggatatatctcaaggttgcaatgtccaccgcctttaatccagagcggttcatacggttcctttgccattttccaaagcctgtttccgtgtaaccaattcaccacatcatcctctgttccctgtgtaacaatagacagtaagattggtaaagttttacggattcaaatagggccgaggctaaggacatggatatgagacagattttgcttacgtgtatgacaagaaccgggcatttcaccttcttgatcttgtttacgttctgcaattaaacattacaaatcagtaagaggatagtgttagaaccccaagaccggttaccttacaaattagctatagccacttctaaaccaattagctttcatattagccacagccacttctaaactggtaagcttccaccttagccactttcataacctatcttaactttcatcaatccataggacttatacgaaatgttgttcatgtaaaatactatccataagtaaaacacggttccaaaagaaactgttcttatttaactaaagtagcatggtattgtcattcacacttcctaaactaggacttgaagcacttaaatcgccaaaacaacaagcagcaacgagttttcataccgaataaatgtcacaacaaaacttgaacttgacatgacatagaacacgaagaccagagagaatgccgctatgaagaacgacacctctaagccgtggaagcttagaggcaaggtgcagcgttggaccgctgccaacagattgaccatacaagatcaaatcttcttgccctaccccataatccgtctgcaaacactcatacgccgcctctatatctgcatatgtatcgtactcactcggctacaaacacaacatacaaaaccacaattagtcaaatgaaaaccggagaaaattctcaatcccatcacctaaaaattcaatattcctagactctatgagattaatacagaacattccaacaacctatgaaaagatttctaggtaactttttcgatgaaattaagttattgggcttaaatctattaagcattttactagagaagatgcattttgacacaccttaccagtagaagctccatagcctgaataatcatacctggttcaatcacatataaagaagttcaggttcaagttcgttcatcattatcaacaaagagagaagtgttttctgattatttgtatgtataaacctcataatgttgacgcggagatgagctcgaagctcgatgaagagatcaaccatttggccgagatccgcggcattgccatgtgaataaagaagagtgaatctagagaaagggtgtttccaaaacgtggcaatgaccttgttgccagatttggtggtaagctgatgaacatccatgcttttttctggtgttatcccggtgaacataagctttccggtctcctcgtctttactcacgtcgtatgttggtggcggtgggaagaaagcgaactttgcagccatgtttgacgtcacattacccatatcaattagtattattgttcagcaaaagggtaaaagaaaaaaactttcaatgagaaagaaggagaaaacaaaaacaaaaacccaaaccccaaaatctctccctccctctctctttggatctaagaaaagaaaacaaagaaaatggttaaatttttgtgtttcgtgggtttatgtttaggggagaggaaggaaataaaatggaaggtgatggtggagaatatttggcgggagaaagaagttgagctgtttcattagcatctttaatatagattctgttatatatattaaactcagctacagatttcaactgtgaataaatttgatgctatatgattttcaccatgaaatgtgatatctcttcattccacaatcaaaattgcaagcagctacagattttagcatatcaacctcattttaacacaaccatctctctctcttttggcacaaacacttgaaacccttcttttacctcacatgaactttctcgggtcagtttggtgtctcattctcagctgtttccgggacttcttccacgatttctggagtgtgtaacaaagggattggactgttaccgtgttcactagtcgagctactgctattgatcacttcgctttccattggctttagagaaactttagggagtgtatctgcaggagcattaagtgaatgctcttctgaatgtttcggcttgttcagagctcgacaatgaggacagtagtaagtaatgtatgggaaatcctctttccgggcgagtcctgcatgttgagagaggaagagagacattgtacaattaagttatcaatggtattgcatctagtgtgtattagaagacaaaagacagagataatgtctcactcaccgttatgcatacggcagtttccacagatgagtgcatatgactgacttggatcttcgcctacaaggagagcagcaatgcgtgagatccagctaccatcatgagcagcatattcctgaggattataatgctcaaacaccatctgttggttttgttctgtgccggtgattctttcgcttgttccagaatggttagactcattatccgaatgatgaattggagtggtctcagcgctgttgcctcttgtatttgtctgttttcggttcctgagccctcccgagtgtttggcattgttctttcctgcggtgggctcaagttgggattcatctcctacaaatactttcaagcctgactcagcacccaacttggatgccagaacagttgcagcagccgcctttgcagctgggtcagggtcatacctctgatacaaaatagctcatgttataacaagttccagtctcaatagtgataaaacccacaataacaagtatccgttaagatataacagcaattcaattctttttaaagtttctgaacaaattgcaaatctaggctaccagtagaagaagtaattccagaactcaaaagtgcaggtcttcctgtcctttattagtatcatttccaattaagtcaagttgggaggcatcacactaagaatttcaactgtaacacttaagttctagagtcataaccaccctttatccaaacttacaatatagctttgcctaacacattgagccactagtttcacagttacaaagctagcgcctagcggaacttgaaaagcgaaaaagagagactctcaataaggataatccttgtataatggctgtactgtcctaaaggaattccaatacaaatttttgaatacctagctctttgctaaggttaaatttaaggtcatcttctaattcaacaaagacggataacttgcaacataaaacagaaatgaaaaatgatctaatcctacgacaaagctagaatcttttaagtgatctgtatctctatcagaactaggtaaagtagtgcaagcaaagaataacagcagcacacatcaaaacatgacaattaaaataatcaggaataccagaaacaccaatagaattcgaatgaactagcctcactcacacagaacaagttgtatcttacctgaataagttgctgtgtaatgtaataattggtcctttcctttaactcattaatctttcccaacatttctgcttgaagtttttccaaggtatgctgatctctgcggtcacctaaaccaaaccatttcacacacaacgacacggcttagacacaccaagcctaagacaaattcatgagcatataacagaagtaaatcacaagactcacacatcctccagaagccaacaagtgaagaatagagaagaaaggcaacagcaggtaaaagaaacattggcaagatcctgaaactcctcagtttccaatccaaatcctcatctctggtggtcatgattgcataactcactgcaattacctgttgtcaccaaaacatcaataactttcctactaacaataggcaacaaaggcatagacttggagactaacctcaaagaagacagagaaagcgatgagatttctaatgaag

SEQ ID NO: 30598 - DNA, 1528 bp, Arabidopsis thaliana landsberg
  unsure (1)..(1528): unsure at all n locations
cttcccaaatattgtcaatgtaaagaccaagctgtttctcgtgtgatctccgatcaataggagtaaaatcttggggataaaactcagccaaatctcataacttttaactgatcaaactcacgaaacaaatcagtagggcttaaagaagcaacacaaccaagtaattcagtgtttacctcatcgaaacgatcattaaactcctgaatttgcatatccaatacagtgtaaaaacactccacttgataatgatgcaagttggtcatgttacttttttttcttggctttcttggatcaacaaattctccatccataatgacaaactcaatgtcatgatccttacaaaaagaaaaaacttcattaagaaaagaatcccatccatcatctctgagcttgaataactgttgcttggtggatttcactagtgacatagcattcagaatgtcttggtctttcctttgtagagccactgataaactatttgtgagtccaagaataagcaacatcaactgtaagtagaacacaaagtcaaaggtattaaagtactttagaagtccattagcttgtcgtcttttgggactatcaggtccatcatcttcgatccactcaagcactttaatgataagagtgaataaatcaactaaccggagtaatgttgtgtagtgagtaccccaacgagtattatcgggtctctgtagtgaaagttcctgattcaatctttttcccgtcttaatttcaccttgattgattccttcctccagctttttccgaaattcatctcgaaccctatcctttctcttacaagaagctccaaccacatttatcaagacagaaatcatatcaaagaaatctccaattttgaaatnnnnnnnnnnnnnnnnnncgacgaccaactgaagctgatgcgcaaagcagtggatataatatgcagaactattttctctcaaaattagagatctcaacccattgaattcacctttcatattacatgcaccatcatagccttgtcctcttaactgttttatactcaatccaagtttagcaatcaatgaatcgatagcacatttcagatatgcagacaatgtttccttaacatggataagaccaataaatctttctttcactgtcccatgtttatcaacaaaacaaaaaaccgctgccatttgttctttatcagaaatatctgcagattcatccactatcaagcaaaatacatcatgatcaacttcttgaattatagatctaatcacttcttccgcaaagcaatgcactatatctttttgaattttgggacataccatctgattattttttggagcattctccaacacaactttacttacagcctcattttgccctgcagtatatttcacaagctctaagaaattccccctgttttctgaatccactgactcatcatggcctcgaaaagataatccttgtcgtactaaatatctacaacaataaattgaagcgttcaatctgattctgtattctcttttgactatgtcatcttgcttataaaaagcat

SEQ ID NO: 30599 - DNA, 2633 bp, Arabidopsis thaliana landsberg
atatcaaattttaggccaagcctacgatcttctcgctgactttccaaactctacgagccttctcgacatcgctagcttcttgagacagctgattctcaaatgaagccgaggtcttgttccagctccaatacactcccgacttcgtcaagcttggatcagccaccaccttcaacaaatcaatacataggttgagtacatagcaagaataataaactgaaagaatggtttcttgcgtcacaaacaacgttaggttttggttaattttctaacctgagcaagtcttttcccagcctctgactcggagacgtaaccttttgtgatgtacttctggaaaggagggaagagggtacggaaaagaggaatatgctctctgaacaaaccagtcgttgcaatacaaccggggtaaagggaagcaaaagttatgccggtgtcttcatggaaacgcctatgaaactcctgcattgtcaacatgttgcagactttgctatctttatacgcctttgcgccaacaaaatctcctccatctatcatcgccgagctgtttagcccgttcaacccgcctgctagtcccctcaaatcaccaagattagcctttggaggtacattaccagccaatgtattagtgtttcctgctcaataagaaacaaaacgaataagatttcagatttagggttcagagtaagtagtaagtacataaagcattcttcttatgaggagactacagaccggttatggatccaacaatgatgagacgttttgatggataatcggagttcttcaagtcatcaatcaacaatcttgaaagaagaaagtggcccaaatggtttatcccaacgctaagctcaaacccttcagcagtgaaagtaggttgattagccgttggctgatagactgcggcattgcagaccaacacatcgagaggcatctcagctcgcctgaagttatcaacaaactgcctcacgctgtccaaagacgccaagtccaaatgcatcacagtgtagctgtccttaggcatccctgcagattgagcggctctctcagccttgaggaagtctctgcacgccattatcacgtgccatttacctgtctcggctaatgcctttgccgttgctaaacctagccctgaagaagctcccgtgacaaccacgtttccttttctaagtgttttcttgcggtctaaggaagattttgtgactgatggagttgaagtcgcgattgcttgagctcgaataatcgctttattattcctcaagctctgttccctctacaaagtagaagcatttcaattgattagattattacatcattttccaagaaaaatactcataaaagattgtgtttggtaccttgcatctcaatgaggaagagacaaagtcagctttgctttgctccgaaagtgaaacaccgaacagactagactctttgaatgatgatgatgctgaagcatttaattttccctgcaaccaaaacatgcgaattaatctccgagacaggtcataaacaaaaaggaaacgattactaaaacaaagaaagagataataaaatacatctttgcggacagagaaagcagaggagaccaaagaagcagcttgaagggccattgtttcgtttaagacttaaagagtgtaatgtgaatgttatgcaaatgtctgtgcttgcgtgagtttatatagaagttgagacaagagaaaggtggtcccctcccatatgtgtttcctaggatatgtgtggataagattatctttagggaaagtttttgtcagtttcttttcttaaagccaatgataattcgagaattagattttctgtcagtagatattttaatgtataatttcatgggactccatctctttgtgtatgggaggattaacagaaagctagagccctagaggtatgaaacaaaattatactctgacttgttatggacactctgatctaaagataaaactgttcattgaaatgatgaattgacaaaaatacccaattattttacatgtaaagataaacctaaagacaattacaaaatgtgtatacaaaagtttaccatatattctctccttgaagagttataatatcagagacaaattctacaaacttcaagttgaatagcacagactttcatcgaagcaaactatattggtatatgaagtttctttttctgcctatttgaatctttcttaaaaataacattatatatatttgctagagatttgaattttagagataacaaatcagataaataaaagaagcgtggtaaaagaaaaaacgagagaagtcagtggatgaaccaaaccttctctcaatctatacacttttgacaggagatggttttactaagggaaaatttcactttgccttaggattttgatattgtaaaaccttctccttgcctcatagacgaactggaaatccaaaattctgaaatattctgatttcgcctcgtagactgccagtcacaatcaccatagaccacgccgaggcactcggttttgtgttaacctgtatgttagacatgtccacgctcacacgagggcttgttctggctcggttttttgcagccagcaagagtttttcttcaggccatgttgctgagactctatcgaagaagtatcggtttgtggcgcttgaaatga

SEQ ID NO: 30600 - DNA, 1722 bp, Arabidopsis thaliana landsberg
  unsure (1)..(1722): unsure at all n locations
gcaagaataacatttttattttcctgtgaatataatgaatacaattttattatattttaagttattttagtttgacggagtataaagtagtatacaaagtcgacgtacgacgataatgtacaaaacaaaagaaaaaatgagagctaactacaccaattatatgtatcgtatatccacgtataccaaccaacatatatatgacatggttaagcgacaacattntttacacatgtaactattataaatttttagtttatagcgtttacaaagacattatcataaaatttgattattacatgactgcataatttaacaaacatagaaccttattaaaatgcatgttccagtgcaatacatgtggattgatgttgaatgactctaaaagatattgttatgatacaacagtatctcaaaaaagattcagaccaaatattttattgtcttaattattattattatttttttttttctataaatccgatatttccccaaaagccaaaagggtgatgtgagttgttatacttgacatattttatatattttatttatataacctattttggatcgtttccaactataagatatggggttgataatttttgattgtacatgaagattttgtgtcctttgtattgtattctatagttgaacttggaccacgtgtaataacaccggagcacgcattttataagctttatgctagtatccatacgattaaattatagttcatcatcatttgttatactatatattgatgtcacacaataattcagatttaaatatggtaatgtgtttgtgaactatccaaaaaatttcaaagaaatataccaaaaatttaatagttaaaatctgaaaacaaagcatgtaatttaagctacaattgttattacatattgtaagggctacgcaattagttcttgacagttggttgactacataacacttgctgaaacctacgttttagcgttggatatctctctatatatttttggtcaatgtcgttggagattgaatcctagattaaatcatacaagaagaaaagcttcatgagaagaagaagatgtagaacagaggaagaagcatcggaggaagaagacgatgtcggagaagaagtcgtgaacaaggtcaacgacagaagcaaagtcaacaacataaaggagttgggctttgttgttttgtaataagtaattgggctaattgttttgttaggcccaaatgagtagaagtattgtgttgtgttgttagtctaagatagagtctatgttgtgtaagagtgaattaaggagttggaagttccaacatagtagagtggctgatgtaagtcttaggacaatgatgtggtctagagtctaagtgtgtgtagtgtagcaagtggagcaaaaccactatatgtatgtgtgtgtttatgttgtgtaagattatccaagatattaacaatgtagtcttaaaagtaaatgtgttcttgttctttctctctagaacaagtaaaccaaaaacagaacaagagatagagagaatgtgagaattacaacaattatacatatagttgttcctttggttgtttcttaggtgctacgtttttatgtgtcttcaagtcttcttgaggccatgtcttttgttagtgtaacactattgtgatcaagtattaaaatacatattattctccaacaaatggaccaaagacataggggtttaatttggttggggttcacggcaagcccg

SEQ ID NO: 30601 - DNA, 4562 bp, Arabidopsis thaliana landsberg
  unsure (1)..(4562): unsure at all n locations
attgatttaacatttattcttaaacaaaaataaatgcagtttcaagtataatcttagtatattatagagtgctaaatattttacgtttttattttttttcactctaaatattttacgttttttgtagccatttccgcatttatttttcactacagattttacttgggaaaaaaccgccatctatttataatttggacgtttaatacatgcaacattaactgcggttaaaagctaaccatggttgtttaggatatatataatatatcgtttcacatgttgacaaatggaatgtcttagttcagtggttgaacgttgctcgatttttgtttttaaacctgggttcgagttcacctcttcgtaattacataagttttttttttttttttttttcgatctcggatcgatagctagattgatcaaccattagatttggaacagaattttttttactctgtctttgctgaataagtcctggataataagcaaataataacataaattcgaccaaatatacaaaaacacaggtcttaaatatgttacataaaccacataacttaaaagttgttacagttgtttgagaaacacacaaagccagagagagctacaaaatcagataacagagttttcttaaaacacacactactagttggaacaagtgggtttagtgaccaaacacatcattgttcttcaccagttttaactacttttacactgaagataaatatatcaaagcttttttcacctcacggcgaagttaccttaatagagaatgagccaaagatgatttgcctgttcacagccaaagcggattggcaaaaaggaaaatcctttataccaaggcaagagttctttatctctctccgtttgactgtgaaacggtaaaggatcaggttttgaaattgcagcagccattatccattgctgctgctgctgctatccacttgctaggcattaccatgccaccaagagaatgaacgggagaacttaggaagtagttcatgctagtaacttctgatcccgacacatttaatccgttcgataagttcatggtcccgttttccggatgaacaacttcagaattctgagagttactttgctgaggcttaggctgagactgaatctgcatacttccatcacctttctttgcattggttccgctattttccaagttctgacttttagtgttcaagaatctcccaccggatcctctaggacgccgcaatgcatggagatggcgcgaatgatgcatatatggctgcaacatacataacaaaagcaaacacactaattcagtaataaaatctcatttgcacaaaagtatcaaactagtttctatatgttaccttgcggcatctactactcaatttcttctgatcaagaacagcagcagcctttgcgcgggattggcgtctccttatgattccatggtattgctttgagttcacatagatggtactatcttccgtttccatgtttagaggaagcattaccctgctctgagatccataggctgaaacaactccatagtattgttgttctccatagggatactttgtatagatctaaatgaccaaagtaaacagccaacaaacactaaatactcagaaacaaattaaaggaaactcatgataggcttattcattatatgtttttcaatgcggaaaagtttttaccggtggctgagaaaatccaagttccaagcaaggtgattgcattgagaaagtagctccatgaggctttggcacaagtcttggactctttacatcacctaatacatacatagtgaagattattccagatcagatcacaaacgcattcttagattcacaattacctacagaacaaataacatttttacaatccagaatttgaaccataaagatatctttttaaacatctttatatcttgtagaatcttagattctcttttcggacaatttagctcagttctgttcactctcagtcatacctataaataactagtaaaacatgtactagcactttccaaaaaaagccacttttgacaaattcagaaattttcactagaaccatctatttgagggcaaaagaagttaagagtttaccaagtgagaaagctaagtgcgttgcagagttgctctgtttatccacacgttgtcttgtctctccgacagatccgaccttaactccggcgaatgagtcagaatcgccggcgagactctccggagccaacggctgagatccaaaagcagtccaccaagaagtctgtggagcagagaagagaccttctctcacagtttgcatagccatctccaaattccaattacaaaaagtgaaaaatagatagtgcctagaagaataagaaagatatgttcctgtggaagataacaaaaaaaaaaaagtcaacaaagtaataataagagttggatgtgaaatctttgtcaaatttcaaacccaatttagaaaacttgtaagaaagaaaggaaagaactttgggattgggtattacgcaaaaccacacgaatgacaaaacccatatgtgaatcatcatcaagagacagacttgttgtctaaagtaagaaaaaaagattgtgtgaaacgagaagataagacgcaagaactgaaatctttttcacagactagagatccccaatagcaaacaaactccaaaaagaagtaaaataaaatcccaaatgttggtcaaaatcaaacacacgaaaacctatgtgaatctaaaagaataaagcaaagaaaaaaagagaaagaggttgagtaaaacttacacagatggagtgatagagtagagagtagagaagagcttcagattcctaggaagaggcagagaaaagcccaattgttaggaagccatctcggttccaaaacaagaaacagagattcattcacacacattagtatttagtagggagagagagaaagagaagagagagacgtactaatatatgaattacaaatgtagatgacaactatagctttatcaaccaatcaccttcaacttttatgctgctctgtttttttttttaattttctactttatttggagttggagatataaatgtaaaacaactaaaaataattggtctggtttttaactatagcgttggcttgacgtgctttgttttaaaaagctacaatgatcccacttaaatccatttttatttcatttttgatttttgatatttttccactaggtaagagtagtgcttggcttgtcaattgcatcgtttattattatgattgtggtccttgtaagcttttaaattaaaaatgtgcatatacgtcatatggaaaaaggatcaccactcaaaaataataaaataattaaaactaaaataaagtaacaatctgacatcttcaacaatgacatgccaatatttgctattataagctcgtgacttattccctaccaaaacattatataaagtctgccagaatcaacctttgtataattctgtaaatagaccaaacatattttcgcaatagcatttccacttgttgaggatgttattcttaactaggttttcaaatgtttttcacacatttgtccttttgtttcctcttttgttatgtttctttaaatagttctagttattttgtgaacccgaccgtacacgtgtttatgattgaaattagacaactaatagttaagctctatagatatcattccggagacattataatacatgttatatatttgtaagagattgcttttgcttttagtgttggacttgattattatggattagcttcctttacctaatttaagaatttggtttatattagatgttgaattgaacttaactgaattaaatctaagagaaataaaataaggttaaattgaaaaatagaatattggtttacgggcttgacaaagaaaaaaaaagggtttacgttagtgcttgcttttgtttatacgtcgtgcactggtgcttaagcatatcccactagcagcttttctttcatccgaaacacaataattaactgaattatgcactatagtacagcagtacgtatactatcttctaacaaaaatatctactttcactgacatatagaaagctcagttctagtcttagtttattgctttatcgtaaatatatatctaaagcacaatctttttatggatttgtgatcaacgattttaatgtagttggcaaaagaacaacataattaaatagcttattttcaaataatgtagggaatatagctagactgcaaaatgcgaatcataagactcaaagcaaaactagaaatgttttatggtcaagatatgaatttgtagtcatcgatcgatatagtacttttcatgaatgtacgttttgctaaacactttatcaataaataaaaagtatgttttggtctaaagcattaaagagatatcaaagcatgttatatatcaacattaaaaggtcaacctgccaccaaaggtagatgaggatgcaagatgatagtcaacgtacgatgggtagatctattgttttgtacttgattgatngtgagctacattccacaatcaaaatatttctacagatgaagaactttcaacttgggttactactgcatat

SEQ ID NO: 30602 - DNA, 799 bp, Arabidopsis thaliana landsberg
accgaacttccgaccacacgccacccgatctcagcagaagctttcaaatactgcatcatgttttttcagtacctttgttccattacttggagtgatccagcgcttgctttactcacaactgcacttaatggagctgagtttttagcgcataccacaacacccgtggctccaaaaaagtaagcagatcttatgatcgcgcctaagttctgtggatcagtgacctcatcaagagctacccagagagaatatttctcttcctctgatgaaatcggatctagttctttcactttcaccaattctaatggagaagcatcaagcaccaatccttgatgcggtctgttatcagcgaccatgttaagatcatgcttcgaagtttccttgatgtttaacccaagtttttcagagattttcaaaactctctcgaagcctttcttgtctttcttcttcctattgttactgctcaaatctaaaccttcttgaacatagagagcatagaactcttgtcttccaacagagagtgcaagcaacactggacttactccataaaccactttaccttccatcctaagcacactggactcagtcgcctcttgccatgtcttcctaccccatctctcttgcctattccatgatcgataagctgcattgtcacgcccttgatctcttacatcatacctattgaatctatttttgatctcagaccccctagtattatctggttcttcttcaacgattccatcaccatcttcaggggcatgaatcattgtttcctcttttgcttcttcagtgattcttatca

SEQ ID NO: 30603 - DNA, 1043 bp, Arabidopsis thaliana landsberg
  unsure (1)..(1043): unsure at all n locations
atcattgtcacattaagcattatatgttcatagaaattcccacaccaatgtggagtacttaaagatgtggggatcggatcatagaccaattctagcatctatacaatcaagtccggacgagtttcgagaaaatttatgtttgataaaagatggattggaaaaccaggacttaaagaagcagtgttagaaggatggagcggagaaggtttgagggaagaccgccccattatgaaaaaaatccagaactgcaaaagagttatctccatatggaagaaatcaacccgaacaaattcggaaatgcttattaaagaactccatgataagattgaggaaaattatgctgatgatagtgcttctctagaagagcttcgagatcttaagaaaagattgggagaagcttatacaaaagaagaaattttttggtaccaaaagattcgccaaaactggctggcattaggagataaaaatcaaaattttttcatgcctcacgaaacagagaaaggcaaaaaacaagattttaggcatcttagacgataacggtgtatgggtcgataatgaagaagatatcgagagagttgctgtggattattttgaaaatcttttctcatccgcaaacacgatagatccttccatagttcttagagatatctcnccgtccgtttcctcaacaatgaatgagtttctagtaaaagaaatcaccgaagaggaagttaaacgcgccttattctccctaaacccgacaaaagctccgagtcaggatgggatgactgctttatttttccaacgtttttgggaaataataaaaggtgatctcattaatatggtgaagaacttcttcagctccggtatctttgatgaaaagctgaacgagaccaatatttgtctaattttaaaagtggaaagaccgcgggaaatgtcaggtctccggcctattagcttatgtaatgtaagctataagatcatctcaaaaatattgagaataagacttaaaaaatttctttcggaattaatctccgagacacaatctgcggttgttcaggaaa

SEQ ID NO: 30604 - DNA, 3855 bp, Arabidopsis thaliana landsberg
ctacaagattaggtgagcaatctatcatagagaagaaatgattaaaataagtgtatggcataatagattcgtacattttggtatgttcctcacgtgtccgagcataaagcttatgaacaaatctcgaccactagaagtctagaactaattctaatctagtttaccatacacattaattatttcaaatttagtgcacatgattattttatattggcatcactaaaatgtctccaagtctgaataaatcgatttatattggtttgattgttatcatgaatctttttcacaatcactttgcctagtttcggatcgggcctaaaagccaacggcccaacgtttttaaaaacacatgcgtttttaaaatgacacgtcagttacgtatcgggcctaaatgccaatggcccaacgtcatggaaagtaggaactaaacgacacgcatgtttaaattcgaaggttttaacggcaagcttttcgcacccatcccttttcttcccgtctacaaaaattcgtcgaccattgcatttttcagttttgaaactcgaaagagatggagggaaaattcgctatttcagaatcgactaatttgcttcaaaggatcaaaggtatcagaaaatcccaaaaatttccgaatcatattgagtaatttgtcctctaatctatgtcgaaatttctagtcgatgacttcgctggctcttccgttgttcatcactatgtttcggttttttgagcagattttactcaatcggtcgttgtagatctggctgaaggaagatctccaaaaatttccatcaatcaattcaggaactattgcatgaatccagaagctgattggtttgtctctcttcgatctcgattattcaattttgttttcactttctttgattgaagaatcagacgtgtttggtctttggttcgagacatttttgaaggatttaagcacaacgtcaacgagtattgaaaactaagacctcatgaatttaccattttattctgctgtctatagcttatgcagctctgataaaccaaagggtcaggaaattttcactcttaagaaggaaccacaaacctacagaatcggtgagtcaggtttcagataattctacaagtacattagtgttatcttaatatagcatcacattgcggtgtttttactttcagatatgttgctaagagtattgttgatagtccaacaacttctgcaagaaaatagacatgcttcgaaaagagatatctactacatgcatccatcagctttcaaaggtgaatttggaagcaacgtataatgttttagttatgtttttcttctaaacgaatacgtattgagatttttatacggatattagttatgcatccctctttgttgtgttcttggccttctagtaacactgttttcgtctacttcacagcacaatccattgtggaccgtgcaattggtgatatatgcattctttttcagtgtagtcggtacaacttgaatgtggttagtactttaatactttcaccttcaattttccttctgaagagttattataagctgcgattgaagatgtgattactttttcattcatgtgatattttgcaggtttctgttggaaacgggtgggtgctcttgataacgagtgcaatgcttctatcttgaggcatgtccttattttaagatccacctcattattcttttgtgttgtaggttggtgatgggttggttaaaatttagggaagctggaaggaaatttgattgtttaaacagcttgaacactgtaagaatttgaacataagattcactttttatattggcatcaggaagtataactctgcaagtgatttcatttcaggcatatcccgttcctgttcttgtagaggaagtcgaaggtacatatatttgcaatcattttaagtgatgctttatgctctttagagaagtcaaatccttatctcagctgatatcaggaagtataagattcactatctatgttggcatcaggaactataattggatgtcattttcctgcttgcagatattgttagcttagctgagtacatactggttgtggaaaaagaaacaggtaagaaagacctcttatttatgtagtaactaggaagatggttttcgttcttcatgactaaatcactttcatccatggtttatagtattccagcgtttagcaaatgacatgttttgcaagacgaaccgctgcattgttatcacagtaagaaatctgcttcattcttactgatttcagttttgactagttttcatttccattttatgtttgacatcaaagttacgattgtttttggcagggaagaggatatccagatgtctcaacaagaaggtacataacttaatcccaggttcctggaatactattttatcagacattatcttctattgattaatatatcagcgaataacacagattctttccaggttcttgcgactcctgatggagaagttgcatctacctgtgcattgtctagtcgactgtgatccatatggctttgagatcctagccacataccgttttggctccatggttagattctgttacaaaatatagatgactgaactcggaaaatttcaccgcttgcattgtttttgttgatagtgataatgtgatatggcactgacccatttcattttgaaccattttccttatgtcacttgttttctttctgtaagcaaatggcctatgatattgaatcattacgagcaccagatatgaaatggttgggagcttttccttcagactctgaggtatatagtgttcccaaacagtgtcttttgccactgacagaagaaggtaagagatcattaaacaccttatcgccttaaatctttagattttcctatttttcactgcttccttttttgagattgtaacaacttccccggacagataagaaaagaactgaagcaatgttgcttagatgctacctaaagcgtgaaatgccacaatggaggtatgaaaaacttccctgacttttttatatttacatttcaaccaaatgacaaaaactagtcttgatcaaaacgattttggtcgtctaaggttggaacttgaaacgatgttgaaaagaggggtcaagtttgagatcgaagcactctcagttcactcactgtcctttttgtcagaggtatatattccttctaagattcgtcgtgaagtaagctctccttgagcttcatacgagataactagtctccaactcaaggtaatgctcattgttttttttatgactctttctaagctttttagtgcaaaccaaatgcattggtagaatggacaaatgaacatagttttaatggaaaaatcataaatatacagattataaaaaataattctcagtttttaatttttaataatacaaagtacattcactaatgactaatgagtaataagtttgaaattttgaataatacaaaagtaatttagggtccatttgctttatattgttccaaacctaatttgaagtattaaagccgttcccctgactaaaacccttggaccactccgatccaaaaaaaggaggagaaaacccttggcatacagctaaaaacgaggtcggctctctctggcttcctccttcggggcaccttcagcttcagcacccacacgaatcgccgttttttctccgccgttaccgttgttgcagccacaccctggccacccaaacggtccttaatcaccctggtaaatgacgaacgcgaccccaaattcatcacggagaagtccaagaaggcctgccaagcagagtggttccggaggaatatagctgcctatgagagaaccgttcgccgtctcgccgcagccaagaagttggagtgggtcgaggagatcctggaggagcagaaca

SEQ ID NO: 30605 - DNA, 2178 bp, Arabidopsis thaliana landsberg
  unsure (1)..(2178): unsure at all n locations
aaccttgcgagaagaaaatgtcccaaatggttcgtcgcaacactaagctcaaacccttcagcactgtaagtaggctctttagctgtcgggaaataaaccgcagcattgcagaccaaaacatcgagaggcgtctctgttctcctgaaattatcaacaaactgtctcacgctgtccaacgaggctaagtctaaatgcatcactgtgtagctgtctttaggcatccctacggatttagcagctctctcggctttaaggaagtctctgcacgccattatcacgttccatttccctgtctcagctagagctttagccgtggctagacctaacccagacgaggctccagtgaccaccacatttcctttcctcaacgttttcttgccgtccacggattttgtaactgtagggcttgaagtcgcagcggtttgggctcgaattgctagattccttaagctctgttctctctgcataatcaattaaccatttactaaccattcgcaaatactaatctacactgtaatggtagaaatgtagatttgttctgtaccttgaatcttaacgaggaagatccatgttcggatttgatttggtcggtaatggaggcaccaaaaagactcgagtccttgaaagatgatgaagaagcattcaacttcgcatctttgcgaacagagaaagcagaggagaccaaagaagcagcttgaagggccattgttggtactcgaacaaagagagagtgtgattgctgaagaaaactatcgtagcggatcttttgcgaaagagagtatgtgcgtttatgtactagcaaatgagatattcggacaaaggaagattggtccccacagaggtcaccaaagatgtgtggatagcattatcttgacctaagtatctgccaggtcgtcgtttaatatccaatgagaatttgagaattagatttccttctccttagatattttattttaatgtctttaaactatttttttgggttaacaaatggaacagttgcaataaagggatggtgattgctgattggtgttgatgggattccataccctttggcatgggagaaggagatagatagagctagttgcttgctactagttgttatggacgttctcatgtttggataagtttctccagtaataaacaattgttactctgtcaaaagtatgcattatacgaatttgaatttacgcattcacgagaatagctcaaaccttattcaatgaataagagcattatgtcatatgtcacaaaatcgtcaaattacatccactctttttaaaacaacatttcaactcgatctaataaccatacaaataaatctacaaatctcatgtgtaccatcactttcaaataattttgtcatagttgtaacatttcatcatagttgtacatagaaaacccacctcaaaatatgatattagcatatcaaatagcacatttagagagaaaaaaaataaaacttatttgttggttaagaacctctagtaaggtgaaagagaggcctcagcagcagagaaatagaagaaatagtagaactgagagacaatggcgttgaagaagacgaatgaggcgcctgctgcaaagacgcctttacgtagagtttgannnnnnnnnnnnnnnnnnnnnnnnnnnntcctgtactttgtgtggtatgcattctctaccgatccagctaatagacatatctccgctatcaagaagaacatcctttttttcgccaacaaaacaacattcaagttgtaaaaatattagcacaatgtcggttgtttaataagcacgtttagcttcataacggattaagagacgcatgttagatttgaattattaactgtgcattgaaaagagaatgaaaatgtgtaagctgataataagatttactgcgattttgataccatgatagattaatgataattctagttctataaactaagatctattgtaaatgtttgattgtgagttttgaatcatctttgaacgaaataaaaacgccagatatgtctaagctagcttaagctagggatatatatgtgatgtactaattgagttataataacaaaccagctaacaatgaagagaatgagggcaagagcgcgtgaaccgccaggcttgagaggctttccacaacagaagcaacggctaacgagcatgataaggatttgactagccactgagaacaaa

SEQ ID NO: 30606 - DNA, 1261 bp, Arabidopsis thaliana landsberg
  unsure (1)..(1261): unsure at all n locations
aatatgcataagtataggatcctgaataaatagttgagatttcaagtcaatagttttgctcacttacctgcaagatattgttaccaaactggaactgctctgtcataacgcgaagagtgctttgagagacattgtaactagaattcatgcatgggtaagctggagttattattggcataaggtgatagcggtcgcgatgattcttacgacggtcccagacaggaaatccaagctcatcctcttctattgcacaaagcatgactgggttcggccaccgccattgagtatatactctaaaaaaacgagaaaccagcatactaggaattgcatttggataaagctggcagacacgagcaaccaaaagtgcccagtttacaccgccaagaaatccagtcacctgcccaatatgagaaatatgacaagagcttagacatgaaagttttcaataaatacgaatttcagaaagctatgatcttacatttgaatacaccccacgcttcttagcccagtacttcaggcatcttaaggttgtccggaagtgctacaattgcacataagataagagaaggtaaccatagttcattcatatgttaacataatgactggcattctgtgagtttacctcaaaatttggaacgagtttaagaatctgatcagcaactctacaaccattaagacttcgaacggttggctcatcaacttcacacagcacagaagagctggagatatccagatcctgtcgataaaccaaatccatgaaaacaagaaatttgattcagcaagagattgtaatctaccatgacagctcacgggctcagttttcatataaaaatcaaaaccgatgcaccaaaatagccagcaaacttttcagatctctctctcaagccagaaactactaaaataaatttgtttactatataagccattgaggatgagtaatacactatctgtctccatcaacatgcaaacaagcacaacatatagcataatatatacaagctaatataaatttatcagaccctacagcttcagcaaaaacaaagaaagatacaataaattcacnnnnnnnnnnnnnnnnnnnnnctaaaagtgatatgctagcatagagcagatcaatcggtattccttgaaacttaaatttcatgaccggaacatgggcctgtggtacaggatgtagcccagccccttcttccatctcaaccaatacatcaagcaaaattattaaagggtccgtcctgtacatagtcagtgttaagagttt

SEQ ID NO: 30607 - DNA, 1215 bp, Arabidopsis thaliana landsberg
agggactcgaggtaattaactaatcatcacactagtgtttatatgagctaggttcttgatacaaatgagctgagttttttacaatggtgtcatcatatatgtttacgaaatcttatgtggttacacttactttattacaaatatattcaaattcatgctggtgaaaatttaaaaatcattttgtaaaattataataaaaagtgggcaatctcaacacaaacacacacacgaatacaaaatataaacatgtgtagtctatgtcgatatgtgtgtgtgttggcatgtataattattttaatgattacgtcactgttaataatacaaatgtagaatgaagatggagaaaatatggatgctgaagcagtgaaacaggcagtgacagatgcaatcaggagctggggtgaaatcaatgatccacagaactagattgacccacttttcattttttttttatatataatttatttcttattatacaaaatataaggaaataacacagtttctatagtatttctgcttcttcttttttctttttcttctgtccattttgtagtccagaatttccccgtgaaaatggataatgaagaaaaatcaattgtatgtttatttatttcacgtaagcaatagaaaatacgtttttaaggtacatcacctaacatatcaagttatcaactgagatagttataattttgttcattttaaattagatcagaaataaataaaaaaagctgagtgtagcagagaactaaaacttattactattttggatttgatcagaagatattagagaaaattgtttcctacaacagaagaagacaagcatttttgttcacgtgagcaaaataactccagaaacccgggaaagtaaaacgtacaaatacatccgttctacacattcgtcccacgattgatactttacttaagcacaactaagtgtacgtgatcatctgattttacatggcgtaagattatgattattaacaagacttttagagagaaaaaattagggtttataaagccaaactggattcttctaacaacatttcttcaatatgtgttgtcataaagtcagagacagcatctttaggattttatcctagagaatatctgcaagctcgaggacattgaatgcatttgatgaattcatggaggcaatgagctggttactgcagagttcttggagggacggaatcttgtatttgtctgcagctatgt

SEQ ID NO: 30608 - DNA, 2897 bp, Arabidopsis thaliana landsberg
  unsure (1)..(2897): unsure at all n locations
atgacgctgcctttttctttgagtgctctgaccaccgactattttgatctataattaaatgaaaatacaagaaaaactcataaacattagtatttgttgtctttttgataaaagctaaaaatatatattttgcaattgccattttctattgcgattcttagcgtaatagaatgggttgtatgtgaaagcaacaaccaaagttagacccatcctgaatatatcattcctctgatacggtctctttaactttgtgggtttttttttttttccttgaatagcttttgttttatatattattggatttctcaactttatttatccactttgaattgataactacaactctacaagctacagccatcctaacgaaaactgaaatatcttattctccttttaaagtgaaacgttgttctcgttcaccatcaagaaggataatatatacaacaagatcaagataagtaatactagtgaaacggtttctgtaatgacattagaaaaaccgagacaccaaaaaacgtgaaaactttaacagagattcggttattagtgcgaagttcgatatttgatcaaaatcaacacatttgtaacgtctagatggtgagtaaacagcagcacacaatgacacacaaacaaaaaaaacactaatccattaaacaacaattgatcctaccgtcaacctggtgggctgagatgggctgttaggagataataaatataggcctggataaatcattttttaagtactggtgcaataagtaagttgtcttcactttgagttcaagttttgttcatactgaagcttttttctttttcttttcacaatcctactatatatatacgtttttaagtaagattcaccgtatatatttattttctttggtagggaaagattcagcgtataataataattagcagtggtcaacagggtaaaaaacaacagtaagtagatttgtaaaccgggattaagaatatagatttcaatgataggaaacagagaagaaagcataaaataaggatagaagacaagagaagctataggtacaccaaactctccaatctaaaagaagaatccaaagaaagctgggccaaagagaatccaatgggttataatatggctcatcactaagtcagtcatgtaattaagattatgtatatatatatggacaaatttgtatgcaactattttcatctatatttaaattccttatcatttggtcgattgataatgcttacgtaaataatgtcttgttctggatatttccgtttgtgtctctatattgtcccggtggttgaatgttctactcctagacataaactagaaaataatcatctaatgtataatttaaaaaataaatgattattatactggtaaattttttaaattaatgagctttgttagtaaaaaatctcaacttaattaatcaaaaaatcatctaatgtaaattattcttttctgtaatatatatatatatataattcaagtattagaatatttaaattttgtgagtattaatctaattttcctatcatctaatgacaataaataaaatgtatctatatttgtgtgaatatggactttttggtatttagatagactgcttctgcttggtctcgatacttgacttagggtcgcacatgcaaacctcattattttcttccataatgttgacaattaaaaaaattaccgaaacgaaaacactttccggaaaaaacgatgaggcgttatatcatttaaagaaaaaacgacgatactaattaaataaacaaaagttccgataatttttacgtataggttacgaagacaatgacttgaatagaattgtgaagcaagtataaatttcaagtcttggctgaaaaattaaagtaataatttgtgtattagtgtaaaaaaaaaagtcacagaattaagtagaagagctaattatttacacgttccgacaaaacactactacgcccncgactacgatacggcatgagtcatgaccacatattatatttttctttatcttcatgtttttgtcgaccatggtcacatttcattgtttggcctggttattcgacagagatcaattttattggcaattaatgagtcagattagatcatattaaaatctaagtgcgcccgtggaacatgggcggcggacaccgaccacctacaaattctactgtttaaacgacacgtggaaactatttattttctttttgggtcgccgctccttaacttataagtcctgactggcccaacaattttttttttctttttggtttttcttaaacgtttcttattgaattagatgatagggattgcaaaagacggtgaagctaatactcttctatagaataattgagaaaaatataacctagaatgtgtcagaaaagttagatcgcaaccaaaatttatcaatcaacggaatgtcagttaatcggtcaggaaaagaggcaattaaaagtgtttatttattttgccacaagtgctctttatcgcatttttaaaaagttgtataccaccattttgactgttgacccaaaaatataacacaaattggactaaaaaagcataaggaaaaaacttttcggtgtaaacaaaatacataacttgaagaatggatattgaaaagaaaaaagtaattcagtttcttgaaaagtaccaaccaacgactataaaaaaaaactaacaatctacttcattgatacgatcaaactagctgttaatatttgtatcaagtcgattgcatccagacatgttatttccataaaataaaatagcaacggctctctccaactataaatcaaataacatttagattatggtaatgtaaatattcagatatggaagtagccgtttaaccgtatgtgaaatctcaaacggtcaatttccaaattaggaactaaaataa

SEQ ID NO: 30609 - DNA, 4193 bp, Arabidopsis thaliana landsberg
agatttgcgattagaatgtaagatttaccgaagtatgtgaatttattattattatttggtgcaaaagggaatgggttattaaaaaccagtttctgtatgttcaaaaagacgaaatcgctctactaagatatatggacttagaatgatgacgtaagattcaactgcggatgaaatgcgatgcggttctaatagtaatgaaaaaatatatatacacatatatgtagatatttgatatctcatctgtcttggctaaggacgataaaaagagagaaacatggaagtgagacatggagcgttgtctactgctaatgagaatgaggtcatcatagcttctgccatttcatcactctcgtcttgtcaaatcaacgccattcattatcatcatgattcatacgcatcccatgcatggcagacataagaatcaactctctttcttgatgacttatttagataatctttgttttaacatgtcgacaccatgctttatgatgaaatttacggaacatggacacattaatattaacattacattaatttacgtgtcaatgagagatatataaaacgtttaggaacaactaataatgtggggtaagaatggcagcaatgtcattatgtaatatctacgactagtgacctacgtataagcacatcaaagtactctaattaagttttttaatcaaccgacgtcgacaaaaaaatattgtgtcccgatatgcattcctaaaaccacacaagttcatatgtatatatactaaaaaatttccggaaggtagattatataaacattgtaatgtgaacctgttgattcatcagaagtaacatcggtctaaatatcggtcggttaaatatgagtcacatattattgtacgtgggtttgagtcacatcgatgttcataaaaagattttgatttactcttaccaaattgtaatatgattcgttaggtcttaaactccacaacttgaacaaaagtatctttacatactttccactcaagatagaactaaaaactaaaaaatagtagggaagtgtgaagtgtgcacactgcacacgattgtacacgagtacggtggttatatagagtttgattgattcaaaaagatgatttgtgattttacgtacatgtataatgtattatcagtggatgatttcaattcaaatctagaaaatttttgaaactgtagatttcttactcaagtaaagttacaagcatacatgctagaatcattgttctcatttgccctgcatgcttcctttgatcacgtgttattagttcaccatgaatctacgacattatacagaaattattcaaatgatagaatgacacgttccagatccgatgatcccatatctaaatatgaaaaatgtaacgtttcaatataaaaacaggaatgaaaaacagaaaaatcttttttatttttttttggccagaatgagaaaatctttatcacacgaaactgattatctaaagcattccaacagaatacatcattcaataatctcatttactcatacgcgtgaaatctcactttggattaaggtgtcaaaactcaaaagataatcttaattcacaagactgcacaccggttatcaaacgtttttaatcgtttccaaagtaaatatttatttctcttttggtggatgattttctccaataatttgaaaaaaataactgattgatggatcatggatgcatatatatactgaaaatcttgcacaattattagttatatatttccatatttggtttcatatgttttagacacagcaatatctttgcgtgtgcgtaattcacaaaattttaagagatcagtaatttttttaaggcatcattttcaacaagaaagaaagagacagacagctatattgtaaactaatataggatgattgcataatcatttggacaaagggaaccagagagattaaactaaacttaagagatataagacagataggtcgaggttgttccacagacacagtactcaagatcggattacgtgcttaatgtcccctaatcactatttggattagattagagattcttgtgctttcttatgtctacagttatatatctaactgaccgaccatcactctctactcccgatgcgagcttcttctaccttccacggagctgtcaaaacgggctaactaaaaccggcaagccaaaccaacctgtcccgctcaagaatatgaaattttccagaaaattaaaaatgagaagaaaagaaagaaaaaccttttgaaacccgtcttgtggatatttttttttatataataaaattcaaatgagttgaatgaaacactgagaaagagcaaaacagtaacacacgcacacttgagagaatgaaacaatgacagatcgatttataacaaatttgaatccgtaaagaaatgaaaaatcagaagattgaacaagcaaatgttttcgagatcactggctgcgcggcgtacggctgctctctgcatttctaatcggatagaaatatggatgcgcctgtaaaaatccatcatattctctactatcacttatctgtaattataagagaaaatctttagaaagatattaaagaaaaattgttgcttaccattgcttctttagctgttggcctttcttggtgatcatatctcagcaacttgtccacaaaatcaacagccttcattaaccaaaaagtatatgaaaacaaatgagtcatgttcgtccaaaaaatccggtgttttggtcttaacatgaaggcttcataattgtatagagaaaagttaagtgttgtacctcaggaactgctaagtgctggttttcagaattgatgaactttgtccatggcttccggctatgtctatataaaatcaagagtgcataatttaatgttctgaaatgataaggcgcaaaactggagtttttagagtttttcataactttttaaaccggattacctgcccacgagggatgttagattagggtccaactctatacggtatttgtttaggtaggcgttgagttcatctgtgccaagcacctgccatagttataaatacatagaatcgtatttttagctataacttggaggaatgtaaaatctgttcagaggagacgagacatgatgaaagcttttgtaatgttaccttcgcaattttgaccaattgatcatagttgtcatggccataaaagaacggctccttgcggaatatctgcaaacagtagagtatacaatattcatcacttaactaacttaaggaatggtaaaataaccaaaatgtactgtcgaattcttgtcattccattacagcttaaaccaagttaactaaattctagcttaaaacgcttaccattccagcaaacatacacccaagactccataggtctaaggaataatcatagtcctgtaaatccaccagcagctctggacccttaaagtacctgctcatcaaatatgaagtgagaaatgataatagtatacatcagctagacgaagttagataatatgtttcaactaatctcaagagctcaatgcatgcaatcttcaacatttcttatctagactctctatgagcagaaatttagcaactgcaacaaatagaatcttgcagaggagagattagcagatagccaaaaggaactaccttgaagcaacacggacattgtattctttcccaggatgatagaattctgccaaaccccagtcaattaaacgaagttttcgctgctcgtgatcaatcatgacattatgtggtttcacatctctgtgcatgattccacgtgaatggcagaaatccaacgcctgcataaatgttaaaaagaaacaacaaacagcatcagaaacgaattcgtaccctttataactgaaggctagtggattcaaaagtcaagtaaggtaaacaacagtgtatgacgctatacatctatgatatatctaccgattacttttgccaattgccaaagccgcaaagaaaatcatggtctacaattcaggaaactgaataattacctttagaagttcaaaaatgtaatatcgaacatcatagtctgagagagttggatagagaactttgaaatctttattgttcacatgttcaaatatcaagctgggcgtcttagactgctgatctctaacaatgtcgagcaattttacaatattaggcccaccgcagaggttctgcagaatcttaatctctctcttaatctgcgtcaaggagaagc

SEQ ID NO: 30610 - DNA, 3819 bp, Arabidopsis thaliana landsberg
  unsure (1)..(3819): unsure at all n locations
ggtttctcgtgatgggttttgaatgtgtttgttctctggtgcagatgttcttttctaacttcaaggatttggttgaacaagaagtgacggttaagctgaagaatgatttagccataagaggaactcttcactcagttgatcagtatctgaatatcaagctcgagaacactagggttgttgaccaggacaagtaccctcacatggtaaattttctttcttttaagcgatttctctaagaattgggaatttagggtttattggagcagcctattgttttttttttgttcacataggcaaatattttctttgttgtgtgtgcttgaagtgctcttaagtgtttgacattatactggaattgatctcactcgctagtttcttgctatacttctttgtctcgtattgtaaaatatcacttatgaactgattgaaagcttaatccttggctcttgcaaatgtgtttaagccttcactcttttctttttccttgctttcatttactgtgaccaagcttgagaagctctaacgtgatattgattagatttacagacgcaaagggatgatttgaagtgattagtggttctggttcacatatttgattgagattgctgcttttgtactgcaatttgtcaagtctactcaggattacaaaagatttgcaatatgtttgcatgaccaatttcaatgcatttaggttttatggcgtttatattgttatatctttggcactgtatttctttatcttgtcagtgtcacactttagaaaccttgtcaaatagtacaatttcgctagaatcctcccgaagatgtttttagctgacggatttgtgtgtttgttctgtgtagctttcagtgagaaactgtttcatcagaggatctgtggtaaggtacgtgcagttacctaaagatggagtcgatgttgatttgcttcacgacgcagctagaagagaagctaggggtggctgattctgaaatatctttgtatctccaaaacttgaatacttttcattcggcgtaatggctttataatgaatatttccctgatgtagagccaatggtatggccatgaatcttgttccattttattaacaatggataatttaatttcttttcctcgttcaaatgaaaagcttattaaagcctacttagaaacaccttcactcttgtcaggctgtcactacttaagtttttccctttcttagatgaagcaagcagaggaaaaacatatagactcagtaagaaggaacttatataaagtaatatgagttcttgtttgcatagcagcaataggaccttaactcttgtcattaatttagtttcttatttctgagatgaagcaaacagaggaaaaacatagactcatgaataaaaataggagtaattttctgcataggtagtgtaacgcttcataggatttgcatccatgtacggtctggtttgccaataggggaaaggaccagctgcagccatatacggatatgctgcagccataggcggatattgtgaaatgtgaacaccatcgaacattctgggtcgaggcatggattggtatggatcaattggaccaccacaaggtccacaaccaccatatggtccatgcattgcccccatcgaaaacgggggataatggcttctcgaggctgcggatatgggccaccggtgtaaaggattgtgtccaccatggtacatcatcggttgagcggtgtaacaaggcggcggcgggttcacaccatttttctcgcttggcaagtttttaccaccattttcctcgcttgacaagtttttaccatcacccttctctttctttgtacttgagtcttgtggccatctgaggacgttcttattcttcttatccttctcatctgatcctttctccccattggaatcttttttcggattctcattctttgaaactttctgtttttgtttcacatcctcttcatcaggctcatctgtgcatcataaaggcaaaaactttaagatttgtgaagataaaagtaagaaatcttcaaataggttaaacaactcaccttcgtttttcttcgatttcttcttcttcgttgctttaacctgacactttgagcagcaaccatcgttcatttttcagatcacgttcctgctgctttcaaagaaaaaatatagctacagagaataacttgaagaacttttttgggttttacttatagaatttgcttaagattataaaccctaagcaatccatatcttatcctatctatacaaaataaataaagattatatcaatcttgaagaaaatcatctttccatatacatactcgtttgaatccataaaaggcatacgcgtatcagaacgaataataatcactgatttgaggagatacagtatcaagctttggatacaagcaaaaggcttaagtgatgttatatatatataagatattgtggaaatcattgatttaactgaatatattcttactggaaatgtaacaaaacagtaacatatacaaagatcataacttgagttctaagcggtagtattgatggtttcaaaaagggtacaactgtacggcttcatctcatacacaaccagttgctgcaacggttcttctgctacaacggtttctccttcgacagagaaaaaccccgggaaaggaagagctgtgtcgaccaatcttctccatttgcttccatcgggaagtgaaggtaagactacactctcaggatgatcactcgcattgaatccgatgaacagatcattgctctttggctcatttggctcagccaatgacgcagtttcctcttcctctgactctgatttgatctccaatgccaaaaacttagaagcaggatcttcccactttggagttgtttggtcatttgcataccaaacaatattttcaggtttcaaaaagtctctcctttgaaacacatcacttcttcttgctcttactgaagtcatgaaggagataaattgcgtgatctgtgtaccgaaagccgaagctagcaagttccaatcaaaaggtttccgtgattccaacaaaggcgagccccttgtcgagattccacattcatctcccatattaagcactggaactccaagtgatatgtactgtataaacaagaaattgcggatttgttttagccttctttgaagaacagctgatttattcgttgctccttcttccccacaattccaacttagctctgaagctagctcagggccactgaaactgactatgtcaacaagcgagagtcctgagtttcttgaaatgtagttgaaggagaaggccggacctcttccatcggtaaatacgtcaccacttccacaaattcttgtagccagatcactaagaacgcctcttccccttaaaaaatttcttacatttcgacaatatcttgtgttgagttctgcccatcgcttccaatgtgggaaccgtacttcttttggcatcatttcaagtggatcccagcaatcagctattagtttggtctccgcaagaagtggatcaaaagctattgcttcaaccaaaggaggacgagagagctgttcaccgtgaacgcctctcaagagagatgaagcatttataaaacaaaatccatctacatgaaactcggttacccaataacgcaagctctccaataccaactgctgaacaacaggatagttacagttcaagtaacttttagaatctagatcattggctcttcccttgtagtaataggaactgtcatcaattccacgaagagctccagaatcagcagtatgtgtaaaaactacttncaaaagtacctctattccctcactgtgcaatttcttcaccatcactttcattgagttaactg

SEQ ID NO: 30611 - DNA, 2975 bp, Arabidopsis thaliana landsberg
ttctaaacaagattggagtggaacttacttccaacccgaatgatttagacgcaataaagaaagcaatcttggccggattcttcccgcattctgcaaagttacaaaagaatggatcgtacagaagagtcaaagaacctcagacagtttatgtacaccctaactcaggcttatttggggcgtcacctagtaagtggttggtgtatcatgaactagtacttactaccaaggaatatatgaggcatacaactgaaatgaagcctgagtggctaattgaaatagctcctcattactacaagcttaaagacattgaagatactcggccaaagaaaacacagagaagaatcgaagaagcctcgacgtctaaggttgatactaacaagaaaacccggacctcgaaggttgatactaacaagaaatcaaagaggtaacaaccaaactagtcgtttctctttactgtttctgaacgaagttaaagcaattgtgatactagtacttttttatccgtttttctctgaaagattcttatgtttaagtcatcatttactgactattggttatttttatcttataaacgcatgattctgggttttttcgagtctttactggagactatagacaactgattagaaagacagaagaaaatcaagtatgcagaagtgacagagaaactcaccgtgattgtcatcggggaagaagccatggagaaacacatggacatttctccggtgagattcatcaagccttattataatcttcttcattatttccacaaaacaatgtttacaatttgactgaaataaaaacaagtgacgaagatgaaaaacactacacctacttgcagatatgtatatgttcttgaaacaatacatatcattggcttgtaatgaaaataaccaacactaacaccgttaacacaagacatcatgatttatgtgctatcgttaatgtttatagtttcaagagaagtgtcgacctcaacagcagttactcgatggagaagattccggatgctatccacccatgtctgcttatcagccttgctcttgcacttgaactttgtcagacctttccctgtactgattccgaaatagagctcttcttctgtgttttccgtgtcttttccattttgcaggcctgagactgtctcgcatacatcatttacaatgcctgtagtgattcaaccactggattattgtaaagcattggacaaagtcccaagatcactctgcttatacaaatgaacaccatagacattgaaagaaagaagagtagctcactaacctttgcttttcatggagaatgctcctacaacgtgtttgcttttgatttctactatgacctgcaaaagagaaaccgagcaaaattcaactctagaattcaaccagcatataactttgttagcttcaatgagtattcgatgtttaacctgagattttttgttgatgtacacttttacatgcttccaccgcagaacacctggaaagtccatgagtcaattcatcaatctcgtggtaagtgaaatttttttgtttccaattgattcttgaattataatatcatcatcattcacaacaattagtaaagaagctcttactgaaacattaccgtttcgtgtgcactgcattagctctccagttgattcttcaactccttttgcagatatgagttcatcggtcgtgctagtgcgatcgagctcagaagagcaactatgagtctctggtaaaactctctcacaggggcttatagctgcactgttcttagcttcctttggtagtcttaccctcaaagctgcttctcctctcaatgctacattatcgaaaaaccgagaatcataattgaatgatcaactcaaaactacaatggactagtcaaattcaatagagcgaaacaatcaaggattgagaattgaagtcaaacaatcaatgtacctgttgcagctgcagcagttagagtcaacaaatcgccaggtccacgaacatcaacagctgatcggacagcagagacgacgcgatcgtgatcggcgccggcaagctccgccaattcgaggcagtgagaagctaacaactccgacgccgaggcaagggctgagctcatctttgatccagcgaagccgtcttgattgcctgaagcggtcactgcggcgattgccgtcgccagagacgcaatggacacggcggaatgcagatgagctttctccacgcgaactctatctctcttctttacggcggagaccttcccgccgacgaattctcggtggtggaaccattttccgatcgttcccgttctccgcgcgtgaaccgcactcgctagctttcccgtctgttgaagaaagaaacaatttaaacattttgggctttttacagattgggtcttaatattattattttggttctataaatatattcttggcccataaacttaaaacacctaacaaattgttagcataaagtaataatttcgttacacatgagaatataatgaaaattactttacactaaaaaaaaaaaagtatttacaacattattggaaaataacgtctaactgtttcacttattgtatctttgtggcaactactgaaaacgacaacttattgtatgcaaatttataaacgtgaaaattcaacttattaaaatcaattacaagtgtataatattttgatccaaaaaaaaaaaaagacttcatttgcatgcatccaagatctttagtgagtttctaatagtactatcaaaattaatttcctttatttgatggtaacgtacgatcatatcaaccatacgaacttaatatacaataaagagaagatgaaagcaagagacggcttacttgtagcggcggtggtggtgctaccggagccagagaagtgacatcggccaactgagaaatattagggtttttgttgagttgtttatcagatttctgagatgataaagctaaaaagatcacagaagtagaaagactccatgatctgcatagaa

SEQ ID NO: 30612 - DNA, 2122 bp, Arabidopsis thaliana landsberg
gcataagacgtgttggtaccggaagtagtgaccggagatgggttgatggaagcgaggtagactctgaaacgccgctgttttcagaaatcagagatagagactatagttttgggaatttgaggagaagattaatgaaaaaacccaaaagagctgattctcttgatgttgaagctatggaaattgcaggttctcatggtcacaatctcaaggttaatcacccatgattaaagttttgatttttataagtgcacatgttgtgtttgtgttattgacattgaaaaatgaaaacttttttaggatttgtcacttttgactacacttggaatagcgtttcagacgttaggtgttgtgtatggtgatatgggaacaagtcctttgtatgtgttcagtgatgtgtttagtaaagttcctataagatcagaagttgatgttcttggagctttgtctctcgttatctacactattgctgtgattcctttggcaaagtatgtattcgtagtccttaaagctaacgacaatggcgaaggtaatgcttccgcaccgatgtgcttagtaaagcgagatatttaagtggttgctcaggatatgtttgttatgtgtgcaggagggacatttgcgttgtattcacttatttgtaggtatgcaaaggtgaataagctgccaaatcaacaacctgcggatgagcagatctcgagttttaggcttaaactcccaactcctgagctggaaagagctctggggattaaagaagctttggagacaaaagggtatttgaaaactcttcttttgcttttagtcctaatgggaacttccatgattattggcgatggaattctaacaccagctatgtcaggtgagtcttatttgtattaatacagtgtaacttgagctgcatttacagttggaatttgatcttccttttgattcttctgcagtgatgtctgcaatgagtggtctacaaggtgaagttaaaggatttggaacaagtgggtatcattatcacatgatttctctctctatgtcttgatgtcaatttgatctttgattttcaatcttgatgtgttgttcttgtcagatgcattggttatgtcttcgattgtgattctcgtggctttgttcagcatacaacggtttgggacgggtaaagttggttttctatttgctccagttctggcgctctggttcttctctcttggtgctattggaatctataatctgttgaagtatgacttcactgtcataagagcactaaacccgttttatatcgttttgttcttcaacaagaatagcaaacaggcttggtctgctcttggtggatgtgtcttatgcataacaggtaagtcaacacgcttaacaacttctaaaataaatcaaacctttcttacaaagtgtttaaaactacgcaggagctgaagcaatgtttgcagatttaggacatttctcagtttcgtctatacagatggcatttacttgcgtggtgttcccatgccttctcttagcttacatgggtcaagctgcttatctaacagagcatcccgaggcctcagctcgcatattctatgattcagttccaagtaatagttcaatatatccttaatctctcagctttgattatattagatgtcaaaaattctgaaagttgtgataaaatgcaatgttgagcagagagtttgttctggccggtgtttgtgattgcaacattagctgctatgatagctagccaagccatgatctccgcgactttctcatgcgtcaaacaagccatggctctcggttgctttccaaggctgaagataatccacacttctaagaaacggataggtcaaatctatataccagttatcaactggttcttgatgatcatgtgcattcttgtcgtctccatcttcagaagcacaacccacattgccaatgcttacggtcagtctttcggtttgatttctacgcagagtcctgaaaaggctttctcgttttgatattttttcttcttttttcgtgtttcaggcatagcagaggtaggtgtaatgatggttagcacagttttggtactctagtgatgcttcttatttggcaaccaatatatttccgcctttgcttccccttatatttggatcagtggagc

SEQ ID NO: 30613 - DNA, 2209 bp, Arabidopsis thaliana landsberg
aatcacaatggcccttgattggtttttgcctcatcggctctaaagtttactgctttcccctgagaaaatgagtaaaattactactttttcatatttggtattgttagcaatttgaaagtaggaatgattagtagttggtttagtttctggtgattgagctgctttagcttgattagggaatgagtttgaatctctctgcataaacaagaattttgcattgtttttgactgttgtagtatctccggttatttggcttgataagtaggcaatgatcagtttttgatatctatagttttgaagatcttagagatgttaaagttttggaggctactgttccttgtttaaacaaatttgagtctgaggtctctgacttgtggtgtggttgagcatcctgttttacttcatgtggctgtcgtggtcacaccgaatggcggtgtatgcttatatccttaatctggtttataggattcactctaatgacttcatggaggttgataatgttgtttaggatgacttgtgatcattgcttatttactatttttacaaaattgtttatttactactaaggaatcatccccatctcttcttcttcctcttctttattggttggttatgtttttataatatagttttccttcacttttaatattgtaggttcagtgaaccttttgttctgtgtctggccagatccaattctatctcctcccactgtccttggaaatcccaatgccaccaccaccaagtagacctttttctatataaattcttctttttattctttaataagtaacccccttcaatttaggctttgtttctaaggcattttctttcctgtaatctgggtttttgtgggtccaacacactctctctctcttgatttcaacaacttggcaacttcattcaatttcaagttccaaaacaagagagagagagagagataaagaatattttattgtgtccatgagttggttaggtgaccctccaattccaattggctatccatctatcctcttcttttatttatactctcagaaacaagaaatcaaaaaggcagcacaataatactgtctaaatgcttctctactttctcatcacttgtctctctttctttttctttaccaaatctctttctcttcctccatgggcatctgaaaccaaaaccttgctctccttctacttcatcaagaatccctttatgaacaccctacatcagaccaaacacgatccagcctctccggtgatcgaccaaatgtcggttcttgacctccctgagctggctcttgactgcattcttgaccttcttccaccctctggactctgcagcatggctagggtttgtagctccttgagggagagatgtgttagtgatcatctatgggagaaacatttgaagaccaaatggggcaaaatccttggccctgctgctcacagagagtggcaatgctatatctcctcttccacatatcatcttgattctcctcatcaacaaactgggaatcttggttttggcaaaatcatctctctgatccgatctctttcatccgttttccgagaggataaacaaaggaggggatatgcatcttctctgccacttgattccagcatgagctgctacctctcccttgaaacaggtcgtttttggttcccagctcaagtttacaaccgtgaggtaatcatttcataaacatagttgctccatttttgctttatggatttgattaaagtactaagaggcttttttttggtgaaagagcagaatggacatgtagggttcatgttgtcatgctatgatgcggagctcagctatgatactcacacggatacgttccaagccaggtataaaatatctaatgtccacatttgacgctaacaaattttcttatttctcatcataagtttacgtttattggggagtttaggtatccaccacatggtagacgagcatctgcgattgaaaagggtgtgacatgggatagaataagagcagctcccattgatgcatcacctcatcttctccatgtatcagattctttaaaagagttgaaacctggagatcacatcgaaatccagtggagaaggaacaaagagttcccatatggtaaataataataatatgatgcttttggtttgaacttgcaatctgattctgaaaaaagcttgggtgatgttgttgtgtaagatggtggtatggtcttgttggccacttgga

SEQ ID NO: 30614 - DNA, 3633 bp, Arabidopsis thaliana landsberg
ttcaagtcaaaccgtttgtgtatacgatactcagaacaaaacagatttcccatcactatgaaccgagtctgctttttttttttgacacaaaaaatcagtttttatttgactaatgaagataaacttgtaatggaagaccatttctcatacctttatggcctcctactggtttgacgcaatgcaccccaaagaacttagtgactaaagagttcttgtacttggaaacatgctcgtaataatttgggagcatcttaagcaatacctaagcatggtttaaaaaatctcaaaatatatatgttatcgaaagcaatgtgaacgcaaaagaagatataatttaccttaatttcggattttttcatggttttgatcatgtagcgttcatcttgagtcaagtaaaaagcgcttccactctttccaggagaagcaaattcccgaagagattcatttccgcaaatagcgagcatgtagtccgcttggtctatcgcgaataaatctcttagatgcctgtttcaccacacaaaaatgtgcaatcagaattaacaaattgtttgtactccaaagttttaaagtatttacttacctaaacacaatagggcaatagtccttccatttgaactcggcagatagatgaggaggtgtagacttagagccttctgggggaaacctagtccattgcttatccttgggatcaaaatcactatgcctaagttccctcaaaagggaagcatgtttcccaacagagtacctaatcccaagttgtagatttaacattaaatcatagttcttatgtccagccgtaaccgtatgccccggtttcttaacatctccttcatccaaccacctaggactttgttgaacactcatggcaccaccactctccaaaagcaaagggcttcttgcccactcttgctctccacatccactcgtatccgactcgctcgtgtatggactcgcctctacatgatcacacacgccagtatcctccaattccgatatacaaatcctcgggaaattggtattcgctgacaaagtttcaacggaagagagcttatggttctgcacaatctcttcatctttcttcttgctcttcctcccccacccattataactagtcttctcttcaccccaactcaacacccctttcccaaccggggctccattttcccataacccatcataacggtttccattagcccacgtcattttccctttccccgaaataacaccattcttccactctcccacatactcattcccatcgctccacacataacgtccattaccatcttgcagattggccttccagtttccttggtaaccatcgccgtttgcataccgcttctctccatagccatgctttcttccccacagccaatgccctctataagtgtcgccatctattccaatgaacgttccttcgccatccattcgaccgttcttgaactgaccctcataggtcgctccggacggccaagaaaaacgtcctttaccgctcgctttgccacgtgtccactcaccctcgtacatacaaccatccgaccacaaatacttccctgtcccatgcggaacacccgctgataagcctccgttataaaggtcgccgttctttagcaccttctctactattctaatctcggcagccgtatcactcacctcgcaacttgtcatgggaaccacccgccgggagctttgtttgtacttgacccccaacgattgctctttattcagattctcttccgtgaagaggaacactgtctcttgcattattatatatgtcttactcagacatttctcgttgacttttatccggcttgtttgtctcttccaataacatttagtgttcaaacatttcttctgttctgtaagtatttaaaaacaaaggtgatcaataatgaccctaaaattactttgatgctaaaatctgaatgaaattagaataatcaaaatcttgtatgaaaaaaaaataaaaaaaattgctaagagtttaatgtcatcattgtaatgttatgtcttcctttaaattttggtatctgaaaggaaggaaaaaaaaagaaaacaaacttacccttgaatcatttatagattggattcgttgactgagaaaagaaatgatcaaatggactattcaagaacccatatcaagaagtaatgcatgagaatcaacacatcaaaattctcagaaaacaaacaaattgttttttacctgagtaatagaagtgaaattgatgtatggtcaaccgccatgacaaaggagttcagaaaataagatagtgtgatgatagaagtgaagacccaaattcataaacttgatgaaaatcttgaaaacagagtatggtcgaatgaaagatttatcagaatgttaggattggcgaaactctttttcgaaggagataaaatcgacaattcaacgatgaaaatgtatccgttagatgcgtattagctatttgttttgattatttatgtagccggcaacaagactacgtgctggccttgatcatcatcaatctttatactaattttataaaccattaataatgtaggtgtttagctagaagatctagttcatggttcgatatcggtattaagaatatgcgattgttataggtggagctaatagacaagtaagtaatgatataaaaaatgcttttgaacgtgctttaagcctaccatcatgtgccacaagtcagatttggatactattattctcctctctgctcggtcacaacaactcacaagtcaaaagtcaaaaaaccacttttccaaagtttaaggcacttttcacaaaattccaaattagaaacatatcagactttctcgatttatatgtcgaaccaacgtgatcttagcatgtgattaagtacacatgggttttgactcttaacacaatacaacactatactgtcttaacatcaagtaggctcaaggggatgtagatgacaagaagattggcttaatggtgcctacgacggtctttcgatgagtcgcggtagtcacggtcccgagaagaatgatgccttgatttatctgaatgtccacctgaatccttcaatctgtctcttgaccgatgatgacttcgatctttgagtttgtctctctccctatcactgtctctgtcagaatctctgcctctgtgagacctacccctgtccctctctctacctcgttccttctctctatcactctctctttctctatctcctactttacttctttcatagcttgagtctcctacaattggctgagagtttgactcggtaccacttttcttggaatctgtagccttttcgtgtggtgtagtaaccattccatccttcaagtcgttattagctgatcctgcagtacatttagtatcaacagcctcgcctgctcccggcaacagatcctgtaacagtgttaaaagcacttcaaacctagctctgattacagacatagaaaatgcacttggattgcagattttcccaagccgaaataataaagtagacagccctttttcaatactatataacatgcaatgtggcggtagaaactctgtttactactgtgtaagaaacgcactcaactttaagagtctataatagcagtaatatggacaataatctcatgttttcacaaaaattacaaaaccaagaaagc

SEQ ID NO: 30615 - DNA, 787 bp, Arabidopsis thaliana landsberg
gaaacctacaattttatgtacttttgtttacctaatattgaaaccatacattcgtcatctctttctatcttttcatgttgtttaaacgtaaatttcatactctatattagaatcttgttcacacacatatgacgtcgtagaagaatccaatatacaagagcattagattttgtatgaaaattaacaattaatatcttcaactggttgcttaaacaaattttgctagactactaatgttacggtattttatattattttggtattttagtaaacagtttcaatgttacggtaatgatcagtgtaatatattatagttatttataagttggagatacaatcacagcaatgttaaacatataaagacataaaccttgaatggttacagcggcccaagcggacaaactagtttatagatcggatcactttttatttaccaattacaaactatagtccgtaataatgcggacctaaaaaaaacgaagcggattaagcgcggaccatatttatagtatgttcgcaacggtttattgtccgccccaaaaatagtatcgattagaccgctgacggattagtccgcactaaccacaaaatccattcaaaacctaagttgaagtgataagtacctctaaaatccataaaaattgaaggatttataatttaaaatgtatgagacgccaagatgattgacatcatgatgacaaagtttgaactctatcacgacaacactatatttgttctaatcttttaaccactagtgcatttgggacttccttgtttataatgcgat

SEQ ID NO: 30616 - DNA, 2953 bp, Arabidopsis thaliana landsberg
ccccttaaccaccagtacccataacttatacgacattgtgcaacgaagtttaacctggtaaactctagacgcatcaaaggaaagagcacatctaactgtttgctattttagcacaatcagcttctctgtttgtctgaaaagttaggtcatcagatgctttgggtatttgactctcatgcaatatgctttcatttcgagaaaaaaaaagattgattcacacttactacatttggttgaccaccaaagtaacaaacctttttaaggtattttaattgattttggttcaaccaaaaatatctttcctttaccttcttggtttcgtccgtacaaacgtatatgtgaaattggaatcttttcttaacgtggaggctctagattggtaatcaaatttcgttaattgtcatttgtcaagaacttccatgatctactcgattaaaagtaatattaataatatcaagttacaagagtgttagttgcaaggtcatgctcatcattagctgtctaacgaaaccttaaaacaattgacctttagttgtggtgatctgatggcgaaaaacactgatagatctgaatttctagtgatttaattaggtcaaaagaatttaactcttggtcaaatttcacgtttaagctctctaatggagaaagaaacacatgtttgagactggtcttttcaaaacaagaccatagcacaagaaatgatcaagttttgtgatatgtgagtttttgctgtctttgccccacaaaacagattagaaaacagagaagaaagaaaagagatgactttagtagttaggatagagagctttagttgttacgatcggacaagttaaagacccacttaccatatttgttttgtaggacactctttgtctctccaatatctctctaactctctatacactcccacttctcaatccttagtctcctgtttctgctgctattgactcaccgccgtgttccccatccagattttatctataacatcatactaatactacctcctacctataaccaaactgaaacattgaaacatttgtgtaactgaagtacgagaatagaagtttgagggggattgagtaaaaactatttatggagaactatcattacactagtaataataaattagtaatcacaaacaaactcatggaggaggtggtgcatgttagcaacctccgcgcattataaagacaaacattctctaatcttccttgtacaacttttttttttgtttggatgaaggaagaacaaacttaacgaaaagtgaaaaacaaatcgatactattatttgtttctattttttgctttcctaatcgtcatctgaagtttccggatcgggtaatttgtttaaatcaacccgttccaacgatccattacacctcttaaacccttctttactactacactccataagatcatcattaatacgataatcactatgattatctacgtaatcatgattaccacgttgatgttgatgatgatgatgatgacgattccctcccgcccccgccgcttctaacgcatccacttgtgctccaacctccgccgcttttctccttatatacgccgccgacatatctccaccaccgttcactcctcctccgcctcctcccgtcaccgtcactccggctaaaagctccgggaagttaagccgagcagaaggacctcggagataaaacaccgccgtgtcgtaagcacgcgccgccgcttcaggagtagagtaagagccaagccagatccttgaccttttattaggctctcttatctccgccacccacttcccccacttcctcatccttatccctttatacggcttatctctcttcctcgtcgccaccgccgcaaccgtaaccgccggagttgacaccaccgtggccacttcagtcgccgtctccatagtggttttctccggagatttcaagaatccacaaaagaatcgatctaaagagattttaaagataaagaagaagaaagatgtgatattgacggcgaagcgattacatgcggagggagagattgatgaacacgtgggccaagaagagaggagtggaacacgaaaccgcaaaagagaagaagtttcaaaaaattcaccgacactaaaatctcttaataactctttctcatatatatattcttttttttttttttgattctctctatatatattctaagacagagacaacaatctcatcttccctgacactatatatacacatatagataaatcgtagttattatattttgtctttattatttggacggaattaaaatattagtgttaaatacactcatgcatcttatttaataatgctcgtcggctctttccattggacggttcttaaattaatttccgatatatcagcgttactatatgcattaaaacatcctcaactaaataaaatttgaatgcaacgatttatcatagctcaaatcacaattattttgtcatagcctgttatggcctctaatatttttctccgttggcatctaattaattactattattggaaatcattattgtataatataggtatatttaaaattgttattaaaaaataaaggagtatttaaaattgtttatacacacgttaatttaaggatattgtaatttaaaaatggatagggatagattgcgtcttgatatagtgtgaatcttgtgattttaatcaacaatataagagttaacgcctcactttggaaaataaaacatgtttcatcatcaattacgtcaattttattttagtattattatcccctattatcctagggtttagataaatctatgatatatcagtcacatttcatgatagatgttgcaaatgagttttttacatttcttagactgtctagtatctcagctagtggtaaaatacaaaattttattctagaatttatattcttaatgtttcacggcaattcgttcaactattttaaataacctgaggttata

SEQ ID NO: 30617 - DNA, 3238 bp, Arabidopsis thaliana landsberg
atccgagaagacgagtgaaagtgatgaagatttgattttccggtcaccgccaaaaaagttgaccgttggacctttattgacgcttctctctgcaaaatttcttctatcccggagctagcggagaagacatggaggtttttagacgtgaaaaacacgcgcttactcacacgttgatgggctaggccctgtgagaaaatacggcccatatattgtgggctattttagtaaattaatgagaggcagaaatatattaaccccacaaataaaaaactttctttatattagtatattaaatatgtatcatcccaatataatcaatgttacatcgaagaagggatcgtcaaaatacatctaaaacaagaaaatattacaaacatttttattacaatagtaataagttcgcgcgccgatcacaactctagaaaaagaagagcgatccagcaactgcaccaacaacagagacaaagccaaaagctacggtggcatcgcttccggaagcttctttttgtggtggaggatagttagcgtacgaagcatcgcttccaataggtccggcgactgccacttcatcatctccattggcatcatcaggagtaacagctgcatcgtcgttgtcagttgttccaatagcattatcatcagctggaccctctgctatatcacctccgataccatcggttggagttgtagcggtgggagctgaggcggtggtggttgacggtggtttatcgttctcagcagctgatacgatcacggcggagatagcgacgaagaggaggaggagagctaggtgaagacgcgccattatttttttaattagttatttagtaatcccaaaaaactttttttttttgaaaaatgttttatgggtattttgttttatttatttatcttgaattgtgtaatgagggtctttgcttatatagttgtttgatcaaagtgcttacgatgacgcaacgcaatttgaggttttgccaaaaatattaacggttgaggaaaaaattgcaaattacatatatcttctactcctaattaagcttcttctaaattctaatcttatcaaatatagcaaaaacaatttgagaaataggattttggatttttctttaatagaattttagtaccctaatgtaaacacaacaaatatgagaacagaaaataaaaatttggtagaaattgaatctgacaataatttgatttaatgaaattatttgacaattattaagaacataacctaaaacttaaccaatgaacaattagaataatctaaaaccctatacaatgaaatgttaaagacaagtttatgttattcccctttttgtacaagcttacaagtcttatgaacataaaaagcaaacgcaaattttcttgcgtttttgtttccttgatgtcaaacgtagtttcttgccaaccaaaccacataagtcagcaagctagctgagatcgatatccactttttccggtacacacctttctttttggttcttaccaagctctgttccaagctgaccctgatcgcctgcaccaaacgcgaatagcttccccgattccgtgagcgcaaatgtatgagcgttccagtatatggagttcgttagacttatctggaccatccgctcgttcacttgttttagcgatgttactaccgttggacttagcacgtttgcatgtcgattaccctgcaacaaaaaatcaaaccaaacatacgactaaacataagtttagaacatataatgtaagcaaaagaaacaatggaggccatggccaatcactaacctgttcatcaaaggatggatggtgaccgagactagcggattcgccgcagccaaacgagtaaacatcaccatcgtctgagaccacaaaagtagtgtagtctcctgttgcgacatgaactgctttgacatggcttagaccttcaacaaccttagggactgattcacactcctcgttaccgtgacctaaacatccatatcttccccaaccccaagtgcacactcttccatcctgacctaccaccgcggcatgccaagcacccgctgcaactaccctaggttgaagattcaatatctgaaactgctcgatgacccgaggatacttctcatctgttcttgacccatgaccaagtttgcctcccaaaccgcaaccaactgagtaaacagacctaaaataagcatgctacagagtcagtgctgctgttggacatttgcatagtgttctattgcacatgacccatagaaacatagcaaaaaatttaggatccaaattatttttgtcaaaagagtttaaccatacaaatatgactacatttgttgtaacctataatattgttgaactggtctaaagtagaaaagaaagtgtaaaaaaggaactcacatgccatttggttgacaggctaaggcaagaaggtagcaataaccagcagcaatctgcacaacgggtacattctcgagtgggcctaacaaaggacgaggctcgacatccgcagcctcagtttggtgtcctagtctaccgtcattgccccacgagaatgtataaacctttccttctcgggagagaacagcggtaaagtaattcccaatagctgcttgcactacaaatatgttttttaaagatgttacaagctgaggagttgtaactggtttagtcccttgccctccgtattcagcttccccgaaggattcttttccacacgcataaacttttccgtcatcgcttattagcattgtccgagcagcaccagcagctgcttggatgattcgaactccctgcaatgatctgcacagcatgataacaaactccatcaagccaagagcatatattttcttctcttttcagatcttgatgatgatggaaaatgacctaacaggttgaattcgagcttcgtcctcggtatgaccatgtcctagctgtccagagttattatatccgaaagtataaacttctcctttcgatgtgactgctacactatgaccaggaccagcaacagcttgagatttctctcttcgacaacacgcttcaccagccagcaaaaaccgaaggactaatttccatgatcctccgcacctacgtttcatctcttgacgttcttcttcattcatcggcttgaaaatcacccttttattacacatgtcgagagcagcgagctccgatagtgataggttaatgtccggggcaaagtttgctggctggctaaagaacgagcatgttgcctaaaacaacaacaacaacaacaacaatcaaa

SEQ ID NO: 30618 - DNA, 1798 bp, Arabidopsis thaliana landsberg
  unsure (1)..(1798): unsure at all n locations
gtatattgtgtcaccttttaaggcatttgcggattagtcctctgaaagatttgaacattagtggttaaactcgaaaaagctgaaaactttattgatcaatttagaggtttaggctaatcgggttcacactcgaaattgtgggtttaggaatgggattaacgcagaggaagaactcatggcaagatggtgttttgggaacaaactgtccgatccaaccaaactcaaacttcacttacaaattccaaaccaaagatcagatcggaactttcaactacttcccttccactgcttttcacaaagccgccggtggattcggagccatcaatgtctacgcaagacctggaattccaatcccttaccctctcccaaccgcagatttcactttactcgttggtgattggttcaaaaccaaccacaaaacgcttcaacagcgtttggattctggtggggttcttccatttcccgatgggatgcttataaatggacaaacccaatcaacgttttcaggcgaccaaggtctcagctttccacaaattgttcttttgagtaaataggttgtgtttgttttctggtgtttactctgtgtctttggtttaatctttcagggaagacttacatgttgagaatctccaatgttgggttatcaagcactttcaatttcagaatccaaggccatacaatgaaagtagttgaagttgaaggctctcatgttattcaaactgattatgattctcttgacattcacgttggccagtctttagcagttcttgttactttaaaccaatctcctaaagattattacatcgttgcaagcacccggttcataagaagcaagctttctgttatgggtttgttgcgttattctaactctcgcgtcccagcttctggtgatcctcccgctcttccacctggagagcttgtttggtccatgagacaagctagaaccttcaggtttaaagatcagttacttataaataacgtgtaaatgtttaatgcaaaggattagtttatgaatggtgtttgcttttggttttcagatggaacttaacagcaaatgcagctagaccaaaccctcaaggatctttccactatggaatgatcagtccaacaaagacatttgtcttctcaaattcagctcctttgattaatgggaagcaaagatatgcagtcaatggagtctcttatgtgaaatcagagacgcctcttaaactcgctgatcactttggcatctcaggagttttcagcaccaatgccattcaaagcgtcccatcaaactctccgccaacagttgcaacatcagttgttcaaacatctcaccatgacttccttgaaattgtatttcagaacaatgagaagtcaatgcagtcttggcatcttgatggatatgacttctgggtcgntgggtgagtcttcttcttgcaccgctcttatagtttctaacgcaagttagattttttgctaacatttctctctcttatgaatctagatttggttctggacaatgcactcctgcaaaaagatcacttcacaatcttgttaatgctctgaccagacacacaactcaggtagaagcatcgaataaatcagcgacaaaaaagagtaggaaactttgatttgtttcttgtgttcttgatgtgttgttgttactggaaaataaatacaggtctacccagagtcttggacaacaatcttagtgtcggtagacaatcaaggaatgtgcaatatgagctcagcgctatggggtggacaaaatgggggacaactgatttatctcaaagtatggaattcagtacacagt

SEQ ID NO: 30619 - DNA, 5074 bp, Arabidopsis thaliana landsberg
agggttttaatatgggctttaacttcaggtagcatttgttcatacattccttttgcagcttcgtatattcctctgtgtacgatcgcaccaaggccctaatagatcaaaaacaggtctttgtaagttataagttggcacatttctgtttccaaaatagttgggattgtaaagaacaaatacctcaaattcaataggctcaaagagtaaatttgcttgccaagaagctagagattcagatccctacaagcaatttgacattctcatcaacaaacacataagataatgaaaatttaaaaatgaactagcttttgaagctctttcctattcttacctgaatcacaacgaatctagtgtgactctgatcatcatcacatataaaccaatcgcagggagacgaaatggtggatttcaaatcgtctgcaactgcttgcttcacatcttcctcagcagcaacaacagaagtaacagaataagcaacatctgatgatgactccgcattagccaaatttacatcatgtttgtccgaattctcggctttcgatgaagagttgaaaggaagtatgttgttggtacgagagtgaaggtaagaagcagctgatgcaacaatctcatatgcagcagaagcactaatcttgcgacttttgttcttctcttcttcttcaacttcttcttctgcttccacaattggcttagtctcacctgaaacttcaccattctcagcttttaacgccgattctgttttctcagctgatgaagttacaaatctcaggccgtaatatttcgacagattcgcaggctgcaaggaaaatgtcacaaattaatgcaacaaaatcgaagatcctgcaaattttacacattgtatcttctcaagtttgtgaaaactaacacctagatatcatattaatctctatattcgtggttcaattcaaaaaatctaatgaagtaaaaaataaaaatcgaaccttgatttttgaaattgaataagccaagtttcccaaatacgacagttgggcatagagttttgattcgggtaacgtaaccctccttagcaatttggagaacgattctctatcgagttgaaatttgtttgcttcgttgccatcatcttccaaaactgaacatacatcgcatccaccatcatcttcagatactacggcgtcgtctaattcaacctcctcgtcttcgtctccgtcttcatcttctacttcatcatcatcttcttcttctccgtgtttacacgtagattgtacatccaagatcttcaaaacccagctcccatttcgcctctccgtatccgtttccaccgccgtctcctccgcgatcggctttctcgaatcgccggaatcaaccaaaacggcgtcgtctaaacacaagccacttcgtctcctcgacgcaattcctcctccaccgccgcgagaccaaaacggcgtcagtgggtacttaaacgagaacccgaaaggtcctcttttttgcgatggtgccgacgcagttgctcggacttcaacaactccaccgcaaccgccgtttccaaccgcagtgatcgctggaattacaccgtgtaaaccgctattcaaacacaaactgtccatcgaaagaaaacttattttctgttttgcttttgggaatgtctctttgtctctttggggttcttattcacaatttaaaactattaacgatcttaaaattttgtttagaatgtgaaattgtacccacagaaagatttagaattgagaatatttagcaaagagcaaagaagaaaaaattgtttatcagccgaacagatcgccgaagaagaaacttctgtgtgagagagatctatttaatgctatattttcgtttccctattttaaataaatagccaaaaagaagactttttttttttcatttttcttttgctttccgtgattttttttttttttttttacgatattttcccgacgataaatagtataagaaataaattattaaaatgataatttcctcagcgaatgttggaacgtcgtcgtttaaacatacgtgtaatgcgtgtgacttatctgtgtaacacgtgttaccccacgtgggacccactgagaaatgggtttgtcgagttggtacagaaaatttgccgacttattaaagctaaggaatttcgaaattcatatttttttagacagaaatacttcatgttatttaattttaattattaataaagaatttcgaaattaatatttttagacataatacttatttaattttaataatttaataaaggaaacattataaaatattacgcgtaatcttaaaatttatttacaaaaaatgttattcagtttcaatgtatttgcgtatatgacttaaaatgttttcaagttgtaaaatggaagtttcgaagaatgtccacgtggggacgacaaggaagaggactgccacgtcagagtcgtagcaaggtgtaaatggatataggtggacaacccatgtgacgtattccaagattttgggctctatccaattggacacgtggcgtaatcgggatgctcacgcgccttgtcttctactgttgtagtgttgtgtgattgcatgtcatgttggttgcttcttcgtgagcttaaatccaaaaatgaaatctacagcttcttgcacgaaactaacagctattaactctttcttcttctttttctccttctgatcaacaacgtaattatcatgatacatttcaaattatatatgtgaaaacaatctatagctttaacggagatatatgttttctgttaagaacataattatacggtaaatacagaatcttgagttttgtgggtgtaaggtctcgtgcttaataagcttaactaaattgtatatatgatgtgtggaagctgatctaagattatgaatattattgtcttacaagatggctggtttaagatcagtccatgttggatctgagaccaaagtcgtctcaaagaacgaatgaacacacgttacgttgtggacggggacggcccaaggaggtcaacacgttacgatagctttactcacacgctaaggtcgagattgattctctgttctcgatcctcagttacgaatttgtttacattgtcatatgtttttattcgttaattctctgatgtggaaataccggtgcttctctaaaagagatttcggttcggttatcgattatttcagaaatgttttaaaaaaccgaaataaatcaaaatgtgttggttttttagcccgtaaaaaaaaaaacttcaccccagcacgaagaaatcgacacgtgtgatttggtgcttcccgccattctggaaagattgcacagcaaaatcagtctctcgtataagaacaagatagtgaagagaaataaaaaaagcggaagatcaataaaacctaactcactctgagatttttgagatttgggcgtcgcgatggagccacactctcaccacaagaatgcgattcttccgtctagtagccaaggtaatcttcttcacaatcctttgacatttctccgtgttgatctttcttgggtttcgttcttaatcttcgggttgccggaaaagtgaattagggtttctatttctgggctcaattgatctgttggggatcgataatttctctccaatttttgttttcccagaatgcaattcttgtgggaaactgtaatttatctcatgtttccttaccaaaattattcgttggtttgtttgaaatagacgagaatctcaaagaagaagaagttcctgatgatgatgattcagtcggcggtgaagttcaaggtaccgcatcgtttctattaggcgtcattgatgctcgatttgctcacacctgtttattttcatcatgtcttgctcacacaggtgaggtcaatgctaatgactatataccaaatcctgccgctcctgcaaacactaaaagaaaatggcagatcatgaaagaaaaggttcagatgacagaggatgatgattttgatgagcagaatgcagtcattgctgaagctgctgagcagcctctagatttgattataccgctactaaagtaccaaaaggagtttttggcttgggctacaatacaggaactatcagccgtaagaggaggcattctcgctgatgagatgggaatggggaaaacaatacaagccatctctctcgttcttgccagacgggaagttgacagagccaaatctaggaaagcagttgggcacacccttgtgcttgttcctcctgttgctctttctcagtggctagatgagatttctcggttgacatccccgggaagcaccagggttcttcaataccatgggccgaagagagacaagaatgttcaaaagttaatgaattacgactttgttttgacaacatctcccatagttgagaatgaatataggaaggatgaaggagtggacgaaacaatgtctcctttacactctattaagtggaatcgtatcatcgtcgatgaggtcagtaccaagacctgctggttcttcttcttttctattttcaagcatgtaaggaaaggggactgtgagatttattgtacagtaaaccacagcaggggaagctcactgcaaatttgctttttgtgaatcttttatccttcaggggaagctcactgcaaatttgatataattcccgtttgtcttcatatcaggctcatgatatcaaaaacagaagtagtcgcactgccaaagctgtttttgctttggaggcgacctacagatgggctctgagtggtacccctctccagaatgttgttgacgagctgtactccctggttagctactctttcctcaactatttctatagcacgtaatgatatctcaacattgctgagtgaaagacccagatacgctttcttcgcgtatcgacatactcatattacttttgcaagagatgtgactgtgatgtgcttgatcggaggcaacatcttaccactctcaattcctggttacttactcctttcccatactgctgactgatagctcataacaatctctgctgatgcattatccctgtgcatagcctttgggcttaggcggagactgcagagcgcaacgcaagtgccccacctgttctcataatgcacatcaacacatcgcttg

SEQ ID NO: 30620 - DNA, 1207 bp, Arabidopsis thaliana landsberg
  unsure (1)..(1207): unsure at all n locations
tttgcaacttgaaagacccatcatgagaagttaatacctcaacatctgctttttgatggttctttaaagctgcgataacaagcctggaggcttcctcaggagttttaggccgagggcttagcttgcttccatgcctcaagtatttttctataccttcaaattagaacatgttttgaaagaaaaagacattaaaatatgaacattttcaaatctttatagacaacattagcatgatctgtaccagtttgcttgagccttttgggaagagacaacgtaactcccaagcttctcaggagcctagaataaaatgaatctttagatcctgatcaatctcttaagcaaaattttaaatgaatctattgatttacacaattcacagtgagtttcaaaccagagctaaagaacaaatccaagactaaaatattagctgtagaaaaaagaaaatttaggagaataacaatagagagagacctgagaagtggtctcgaagtttaagagatcacgagaaagagctgagacgccgccggaagaggcggagacgccgtgagaattcaagcatttccggagtaacctaatcgcgttacccatttcttagatttgattttcaacacaaaaaggaaagaaagagttttgatctttcttccttgatctcgtgtgaaagtctttgattcagttatatggagcagagagattgtttatcgaacaagcgaagtcatacgtggcagtttgttattgggtaagaagctaatgtgatcaaaataattgttttatattgtttttcttgcaatctaaaaagtattaggtgccttgtcgtaatcaggatttgacgactttttgttaaactcctcacaagtcacaagcttggggtttaagcaatcttaatggtgcattgagtttttctacagctcaaaatatctcttctatggtctgcttagcactttttttattttttttctttcttgagcagggcccgtaatttggtatttttggcttataaatgctagttctgattgcatttttatttcttttaagtagtttaggagaactagattccttaaaaatatttatggacatacgaattatatacagttgattcaacggatctataaattgtggaatgaacataatttgaaaataattttttttgcttacaatttaatttgagcaaaatggctatataacacanatgtacttcattactacatac

SEQ ID NO: 30621 - DNA, 3181 bp, Arabidopsis thaliana landsberg
  unsure (1)..(3181): unsure at all n locations
gatagagggtgggaaggttttcaaatatcaaagaatggaaataatgacaacattaatggaaatacattcagtaaacagtacctaaagttttatttttatttgaaattaaaataaagataaacgtatcatttacagatttggggtacagaaataaagtgcaaggaatcaaaattgtcagccgaacaacaaaaaaaacaagggcttttcagaaaaataaaaaacctttaaaccctttttttgtgtatccgattccgtcgcaagtacattcggactctttcacggcgtcaatgtctgagaacgcagccaacaacatcatggagaccaagatttgtacagacgccatcgtgtctgaattacagaagaagaaagttcatctcttttactgcttagagtgcgaagaacttgctcgcaacatcgccgctgaatctgatcacatcactctccaatccatcaactggaggtttttccctctttccccattttctgggttctctttttgtgtttctggatgatgtttattgggtttatgtgagtttaggttaagtaaaaatcatatctttattctgaaacaaaattcccttgtgttggttttcctccagaatctgtgtgtttgcatgtgtggttgtttgatttgaagcttatgtattcaaaaatcttatcttttgagcaagtttcagttttctatgtaagaatatagcagtttaagtgttttaagttctcttctctcttactgttaaatgaatctctggttggatagtttttggtgattcatagatggcattgaggatatgtgaattgatgtggtcatttgttatgctttcaggagttttgctgatggattcccgaatctatttatcaacaacgcacatgatatccgaggccagcacgttgcgttccttgcttcattcagttcccctgctgtcatctttgagcagatctctgtcatttacttgctccctcgattgtttgttgcgtccttcactttggtgttgcctttcttccccactggctcctttgagagaatggaagaggaaggagatgtagcaactgcttttaccatggcaaggattgtctctaatatccccatttcacgcggtggtccgactagtgttgtcatctatgacattcacgctttgcaggtttgtttatttatttctgatatccccgggggtttgctacatttatttgtggaattattcaagttcatcactctctctatatatgttcatgtgttgcaggaaaggttttactttgccgatcaggttcttcctttgtttgagactggaatcccgttgttgactaaacgccttcaacagcttcctgaaactgagaaagttagttcatgaaaaactgttactgatagcatccacttgtgttttcagtggctgttcttttttgtttttgctcaataatctaaatttgattccatttgtttgcaggtcatagttgcatttcctgatgatggagcctggaagcgtttccataagctgttggatcattatcccacggtttgtagctatctaaaactgatattttataacgcttcatttgaacatctttatgacctgcataatatctaatggaactcaattttgattcataataggttgtgtgtacaaaggttcgtgaaggcgataagagaatagtcaggctgaaggaaggaaaccctgctggttgtcacgttgttatcgtggatgatcttgtgcagtctgggggtacactcattgaatgccaggtatcaaaattctcatatccctgcattttgtatcttcatataggttatagcaatcttgaataaattctgaatcacaagtgttgtgtcaaaactcaagagaggcttttgatcagaatctttgttatttctgatgttatatgagatttgttgagaatctagtttgaaattactcatcttaactgtttcactttctttttgtcacaacagaaagtattggcagcgcatggagctgtgaaggtgagtgcttatgtaactcatggtgtcttcccaaagagctcgtgggagcgtttcacccacaagaagaacggtaattatctgtgaaaatgaaagaaaaagtaactaactttgttcattgttctataaatatcttgcttgttgcatctttaaactgaagtcaatgttattgtttcttcgaattaggattagaagaagcgtttgcttacttctggatcacggattcttgtccacagacggttaaggccatcggaaacaaggctcctttcgaagtcttgagcctcgctggatccattgctgatgctctgcagatttgaagcagtagagataaagcctggttctttgctcgttttggacttttggtggttttatactcttaagagatgtgctttggatgatcatttatgaaataatcatatcacttttgctgaaataactagacagattgttgaaaccttgtactctgttcttgttgattgatcttcttttgcaatgaattgaatcgttaagttcagaaagaagaaaaactacacacgtgtggttgtcttgttcattatcaatggcgataatgtcacacgtgtgtaatctcctataaattatccaacctttaaacttaaatcgacaaaaatgtctccgacgatcttatccttctccggtgtgacggtgccggcgatgccgtcatcaggttccctctccggcaacacttatctccgattgatagacacacaatgtagtacgatgagagaacttaagcaaatccacgccagtctcatcaaaaccggtttaatttccgatactgttaccgcgagccgtgtcctcgccttctgctgtgcgtctccgtcagacatgaattacgcttatttggtattcactaggatcaatcacaagaacccatttgtctggaacactataatccgtggtttctcacggagctcgtttccagagatggctatttcgattttcattgacatgttgtgttcttctccgtctgtgaagccgcagagattgacttatccttcggtgttcaaagcttatggtagacttggcccggctcgtgttgggnggcctttccttgggttggttcttntgnggggtcttggggtcgactcgtttaaacggcatccggtgttgcntctgtgcgataaattgtgggagtttgattgtagcatggagaatctttctgggatgataggttttgctgttattgcttgg

SEQ ID NO: 30622 - DNA, 1564 bp, Arabidopsis thaliana landsberg
acggcaattagccttcacaggtccaggtcctcctccttgagctgccatgagccgtcgtgcctctggtccaacccaagttgggatactatcttctgtagacagaagctttctcgcgtactttgctaaagctccggttagtcctggtttgaagcatcacattactgtccaatgattctgactggttggttatggattagtttggagatctctttagtaaattgaaaagatacctgtaaggttggagtttgggataagagtggagattctagtaaccatggcaaggctattgctactaagctctcttgatgttttgaagatcttgagcatgtcttgcataagattagacttaatttccccaaaggaatccatacatgtttgctggaatgcgatggagccacttagccaaacccgtagatcctcaacaaagacctcgatctgatcaaccgagaatccatgatccatacacttcttcaagtcatcgatagcatcaatcatcagcttctcacacagctcgaaagcaccctttgcttctgggttcttgtcagccttggctttgatatctccagaggccttttccaggctttcgttgatggatttgatagtgaccttgaagccgagtttgatgaggtcgacagggtcatcggaatcgggagaagcacccattaagctgttaacacaagtgtctttgaagtcagtgggtgcacaaactgcttgaaccgctttggtggtttttctgatatgattttcatcgtctttgggagagtgtttagacgttacaacggctacagagccaaccatgatgactagaaaaccggagacactaccggcgacgatgaatttcttcttcttgtcaccatcagaacccattttttctgtttcctatatattcacaaaaattctaaaggtcgaaaaaggtatctttgctcaagtattttttcctacttttctaatatgattttctacacatgttaaaaatggagcagatggggcctataactgtggctataactatgaggccccttctagctctgaatttttttattttttttttagggggaagggatcttttcgtgtttggtatacacaatgcttagaacaaatgaatcgaaagatcgatggggttaatatagaaaagagttgtaatactatttctggggttttaggaaagaacatgaggctatgttacattttctgtctttagtaaggttttttttttcccaatctaaaatgatctggtttccggattttatgatagcctatgaatagtaagtatggtcatgaatttgtgggatgaagtgtgagatacatattaatcgtaatcttgatgattttcttaagagaatatgtgaagcgggaaattgttgatttagagatgaagaataagggtttagtactgttgaatgtcacagtgcaaatcatcatccctgttaactactagtgaagtagtgatgtttaataatgtaccaaaaacccttgtaaattttaaagcccacgaacctgctttctaattctaaaaaaaggcgggtgtaattcgggcaaggtccgtttgtacaccgacgtagtt

SEQ ID NO: 30623 - DNA, 1949 bp, Arabidopsis thaliana landsberg
tcttttatcaatttatcaaaaaaattattaaacaattggagagagcccataggaggactttctccattggagatggtctcagcccggtaaaaatgggttcctgcaaaaccaggttaaagagaatgattaacttgataacaaattgaagctccgttaatttgaaatagggactacaagacaatcaaaataaagacactataaaatctaaaatttacagtcaaccgaattcggagtaaaatattcacttatttttttttgttaaagaaaaaaatattcacttaagtgagaagaaagccatataaaaggatagcttaagttaaagagaaagctgttaaagaaaatgcaacaactcatgaccttgttatcaccaccactctctcattcttctctccttcccaccgtcactaccaatttcgggtcaccacgattagtcactacgtgcatgggccatgcagggcgtaaaaatatcaaggataaggtggttctcatcacaggtacaacaggcacaggcaagtcacgcctctcagtcgatcttgccacccgtttttttcccgccgagatcataaactcggacaaaatgcaaatctacaagggattcgagattgtcacaaatctaatcccactgcatgagcaaggaggagtcccgcaccatcttctaggtcagttccacccacaagacggtgaactcacccctgcagagttccgttctttggcgacactgtccatctctaaactagtttctagcaagaaactcccgattgtagttggtggatccaactccttcaatcacgctctactcgccgagcgttttgacccggatattgatccattctctcccggatcgagtctttcaacgatctgctctgacctaaggtacaaatgttgcatcttatgggttgatgttttagagccggttctgttccaacacttgtgcaatcgtgtcgaccaaatgatcgagtcgggattggtcgagcagcttgccgaattgtacgaccctgttgtagattcgggtcgacgactaggggttcggaagactataggagtagaggagttcgaccgatactttagagtataccctaaggagatggacaagggaatttgggacttagcgagaaaggcggcgtacgaggaggcagtgaaggggatgaaagagaggacatgtcggttggtgaagaagcagaaagagaagatcatgaagctgataagaggtggttgggagattaagaggcttgacgctacggcggcaattatggctgagctgaatcaaagtacggcaaagggagaaggaaagaatgggagagagatttgggaaaaacacattgtggatgaaagtgtcgagattgtcaagaagtttttgttggaagtttagtctgtttttcccagttatacaacaacaaatgtacgtgtgtgtgtttgtcttttaaatcatgtttgatgtctagatttgagaataaaagtcatacaagagcatatcttcctcctgatctcctcgatgtctactcatatgaactccaccatacttatacatatatgcttgtagtgcctagagttgaaacatattgtatctagatcgcaaaaattcataataataagggaagttaaaaaaagggatatatgatgatgtttaatgatactggtagtttgtactacaatcccttgcaacatgatgagatatatattatgattttatcatagtgataagtcaacagtaaaatacaaaataatattaatacgacattctgatagggataaaaatacaggagtcagtaaagattgagtgagagagagagagagtaatagaagtgtcttttagcatattagatagagggattcttgtacatagatatctatatagcttatacacacagtgagccaaaatactctcccaaacatttgagtataatatggattccacaaatgccccaacttatgaagtagaatgttgcagt

SEQ ID NO: 30624 - DNA, 2612 bp, Arabidopsis thaliana landsberg
ctagaaatatcaaactccgataatgactgctcctcagagaccaaatgctcgaatgaatcccagctattccgaccatcagcagcttcgaaaccgctcaatgtgttgtaacttgactgtttggaaacaacgatcatttcttcagacactccaccattcaatgcatttttcggttcagattcatcttttgattgttccgcaagatggactttaacaaagatatgtcctttctctgtgaactgtcaaaaagacaacatcttgatcaaacaaaaatcatatacacaagctgccaacaaaggcagagattgaaatagggactaactttaaccgaatttccaacaaggtttatgattatctgtctaaatctccctgaatctcctttgactatctctggtactttgtctgaaacgaaaaccgcgagctgccaaatttgaaatcaagaaatcagcagccacaactccaaatagatgtatctttattccttggattgaaaacttacctcaatgcttttgttccttgactcctcagagaatagagaaaggacatcatccaatattgaacggatatcaaatggtactgattccaactccagctttccagcttcaatcttggcgcgatcaagaacctcatttatcaatgcaatcaaagctttaccacatacttgagcggtttgagcgtaatctctctgtgtcgagcttagttctgtatctaggagcatagcaagcattcctgcagaaaatttttaaaacagaatctttgaggcagtttgagaaaccaaagatgaaaggcaacagtactggaatttgtttgaagatgtagtaccgagaatgccattcattggtgtcctgatctcgtgagacacggtagcaagaaactgcgatttagcgacatcagcagcttctgctcgaactttaagctcttgcatttcatggaaatcatcttcgacttttactatgtgcatagctgcaccatacagtatataacccaccaagaaaccaatcgcaaagaacaatggcacagttgtgagcacattcaacggtattggtgccttttggtggtacctgcactcgaaattgttcaaacaagatatcagtttttagatatcagagagtattttagctttaagattttctgtgtggtacctgcatatcatcttatgtttcctgaaggggtctccaaaatcgagcttgctctcatgagagagagatctgtcggcttcttcatcttgattaccatacatgacaagtggatctgatgcattggtgatatcatacacatgcacaactattgcttggttaccagcaagctgaccaagtaaattctcgactagagactccacatcaaacgcaccaccaaggtacctgcatttcaaattcaagcatcaatctttactttacacacaaaccaatcttgaaatctcaaaaaacctctttcctttacatgatcacacacataaaccaatcatgaaatctcgaaaatctctttttacatgatcacaagcaaaagtttgctccagtaatcagatgggaactttaccctgcagtggctgcaatacgctcttcgacagtcggattttcaggaagagaagacttgtagacagggaatgtcaacacaactccgagatggtgagtttccaacaacctaaagggctatcaagacagcttttccggtttctctagctcgcaaaatattctcacgatcctcctgagaaaagatagccaaaattcagaagaggtgcaggtcggatacttaaccgaaaaaacaaaaccataagtgtctgataatgtttatattacctcgcctgacatcatatcgagtgactcaaggtaagagacactatcttgagagaatataacaggagcatactcatccctaaccggtgaaggctctcctctatccattgtctttataacccaattgtgctgccgctcaaacatctccctctcaaaattcacaactttttcagcataagccactccacttagcaacggtctctcaaatgctgttcttgccgtgtactccgcaaatgtctcctgcaaaattagccacaaaccaatgagtaaagcaaaggcctaaatttcccttcatttactcaataaccaaacataaaagagtaaatttcaaaaacttctggttccaaaaaaagtcagctttgcatttatgaatcaaaaatttcaccaaagctttgagcttttaataaagcacacactgacctgatcaattgcagaagggttcttgtggtaatgaaaagtggagacgagaatagccaaagcatgaacatgattaacactaacactaaattgatcctgcaacattctagctctttgatcacacatgctgaccaaaacctcttcccttctaatcttattagcatcatccatccactgataaatcccactgcttataaacccaacaatgatgatccacagaatcaaagcttttggtaacaatgctcgatgttcttgtatgaaagttgacccttttttattacccattagatcgttattattattattgttcatcttcaccgccactgaatgctgaagctgttaaaataaaaatcttccaaaacccatcaaccccgaacgccaaaaatcgatctttctcggcttttc

SEQ ID NO: 30625 - DNA, 779 bp, Arabidopsis thaliana landsberg
taactttgtcgagaactcatctcagtactcatatataaatcaagcctgatggtgctaacacggcagttcttcatcttcatgttcactaaggctaacaatttcttataagaagtttctttgacacctcaacccttggaggaagtgtataataatactatgtgaccatcaacacgcaatcaatacacgcaccaaacccaccaaatgaaatccaagataaacatacaggtatcatgaaccaccccctaactttcaacagaaactgaaaaaggctatattgatgttacctgtgggataactagaagcgatatgctagcatacagaagatcaattgatattccttggaacttaaatttcatgactgggacatgggcatcagtaacaggttgaagttcagtcacttcttccatttcagccaatatatcacggaagaaaatgaagaaatcctcctgtaaaaataacctgttagcaactaaactaacccaccagacctttacatcagtaagacgaaactcaatagttacctctcggttaacataagatgggccaacacacaaagtatcaacatcagccataggtccgtgaacctgcaaaccaacaaaataaaaatttcacttttatctagtaatgtagagacgaatacaatgctacttctcttcatttcagtgataattcaagatactcacaaggctcaatagaaaatatatgatccaagtaaaacctttccccaaactgattagcatgcagcttggatctttttaaacctttaaacctttaaaaaa

SEQ ID NO: 30626 - DNA, 864 bp, Arabidopsis thaliana landsberg
ctactatgtgtttgtaattttggtatcagagctatggcagtctaaactttggctcttaacttctcaagtcgtgtatacatcttataactgttttctaccatatgctattatggaaagtatgctctatggttgccatattaatggatcctctacatcagaaatccgttttagcaagaaaaagagaacataaaaaaagaaatcaatgaggtcttagagctcgaagtaccttgagacttttaaggttgataagtgttttgccttagtttgcatagctaagtacctcttgattaatttcttaatcttagcacttatttataataagaaaaacaattcaaggtttgttattacttcaagagagataagaagcaaagtattttgttatggtttctgacttccacatacactatggaaagtacatcttcttttatatcatcctcttctttcagaaaatccaatgctagtaacgtaaattatctatgtgaagtagaatatgtgagagcaaagtccctattacccaactccctttactcaagccctacaaagccttcacaaaaccaaactccactttcccaaaattcataaggcatggattcggtcctaagaaacatgcggcaaaagaaattcttctagcctctcaactagaacaacatcttaatccggcaattaagacagaacaaatgattcccctccgactcaatgaaggaatgttgcatcaatggagagtccatggatacacccatctttactatggagcaatacgactagcactaactcttcatggacggaaaggtctacgtgttgtggcaagggtcgcccttctcgacaccagatacaaagattatgaacatgcatgcatagcaacaa

SEQ ID NO: 30627 - DNA, 2023 bp, Arabidopsis thaliana landsberg
agcccaatacatacaaatagctgaagcaggctcgagaagcccaaacaacaacaacaaaagctgaaacgagagtcgacaccccttcctgcaaacacaagcaagaacagagaacaaaagccaacagagattactaatgctgtatagataaacacaattataacatagaaattgatggagaagatcagtttctaagaaaatgtagtggagattgacaacatcgttggccgagattctggatttgcttgtaaacacaataaagccatttccaccatcttcaagagcttttctctattttgcccccgtggttctaatacacgtttatcggaaatgcttcttagcgacagagtttctcctggagacgaagacaaactcgataccaaatctcccggatgtttcccaattatcaattcgagtatcaaaaccccgaagctatacacatcgcatttctccgtcaccttcatcgtgtaagcaaactctgttgcgaaaaatcaagttcaatttcgaatttagtgatttaaatttcataagctcaaaatcaaatttagggatttagatttacctggtgcaacgtagccgtaggttccagcaacggcggaccagtttgatgaatccgtcttgagaaacttcgctgtaccaaaatcagagatcttagctatgtaatcgttattgagaaggatgttgccgctgctaatatcacggtgaacgatcggagttgttcggtcatggtgcatatacgataaagcgtgagccacacctttcacgacgttgatccttttggtccaagtgagtcgcttagcttcttcgtcgttggctaagagtttttttagacttcctttttccatgtactcgtagatcagaaacgtgtggcggcggtgtgagcagaaaccgaagagcttcaccacgttgcggtgacggatctctgttaacgctcttacttcgtttaggaactcttgcttcaccactggctttgatatctcttcgtctattgtatcatgtagccttttcacggctactatcgcatcttggaggtttgctttgtagactttgctgtatcctccggttccgatgaggtgtgttggatcgaattcgtttgttgattcaatgatatcttggtatttgaatttgccatcaacgctgaatatggacatattctctcctgtttcagaatctgtgtttcttccattgtgttgttttcgtttccgaatgtagtaggtgaatgtgcctgcacatatagagagaataacgagtgctcctaggattggcactagtatccacacaacaaggttgtcattcttcttcggtttcttcaactcacggcatggtttcaacctttgtttaggaagattactgcataagcctttgtttccctccaatgcttctgctgctgcatttcgaaacgctggagtatctggaagcggaccttcgagtttattgtttgatatatcgacgtacgtcagcacattcatgccctcgaaagtttttttaatgagacccgagagattgttgtgtgagaggtcgagcttgtcgaggctttgcagggagctgagttgtgatgggatttctccgtcgagttggttgtggctgagatcaagttgcgttaactgagtcagctttgatagtcggggaatgcttccgtcgaatttgtttctgctcaggttcatgtcatgaagcttgtaaaaggagtcaaaggtttgtgcgatctggaagctgaaaatgtttgaggataagtcaagagactcaagattggttaagagtctgattcctgaagggattttgcctgatagccgattcccgttgagttggagttttgatatacggttgacattgctgattgattcaggtagctcgccggtgatgcggttggaagatagatcgagctgacttagctgtgtcatgttccaaatttcaggtgggatggctccagtgatgctgttgtttgagaggatgaatgcaaccagcttttgactttgttcccagttggctgaaagttgtccatgaaagttgttgttgctgagatcgatga

SEQ ID NO: 30628 - DNA, 223 bp, Arabidopsis thaliana landsberg
aattatctaagaaaatgatgttttattttatctaaatgatgatatatttgttattaccaaaaagagctgtttgggttaaacaatagattgacaaatggaattatacagttatacttatagcatgacgttaattaaacttcttcaaagagatgcatgtatgcaagctaaatcaacaaaatgttaaagcaaagcgatggtagaccaaaatataaaatggaataag

SEQ ID NO: 30629 - DNA, 1333 bp, Arabidopsis thaliana landsberg
  unsure (1)..(1333): unsure at all n locations
tgttttatagaaatatctcatgtagccttttcattatcgttttgcagtctttccattactgcaagtacaggcgcgacgagaatcagctgtacatatttgcggatgactgcgtgccgaggtggctgacagcatcgcaccatgtggatttcgataccatggcaggtgcagataagtttgggaatgtgtattttgtgcggttgcctcaggatctgtcggaggagatagaagaagacccgactggcgggaagatcaagtgggagcaaggaaagctgaatggagcaccgaacaaagtggatgagatagtacagttccatgttggggacgttgtgacgtgcttgcagaaagcttcgatgatcccaggtggatcggaatcgataatgtatggaacagtgatgggtagcataggggcattacatgctttcacatcccgtgatgatgtggatttcttctctcatctggagatgcacatgaggcaggagtatcctcctctctgcgggagagaccacatggcttacagatctgcatattttccggtcaaggtaataaaccaaaacccatttgcttttcctccaaatcaaaagaagtcccttgattttgaatttgacactttttgcatcttgtaacaggacgtgatagatggagatctgtgtgagcagttcccgacactcccaatggacttgcagaggaaaatagcagacgagctggatagaacacctgcggagattctgaagaagctcgaagacgcaaggaacaagatcatttgataacacacgaaaagagagagagagagtcattgttttgttgaaggacaaagtagagagtagagaagaaagaggttataatagattttgtaaagctcttcaatggtttgttaaacaaaaccccgctcttgtgaaaactgatgaattaattgcaagtttacttttgaatctacaactttgtttagagtatatttagttaggctttgaagaaacttatttgttggttttaagatctaatgtattatatatcgaaaatctttaacccaccctcaaatcaaaacacaaattttttatatttgggtaatctgaaactggaatacaccggtgttttatatctatatctgtatgtgttagtttataagtctaagacgctaagaaaatgttggacgaattgagtataaatgttttatatcaaggcatcaaaagcaataaagacaggnnnnnnnnnnnnnnnnnnnnnnnnnnagtgccgatagaggaaagagatcaattagcctccttttccttggtctggttgatgcaaataaagctgctaaacgtcttcttctttcttcagcttctcattatgcggt

SEQ ID NO: 30630 - DNA, 1205 bp, Arabidopsis thaliana landsberg
aggtcaattcctgtataaggaacaatcccaagaagagaaggaactgacccttgtagaaagcccgaggtccctcccgaacccatatatcttttgtaagcttccacaacttaggtgcctttccaccttcactgacacaagtctgtaaccgagtcttcacgagatccatagggtaaatagcggtttgagccaatgcaccagccattccacctgccataagtctcccacttgtaccaatatcaccatcctcccctccaatcatgggttttagcatttcgtaagcacaaaacttaatggcactttcaggagcaaccttcatgacatttaacccattacctctaaagaaacccatcaacttatcttctctccatatcttcttaattgtcgggaggacccctgcatgtgccctttgaacttgcaaaacaaccttcagacgatcaagaggcgcagttgcagttctagaaacagctccggctagtcctccagcgagaagtaatctgcttcttttcacatgtttacttataccatccggtataacagcttgctccccaatatctatcaagcacaccctttcccaatgatgatatatgttttcaagggtggcttcatgaggatataacaaaagaaaatctctccactcttcaaacgttatagttccattgttgtccttatcaacatgctccacaaaacgagcgagttcctcatcattgatctcaatgcctacaagaacaaaactgtagggcttatataggttggtgatactcaacaatccaatgaaataacataaacaatcaaacacgttctaacatctcaacacaatgccaatatagcaacttcaccataaacaatcaaaatccacaaatctctcataaaggtacaaactttacatgatgatcaatagcaaaaagtaacagtataaatggaacagtaacataccggtcttaacaagagcctcccaaagctcctcaggcaaaatgcatccattatgctcaacatcaatggcttggaaaatcctgtatagctcaagctccttagcattaatgtatcgacgaaactcctggttgtcaacacgccgatttagattagtgtcgtagactctgaacaagacgctagcgtacttgtactcaggaggacactgacggcgatcttgactcctctagatccgggtatcatctatgaacccctgcaattaattatcgtatagatta

SEQ ID NO: 30631 - DNA, 1035 bp, Arabidopsis thaliana landsberg
  unsure (1)..(1035): unsure at all n locations
tgttatgtgatataggttatgagaatagcggatttaggagtttatattgtaaggataactgttcaggggaaggaagaggttgatgcgtgctttgaaataaaagataaactcgttcagcttaagtaaataaaagatggccatacttagttttctctatgtttgtttgttgagtttgagtagtatgaaactgaattggtgtttttgcttgttggttacagttacaatataccgctggttgcagatattcattttgcccctactgtagccttacgagtcgctgaatgctttgacaagatccgtgtcaaccccggaaattttggtatgttttatacttttatttttgtctttcacttgtttctttaatcgagaatgaatgatttttttcctttgcagcggacaggcgggcccagtttgagacgatagattatacagaagatgaatatcagaaagaactccagcatatcgagcaggtggaacgaagcctttgtttcacttgtcttgtgaaactagntaagttttaatcagtcctaactaaccgtgctactctttttctttaggtcttcactcctttggttgagaaatgcaaaaagtacgggagagcaatgcgtattgggacaaatcatggaagtctttctgaccgtatcatgagctattacggggattctccccgaggaatggtgaaatatcttaaagcctttaaaaaagtttctcttcttacacatgagcttgttgtcttacctgagttctgtcacacaggttgaatctgcgtttgagtttgcaagaatatgtcggaaattagactatcacaactttgttttctcaatgaaagcgagcaacccagtgatcatggtccaggcgtaccgtttacttgtggctgagatgtatgttcatggatgggattatcctttgcatttgggagttactgaggcaggagaaggcgaagatggacggatgaaatctgcgattggaattgggacgcttcttcaggtacctcattacatggcaaaagggaaagatctttcctttacagttcat

SEQ ID NO: 30632 - DNA, 3630 bp, Arabidopsis thaliana landsberg
  unsure (1)..(3630): unsure at all n locations
cagttaactttcgatctctactttcttttgaagttttgctatttgctgaccatcaagaagttgcccttttttttgttttgcttcaagtatctcaatttgttgcaactttttcctcaaagctcggacttctttggaattgtgttgagtcagctcatcttctggttgcaagaatgaatccattcgagtaccaccaatactggaaaagtgtttcacatggctgtcacgagttcttagaatgtcgctctcactttcctcctcttcactgtcaataacaacaggaaatgtggctgttggggttggaagtggtcgggagctccatgtttcagatgatctgtcatccagtaatttctcaagattggcaagaacatcaggtgatgtatttgcaatagattggggagaaaatgtcaaaataaagtcaaggtttcgaatcacaatgtcctgcagggagaacacacgtgtaaggtaatcatcagccacaacatagaaagagaacactgaacataaacttctctaaagtttgtatctctacggtttagtgtgcaatcatcacatagggaaggcttgcattnnnnnnnnnnnnnnnnnnnnnnnnnnnnnnnnnnnnnnnnnnnnnnnttcaagcaattgaatagcatttcgtggctctacaatacactccgcggccaccttctcgcataaacttttcaagctaggcactatcctctccttaggattatcgtattgcacggattgtaacacgttcacggattccacatcgtcaaacataaaaccctcatccagttcttcattttcttcttccctacatttatcagcttgcagtgtctgagacttcttaagcacaataggagcatatgcaggatgatacagagaaccaacaaccagaagatgagtttcgccaacagcaactgtggttgcccttttcaagttgtggaggcgagaaagagatggtgcaatatctttaccattcttcccatcccacatgtaaacttcacctgtactagtaacagcagatgcccagtatttacccgctgaaatgctcacaactgttttaccgtgcagcgaatgcaactgcaggaatcaggattaaccaaattttggttattactatgcgagacatattgagttatatgttttttaagataaaaaaaagaaggttgaatccaacctgttggcatctaagattggagtcagaggaaacccaataaaagaatgcaccatcttctgctagagccaagctgtgtaccatacccgtagctattgcagtcaatcgaagaggtcttcttccgtgaaaaattcaatagtgtgttcccagctttctttaaattccgggaaatgataacacgtcttggagtcaccagccgatgaccccaggtgtacacctggtcacagaagaaagaaagaaatactgaagaaaaataaatttttatccaaattgagttctcatactctagttcatacattctataaactttacacactgaaataatagtattaaaacgtttaacttaacatgtagtaagaaattttacctctccatcatttcgcagcactagagtgtgatattttgaagatgcaatagccgtgaacacttttcctttcaagtaatcaaccaatctgggagagtagtttgatgctgagttggaggttccataaccaagctgaccttccttgttgcatccccaagtgaaaacttcaccgcagtcagaaactacggcggtgtgtttgtttgctgcagaaacagctacaatcttcgccttcaatgaagtcactttgcggggtgttgcctgagtatccacagaggtataaccaagctgaccctctacaagagcatcacaaacaacatcagactctaagataaaagaccacgaggtgacccaaatagattgaatatatttccatctaattcagattaactaagaaactgggcttagaggtcgaaactaaaacttgagtatactatagcactaaagatccattcctgaaatataggaagccgtttaagtgttttacctctattggaaccccatgtgtacacatccccgccttctgtagcaataacagtgtggtgcttagctgccgcaactgcttttacacggcgagatcctaaaccagatatcacctggcggggagtaataactgcagcttgaccactgagatagcaaaccagaaaaataaactcaattgtggtttatataaacttacgaaaagcctatggtaagctacaaaaaaaactaccaacctatgattctatgtacgcttagaatagaagactgtttttatctttcaatgttccatcagaaatcaagcaaggtaaattttgaaaccacagtaacgccataggcaagtagaaatcttcatatagacgcaacaaagtagaccatgaaaactttgtcggaataaaagcaattaagctcctcctccagtcaccatatcagtgaatttacaacaatgcatacctatgaatgtcaaattcaggatgtccaaggcggccaccccttccaaatccccacgtgtagacttctccatgagtactaatggcaacactatgaaactttgcagcggaaaccaacttaataaaacaaccatgcagtgaatcaactctccctggtaccttctgaacatgttgattgccagttccaagttggtagtttgcaccatttccccagctgaaaacctctgtagccactgaaaagaaaaatgaagccaacatttcagcttctcaaaagttgcgtaagaaaaagtgtcaagactgattaaggttctccttaaagatcaaagagaaaatattagttacccgaactttgttgctcgccaataacctgagccactggacctgagaccaaatcaaccggtgttcgcagttttatgtcttctagagtaaaagaagcacctgagtcaatcaatacgctagctaccgcgagatggccaaaatgcaaagctcggtgaagactactccaaccagattctccatcctgaaatggacattgtacaatatagagcaagctcaattttccaagcattatgaacacaatatatgcaacaaacatagagacagatactgaaaagagacataaataggtagaattaattacaaacatggaacttgtagattaaagattataaactgaagaaacagatatttaaatatatgatgacacaaaaagaggaaaagtcacaaaccctagcatctggatcagcgccagcagcaagcagtctcctaacaataggaatgtgatttctccatacagcaatatgcagaggagtgagaccataggcattccttaaatttatattgccaccagtcttcttgagtatgctaagtgctgaatccacataaccagcgaaccttcccgtatagcaaaccacaaatctttcctagatcctgaaagtgagctcatacgaggagtttgcaggttcatcgttcgggtatgagtagagtctgacaattccagatttctagccggtaataattcccacggacaccttgtacgccaccaatgttgtgtgtagtccgaatgactccagagaaaaagacccggataactctcactaaacggacaacaaaaaggatttctatagccctcgtcgcagtttacgccgtccatcattgctaatgctcattattcatct

SEQ ID NO: 30633 - DNA, 2772 bp, Arabidopsis thaliana landsberg
  unsure (1)..(2772): unsure at all n locations
agcatcagttctatgccaacttgaagaaatgctcctttggacaaaccgaagtgtcctatctgttacatattatatctaaggatggggttgcagctgatccagctaagattgcaaccatggttaactggcctttgcccaagtccatcacagagctgcgcgggtttctggggctcacaggatattaccgtcgctttgtcaggaactatggacagactgctaggccactcactgagctgttgaagaagaacgcgtttgggtgttggagtgcagcagcaacagacgcgtttcaagccctgaaaagcattgtcacaagcctaccagtactagcactgccagactttacgaaggagttcaccattgaaactgatgcatctggagttggaattggtgctgttctatctcaggagaggaggcccatagcttttcttagtcaagcattctcttctcaaggccgcatcaaatttgtctatgagagggaattattggctatagttaaggctgtgtcaaagtggaagcactatctaacaaacaaggagttcatcataaaaactgatcagagaagcctgaggcatttgctnnnnnnnnnnnnnnnnnnnnnnnnnnnnnaaaggtgggctgcgaagctgttgggcttgaactatcgcatagagtacaaaccgggagtagaaaacaaagtggctgatgcactctctagaagaccacatgaaggtgagttgcttatgttgacacttgaggcgcctaacttcctggacaaagaggaggtattgaagcaagttaaggctgatgctgagctgggacagattctggagagacttgagaaaggagaaaaggctccagagggatatatgctgagaaacggactgctattgaaggacggacgtgtagctttacccgctggttcttctcttataactcaagttttggaaaggtttcacaacagtgccatagggggtcatgaaggagcccttaagacttatcagaggttgctgaaggaagtctattggcgtggaatgagacaggatgatgtgaagtacattacacggtgtcaggtttgtcaagagaacaagtactctactctctctccagcaggactgctagcacctttgcctattccaaaacagatatggagtgacatcagtctggattttgtggaaggtttacctaagtctaaagggttcaattccatcttggttgttgtggaccgcctcagtaagtacagtcactttattgggttaaaacatccttttactgcaaggacagtggctgaatctttcatcagggaggtagtgagactccatgggtttcccgaaactatggtttcagatcgagatagagtgtttctgagtcatttctggtctgagttgtttaagctgcagggtgcgtccttacacaaaagcacagcgtatcatccccagactgacgggcaaacagaggttgttaaccgatgcttggagacctatctgcgatgtttcacgagtaggagaccagcttcatgggcacaatggctgccatgggcagagtactggttcaacacttcctatcactcatcaactaaacacactcctttcatggctgtctatggtagggaacctccgaagctgctgcgatatggagacacaccaaccgccaacgctcatgtggaggagctactccgtgacagagacagtttgttagtggagttgagagagaatttggaagtggcacagctgaatatgcagaaatcagccaatgctcatcgacgtgatgttgagtatcaagtgggagactgggtctatttgaaattgaggccataccgccagcagtcattggttcaaagaagaaatgagaagcttgctcagaggtattttggtccttatcagattcaggaacgcataggtcgtgttgcctacagactggccttacctgcctatagcagcatctaccccactttccatgtgtcccaactcaagaaggctgtgccaactgcttacacggcacaaccgctaccaccaatactcacaccctccttggaatgggccacagaaccggagtctatcactgatgttcgccgcagcagggaacacaccaacgaggctgaagtgttggtgaagtggcaaggattacctgagacagaatcaacttgggaacgtctttcaagcttggtgagtcaatttccagatttcaaccttgtggacaaggttgcttctctttccggggtaatgataagctacgggttcctttggcattcatgaggaggaaggcaaggacaggtggtcgtaaggcaagaaaggagttgaagaagaaagacacaagaagtggctaaagtgaagaaaggaagctatggtcactagagactctgagacaaacagagtctctctctctttatctattaatgcgatgtcgtttaagtttatgttaccctaaagtctggatgtatttaagttgggaatctctcattagggttccttatcttataacatttcaacagtaatatcactctctaagcggccgttttggttagcttctatttctgatctcttctttcctctttaatttgtctatctcaagttctttcttaacaatttggtgctttcgttgagagcaggtgcaatgacaaactctccacctgtatagggttgagaagtgtttcgcagtgaaccagacaccggaacatgagaagttgacccaagccttgtcacgtctcggaggagtcgcagtgggttggtggagataccgtgagggaagagaaggcgtgaccaactggcctctgtttaaggctaagtgtaagagtcg

SEQ ID NO: 30634 - DNA, 1317 bp, Arabidopsis thaliana landsberg
aaggccgacctacatgataacttcattggggcttatttgtctcaaagacatcacatgccaaatctctctatagattatgtatggacatgatagttgcgtacctaatgaaccacaagtctctatcagtgattaagtcatacgttcgtctcaatgatattcaaaagacaggaccacatgatttgattatatactgacaaagtcacaaaagccttcaaaaaaattctgtggcaagaaaggaaaatttgactagttatagtgtctatctaacaaacaagtggtcatattgatttctgtcttcacatcagaaatcatgaagattgatcactatagggcccttacttatcatgccgtggtccggcaaagccatgtgcttgcttgttggtgtaaaaatttatgagctgaaacttttgaaaccaataaagggttatctacaagtaatgttcttatctatatatactcatcactgactcctttctgctctgcaagtttctcacattttccaataaagcatctaacttacaattaaagacaatccatggcgatcagaatccctcgtgtgctgcaatcatcgaagcagattctccgacaagccaaactgttgacatcatcttcttcttctagctctcttgatgttcccaaaggctactgggcgggttacgtatgagaacaaaatatgaagagatttgtagttccggtttcgtacttggaccagccttcatttcaagatctattaagaaaggcagaggaagagtttggatttgatcatccaatgggtggcctcacagatcccttgcagtgaagaaatttttattgatcttgcttctcgcttcaactgatcatgactcactcgataaccttacttttgtcattgatttttgtacattttgttttcccaattagttttcttcaagagatgagatgacttagaaacagcatctctccttgaaagtgaaacagagacttgtaacactctttttcctcacttacagtgagttggactcaaatctaatcaaaaccatcatttagtcatcatcttgaaaatcttaatttcagtgtccaaacaaactcaccgaggatacaactcagtgttggaattatagtttgaagtttttgcattatgtcctaaagaagaagaactatctgataccgcattgctgtgtgagaaaaatgcaggttttgatggttctgaaagagcaatagtatgtccatctaacatcagaacaacagaagccatgcttggtctctctgcaactatctcttggacacaaagaagactaatgtttatgcatctcatgatcatattcgatgaataactcg

SEQ ID NO: 30635 - DNA, 2161 bp, Arabidopsis thaliana landsberg
  unsure (1)..(2161): unsure at all n locations
ctaagacccagcaaacaaaagtagctatctaagaaagcttgcattaccgataaaagtttcattgattcttacagaagtttcatcccaattcatcaaaattactcatcagcttcactgttcaaaccaaatttctctcctaaatcaactacttcatttgctaatatcatccaaacacgatctaaacacaaaccaatcgatcaaacacatagaaatcgagatcgtaaaaaaaaaaaaaaagagagtcagacacacaaacacacctccgccgttgaatttgatggcgctctgcaacttaacaacagtggaagcatctcccttgttcacagcttgatcaagctgctcaagagcattattgtaattagtaacataagcctggtgatgcttctggtgatgaatctgcatgatctctccactaatggccggttccaatgcgccataatcgtaaggaagatcaggaagcgtaaaagtctgaatccctctgatcctcaatagcctcgatgatgtctccttcaagccggctagggtttttctactcgctacacaacgaatcgccattgttggaatgaagatttgtttctccttctagtggtcgccaaaaatgaacatgtgtataagtggagggttatgataatatcactgcctgtcatgtatagagaaaagtgactgttttgacacgtagacatgtgatttttatttatgggccgtaatattggattagtgagcccaaggccttaatataataaagcgtaatttttaatattttgtgacggctaaatgttacttttttgtttgttcacaggaaaaaaataaagaaatgaagaaagttgactagaaacggagaatttccaaatgttgaatttgttggatgcatgtgaaagccaattctatttggttcctccttgataatccacccaatcgctgtcattctcccatcaatctagctgctttcacaaaccattgtactgagatcgtatctttaaggtaaatttcaaatcggagtcggcgagatcgaaataggaacctggaagtcggagaatttgtgtaaattcggttttttttttttaattctccgatggatagtttaagtgatatcgatggtgatttcgatggaagaaatgaaggaggatcgtcatcggattatcgattgttgggtcggcagattacggttcatcagttcatgggtggtggcaaaggcgagttcttttttccagaatttgtgttttttcatcattttggtagtttgtgatgagaattttctcggatttacagaacagaaaattcaaattggggatgatagttggaatagttagggtttctgattttggttggttgtgaaaatcgtcatgtgtgtaagtacatttagcattttgggtatagtagaaaatggaaaacttggcaggtgaaagttaggtttaggtttgattttgaatgagaaattgattgattcaaatctctggatacgcatgatgagttcataggtccagcaaaaagctactgtttgtgatttttgtatggctttgttctttgatgtagctgctgacttgctcttatggaggaggcgacatctttctttgggggttatcattatatcaactgtagcctggcttatattcaagttttccgggttgcctttcttatctgtttcttcggatgtcttactcatcgtgatcatgatatcattcgttcatgcccgggtttctgcttttaggaataggtgcgctctacttttcactagtcttctttttcttaattctttgctgttatgtgactgattagtgatgatttctacctgttatctctttataagcagacagttgcattcgttgccagagcttgttctatcagaggaaatnnnnnnnnnnnnnnnnnnnnntttccgtataaaactcaatcacttgcttgtaatggctcatgatgtcacagttggcaacgattttcgactcttcttcaaggttatgaagctaacccattcagaaactcacgatgatgttgagtgaaatgacatgggaaccgttaagcatctgaactgttggtctgacgatttttcttagcaggtggtgatttgtctgtggcttctctctgccattggtagctatatatttctctgcactcttctttacatcggttagtaacttgatccttaaatgcaaatgaaaggaaa

SEQ ID NO: 30636 - DNA, 4263 bp, Arabidopsis thaliana landsberg
gatgatccctccaaactcatcaatctgatctatctctctcttccagctgtttcatgatcgatttactcttaacttacagctgattacaattcactgtaatctctcaagaaccctagattctttttttttcttttcaattgtgatccgtcaggtatgtgaattcgattactttctatatcaattcaacgaattccaaaagtcatgttcgcgtataagcaatttaaccttgtcgatttctttatattttctctgtatgtgtagcagcaatgcttgatctttaaatttactgatatctgaagatcgaattagggttctgatctacttgatatttatttgtttgggcttttattcaggttagtgtctgtttattaaaacaatcgaattattctgagttcatatcatttctttggattgaagatttgaattccttttatagcagctcgatcttgggctgaagctatggctcagagtaattgggaagctgacaagatgtaagttaattttgtattcaataaaagcttatcttttttcaattccttactttgatatctttgtgtttttgtaggcttgatgtttacatatatgattatttggtgaagaagaaacttcataatactgctaagtcgtttatgactgaagggaaggtttctcctgatccagttggtaatattacactttctttgttccactttgttctttcttaattttaagttttgatatgtaattgttttttgttgtgtgaatgattagcaattgatgcacctggagggtttctttttgagtggtggtctgtgttttgggacattttcattgcaaggacgaatgagaagcattcagaggctgctgcagcttatatagaggtgaatgtcttctactaacatctgggaatatgttttgttagttttgaattacgtaactgaccagtggttttgaaattttaggcacaacaaggtaaagcgaaggagcagcaaatgcaaatacagcaactgcagatgatgcgccaagctcaaatgcagcgtagggaccctaatcatccttctcttggcggtccaatgaatgctattggttctgaagggatgattgggcagtctaatgctagtgcgttggctgctaaaatgtacgaggaacgcatgaagcagcctaatcctatgaattctgagacatcccaacctcatcttgatgcaaggatggcccttcttaaatcagcaacaaaccatcatgggtaaattggctcagcttcttttttgctgtcgtttttctagtcctcatacctctgaccccttgttgtcctttctttttttttctgtccctaaacagtcagattgtccaaggaaaccatcaaggaggtgtttcggcagcgctgcagcaaattcaatcacgaactcagcagcccactgtaactactactcgagcaccttactttatactgttcaaattttctaacagacaagtctccaatcagatattttggtgtacatctgaatctcttgtacgtgcaggaaatcaaaactgaagttaatttgggtacatctccaagacaactgccagtggatccttctacagtttatggccagggaattctgcaatcaaagcctgggatggggagtgcaggtaaatatatcaatgtattgcattgtagagtaatcgctcaccgaaaagaaaatggtggtaaaatacgtggtagtatgccttctatggcaattagttgactatggactccaaaatttaaatattacttccctgttatgtgcaaaatcatgatgaattacatagggtgatatgctaatggcatcacgagaatcttttgcttacaatttgtataaattcttatggtgttgtgtttgtcccttgtgaaggattaaaccctggagtgagtggtcttcctttaaagggatggccattaactgtaagtctctgtggttcttctaagaatttatttgtttgtcattccaagcccagtattttgctaagtttcttgacaaatgttacagggcatcgagcagatgcgaccaggtttaggaggccctcaggttcagaaatcttttctacaaaatcaaagtcaatttcagctctcgccgcagcagcaacaacatcagatgttggctcaggttcaagcgcaaggaaatatgactaattcacccatgtatggtggtgacatggaccctcgaagatttacaggattacctagaggaaaccttaatccgaaagatggccaacaaaatgcaaatgatggatctatagggtcccccatgcagtcaagttcgtcaaaggtaagactttctcaaattaccaataaatgcatatccctgttggatgcagtggaatctgttgagctgcattatatcatctttttcgggtagcagagaaaaaatgaagcatctcattttttctgtgttccgttaagtggtgtaattggatcattacgtctgtccttctatgcattttttctgataattgctcgtctatgctttaaaattgtactcttttgggttatcgtctgactgctatactttccatttggaaaatgtgtaaggtaatgtgtttgtgttatcctaatgtagatctacataggtatcagaattttgttttttcttgttaaccacatgaacccaataatagagaaaacttatccgcaattagtagctgattactaccaaacatggggactttactgctaaaattttatcaatcacatttttttcttctgattttctctctttccgttgcttgttggtctatagcatatcagcatgccgccagtacagcaatcttcttctcagcaacaagatcacttactatcccagcaatcacaacaggtacttttatgtggatccaatccctcaagtcttatcaagcatgtggttttaaccaactgaatatattctttagtgtctgagatgattgagccacaacttccttttcgtgtatctgatagaacaaccgcaaaagaaaagggccttcctcttctggtcctgctaacagcacagggacaggaaacactgttggcccatccaactcacagccatcgactccgtcaacgcatacccctgttgatggagttgctatagctggtaacatgcaccatgtgaatagcatgccgaaagggccaatgatgtatggttctgatgggatcggtggtcttgcatcatcagcaaatcaactggtatgtttcttaatttctcagaagaatgataacgacaatctagttttcctccaataacatctggatacagcatgcagttgtgttgtgtgaaacaagtgctttcttagcagcttgaatattttttttatatcccatggggccgtgtttctttcagctttcttatgacaagaattaatagctgcaggatgacatggaccagtttggagatgtgggagctctagaagataatgtagaatcatttttgtcccaagatgatggagacggaggaagcttgtttggcaccctaaagcggaactcttctgtgcataccgaaacctcaaagcgtattctaacaccccaaggataagtatgatacaagtagacgatataaatatatactaacacggttctttttctcgtttcagctttcagtttcaatgaggttagttgtataagaaaaagtgccagtaaggtcatttgctgtagcttctcatatgatgggaagttgttggctagcgctggacatgataagaaggtgcaacttcttaatttctgagatacggtttgcttataaacttgtcatggccctaaaacagctatagatcatttataggtaggtaacattttgtttgtttaaaaacagataatgtggatgcaaatttatttttgtcagtaggtatttatatggaacatggaaacactacaagttgagagcactccggaagaacatgctcatatcatcacagatgttcgcttcagaccgaattcaactcaactggcaacgtcatcattcgacaaaacaatcaaaatctgggatgcttctgatgtatactaatttaatttgtttctcttttatttgttgcaatttttcgtgttctgctgtgactaactactaccaatttgtgcagcctggttacttcctacgaacaatttctggtcatgctgcacctgttatgtccattgattttcatcctaagaaaaccgagcttttatgctcctgtgatagcaacaatgatattcgcttttgggacataaacgcctcttgcgttcgtgctgtaaaggcaagccctgaccttttgtatggttctctgggatgtgaactctgttgctaacgttgaatt

SEQ ID NO: 30637 - DNA, 705 bp, Arabidopsis thaliana landsberg
taagctgactccgtctcccagtatgtttttttcaacctttctttctacttagacgttcaagttactttatctcttctgtttctcttataagtgctgtgtttcaggggattcttttaggttcctatagtatagtttaagaaaactggttgtgtcagctgaagtacaacattctgcattaaaagtcaacggcgacattctttcaggtttgcttaactaatcgcgaggaacaccacacaagtaaagttaaactttcttcaaataggacacaaaaccagcaatttgcttaactctgctctctgaactgttcttctatataacagagttgtttttttcgagcttcctctatttttccagttttcttgttttgagggtgttattttcatttgcagtatgcaaagtttgtgaagcccgcgtttgatgattttgtgccccattgaagaaatatgctgatgtgatcattccccgaggaggtgacactcacgttgcagctgatttgattgtgcaacatgatctttgcaaaatctgcccaaatgttttatgcttgattcagaagaaaggtttaaaggttaaaaaccatattctcactctaagatcataattgcagataagaggcatgcataccactattcgagagatagacatagcaaaacatgaccttgtgttttactcagatcgtttggagacatgtgaaagcttgacctgaca

SEQ ID NO: 30638 - DNA, 2244 bp, Arabidopsis thaliana landsberg
taaacgacttgtgtacgacttcaatccgagaaaaacatgtaccgaccttttcctgtagttgttcttggagaatgcaattatcagctgatttgatctgtgacaggggtagaaccaagtttaagcatacggtgaagataatcaatcttctgattttgataatgtagaaaacaaggcggtactttcaataaaaataaaaataaaaattcacctccagctcaaagctcttctcattgcactgggtcatcagactcataactttctgaaaacaacaaaagagcaagatatcagagcagatcatcgtttagtcttaaaccagtgactttgaaaaggtcaaccatcatgttctcgccgtgaatgagatgtggaggttaaatacctgttgcatctcaactaatgatgcgttggcaatggaagcttcaccactctcaattatgagctgttccaagcctctcatttgcctttgcttttcgtgaatctcgcgttccagattctgtatctgcatgcaataatttcttaggttagttagttaagaataagttaaatgtgccacttcaggtggacagtactactatgttacctgagtttgtgagttttccggatcatttacggactgatccaccaaacgctttagtgtgctcgtactgaaagctatctcaccagcaagcatcttaacttgttcaaccagaaggtcgatttcgtccggcgtcatgacaccctacaaaacgccacaagccacacaacaatcagataccatttttctaacagtcaacagaaacgttggggtaatttactcacttgagtaaattctgcacccggcgagttttcgtcattcaacttgctagaagatcgcctgtggttaaaacctaaagaaccttctgatagaagagctaaggtcgaagatggagatcccagattatcactttccaacagtagagaatcgaatttctgaaaagcaaagagataacataattagtcattgtgttttgaaacagcttctgagatgtggaagcaacctgcagagaagaaaaataaggatcagatagattttcaattacatggtccagagacaagaagctttgaacaaacaaaacagaaacttattcaggttaaatcatcaaaacctattattccaaaactacacagccaggatcgattaaataactaacagaatcactaaaaccgattacctatttgaaatagcaagaatttttcaattagattgtatcactggttggagcaaaaaacttacatcatctttacccgcagagagactgcgctgatgagtaggtatgtcacccgaatatccaggaatagaattcttggtagagactagtatgagcttggtaagcttttggattctgctcattagagctgctttggcttcttcttcttcctccaatcttgattgcattttcacttgcccttcttctaactgttgtgataaatggatagttagttaattcactgcctttagaacacagtaagaatttttaagataaaggtcttggggaaggtccgaacctgttgctttaagctcattaactcttcatgactgacaccaacaagcataccccttctaagctgatcaagttctagtttgagggttgagatttctctttgatatttcttaattaatgacttctcatctataatctgcttttcagaaatgaaaaagaaaagaaaacaaatcaagcagaggttcaagcttatatacccttgagtatagcaatgtacttaattgtaaaacaggtcaaaacatcacctgattgcgtgaagcatatatttctatactctttgccctgctggcaaacttcaatgtgttatgagtttcctcactactgctggacgcaggagtaattgtacatatgagctataaaaagcaaacagaaaaactcaattagcttttctgttgttatggtggagcaccatcagctcaatgcttaactgcttcttacaaattagtcaatataaacaaaacaagcatagagtattgcaatcaaaaaattctaagagagccaaccatgggaaaccagtatataggaattggggaaatattgcaacagagtcagatacagaagagtcttaccgacacatgtccatgaccacttaatgaagattgcagaagacgagttagcttagagtcacgatatgcaatgtcagttgccttaccctcactaagttttccaatcaccttcataaatgaaaccaaaagagataattataagtaaaacggcctcgcatctc

SEQ ID NO: 30639 - DNA, 1102 bp, Arabidopsis thaliana landsberg
ctggaacccagtgaggtccattgactaaggcagtgaggttggagtagaatctgtaagccgttaacgtgtcgaagaaggaaggtagtttcggcatcaacacgggctttgatcgccctgttttcgacgcgccgccatagtgaatgacgcctctggtggtggtgtttgggaaagggacggcgggagcgctggcgtaagggtgagctgccatgtagtaggaggtatcgacggactgatcggcgaagagaagggcgtcgatggtttggcccggtgcgatgacaatgacgtcggtgacgtaaggtgcggtgtagactgcgtcggcggctacaactgtcagtctgtgattggctatcttgaaaaacagttggatgttcatggccgcgtttatgatgcgaagtaagtatctctttcctttcaccacgtttaggctaaacattcctattttcattcattaagaaaataaaggttaatttgcaaactaataagtttggaatgtgaatttaattcttaatatttattcatgcagcgaagttagagaaaaaaaaaaaaaaaaatgccatgtatgttatacttaagaaaaaaatatcatgagattaggtttctttggactcactgtctttggagcatggatataggtttccgggacggccattgatcgtataagcgtcggaattgtttggaggaactccggtggcgattgctgcctcctctaacgcgactacatcggtgttccaccattcacctgtttactaatatattattacacagtactatataataatttaaaacatagaagacttaatttggtcaatattactactgaagtatatagaagtttcaattttaaatgacaaggaccaacgtccttatccttcaatatcattcaccaactgaaatactaacgtgtcgtctgattaacaatttaaaaaataaaatcagatcaattatgaaatacaatttttttaattatatgtatatactcagaaattgtgtgtattttgtttggtaaaagattttactatattgacgtaccaaataagatgggaacttctttgtgaggtttgggaaacgggtaagagtgaccaaatttagggcggaagacgag

SEQ ID NO: 30640 - DNA, 2776 bp, Arabidopsis thaliana landsberg
tagatactacggtactaaagacaaaaattaagagttaactttcttataccattcctactacgaagatagcaaaagaaagagataaagaggtatctacacactagtaacagtccgccttcttgcacaggtggtggactcataagagagggcttcgccaaaattttgtctagaatacctgtgacacgctgctccagaactctctgcgtaaaatacacgaagagttggtatagcttatccatatgccgggttaacactacagtgtccaaattatcggtgccagttacctgaactaagatcgccataacttcatttggagtcgggaaaacagctgtaatggttgctgcttctttgcgtacggtgtctacacataagaagtaacaaaatatatgaatcagcatagaagcatgtttcaagtattgcatgcagatcaatgaccttcaaacctgtaatttccttgaataaagcagaaagtccgcgggcaacattgctaggactaggctgagaaccatggtcaccaagaaccaacctaatgtctgaattcatgacttccacatcaataaacattggacgtgtagccacataatgttgcatagcactcgtacccctgttaaactgaaaatcaagaagaaaaaatactaagtatcaagaaccatatgtacaagaggagaactagacatccattccttctgtgacagctttatgtagaattaaccaggatgtaatcactcgatacgtaaggaaggccttcgctcggatcttagataaaagaacaggttttcctactgaattgtaaaggggcatgctgcagaataaagcattcacctgtgacaaaatcttagcgcattctgacatggttgataaatctctccgctgtgatgcagcatcaaaacgagataaaagcctgttctccaattctacagcatcatactcaaatgtcacaaagaaaaagttgaacatacaataatcctcttcagtaaatatacagaaaacacagtataaacgaattagtttaccattacagtaatcctgaagattagcaactgcaacttccagtcctcggccaggggtagcatttcctgcagctgcactcgcaccttgccttccaatgtcttcctcagcaaaggatcctgatatcgacaaggagagcatggaaatcaattgcagcctaatttaactgtaaattttcattgtttctttttggttttagtaaagtttcgttgttggagagttaaattcttagttgttaacaaatgatagataaaaagttgttctaacactccagacaaatttcaagtaacataaagctatcacatcatacgtaatttctgagcgatagaagcagcctcagctaccccgctatcatcagaaaacaaagcggaaagctccataagatcccctgggctgccgttgaactccattaggtactgcatttgttgaacaaggattactttaagcattcatctaactaaatatgtgaccaaccttgcaacatagatgcacacttacctttataagatctatcgtctggctagcagtttcccgctgagcatatgcactctgacaaaggaagcatgggttaatattggatagaccaccagatagttggttataagcaaggtaaatattacctgcaaatgatctcctatttttgcagcggtctgtccaacacttgaaatacgaccgtccaaccttgcaaagctctcaaacagaccgtccacaaccttctctatctaaaaagagaattcaattaccatttgaagaaatgatcggggtgtcagttattcatcaggaagtgatccatgtacccaaggaatttaatcaaactaatagtattagtctgccaacctcagtcagtgtcttccggtgtttagaatcttgggttgaaacttccttctttagtgtattgagccttccatcaaccttccaaaatatataacaaaaacctcagatatcggaacgatgaaaagataaaacaagggctagtcatcgatgtagacgcaagacactcacctgcttccgaagatcaactaactccttgcaagcatctttgaacagagacaaaagaccatctacttcaggaaaaaaaggagcagaggacaaaggagcagactgtccacgtaaatgcccatttgtcaaaccatcaactccagcaatgttgccatggccatccccagaatctgcttcttcgtctaggaaagacggcaagaggtcgtttaccaggttcccaaataatgcatcaaatgaaaaatcaccctacgagtgaccgaacaaaaatcaatatcccttatgattcaaaagtgaaaaaacataagcaactgaaaacctcaccttaaagtcttcaatgtcaagaatcagaggaacagagttaacagaggatgatctgggtcctcttgctctgattccttctgtcatctgataaaatggaaaattcaaagaattgaagaatcaagtctgacagatcatatatgaaacattcaataaatagcagaaagagatgcgtatgattctggattcttcaatgatactaaatcaaaattacactagtgtaaatcttctaagttaagtcatcaccggtaatcgctgtttactccgccgaatacaacaaaatttagaacctaaagatgaccaatcgcgcacacgggaaaggaaaaatgtaatatggagcaacttaccggcgatgaacggagagatctacccggaggaatccggtaactgcagggagaaaaagacggagaaaagagagacggtctttaatggcggacttttcacaactatg

SEQ ID NO: 30641 - DNA, 3347 bp, Arabidopsis thaliana landsberg
  unsure (1)..(3347): unsure at all n locations
ctattctatgaatatatattccctccttatgttgtcaatgtcgtgttttcatttgttttgtaaattttttaacactatgttcaattaacgtctaacgtttattattaacaacggccactctttacttatattagtagaaatgtacaaaattttgggcgacaggaaagaaacttaattaagtattaggtcaattttagaaaatactaaactatttactgattgtgaaaggcattggcacgccattatctataaaagttggaatgatgcatgaggatctttgataatacagtccaacacgttatgtttttcatgttttacttggcaatacgaataatacaactaattaatattaccggccaaaattcaaagatattgacacatgtaagatagatacaattacacacacttaagtaataattatagacggatacggataattgaatagaactaatttaacaaagtcaagattctgtgacattacattttgtttttaaaaatatttgaatcctaatggataaagggctaaaaacttcaatgaaggtgttattagtagtgccccttttttttgtttcttctcccttcgcttgttttggcttcttcagtaagagacatttggcttttgagtttaacgtcatttggtagtgatcacttttcctttaacgaaattaagatgagaaaactgcaaattaagtacagtattaattaactaagatatactgtatattataggtactgcatgctacacttttcttttcgggggcttgtttaaactaggattgtgctacaaaccagatattttattttaaaattaaacataaaaatatcatttatttacagtaaaatatatctcattatagaatggatgaagtataatagcatatggtaagaaaaaaaaaacctcaacggtggatatgtttattctctctatctcctttacaaaacttcttctagtttgtatatattgtaaaaggttgtctgcatttacataaggcaatatccacgcggatcggagattaaagaatacttcagtcgcttatgtaacacaaagttaatgtaatgaagttcataactcatcagtcaccagtcacaagttaaattgattagattctagaccaataagtatccatctcctttttctttttggtcgtctaataagtatccagttctttgcattttgacaaaattaatttattacctaattaacaaagaatcacattgcggaatattcaccactcaccatctactactagctagctagccacaacaagacataaaatcaaattggttttataaacatataaaaaaataaacgcatgattcgtcttgtaacgcgacgggccgacttatgcatttttaatcactcaaaatactgatcctagaggccttatatatatatatatatagatagagagcctgatatatatgtattgatccctctctctaaagcaaaaaaacaaatctcaaaataaaaaggtggattaaaattaagtccctaaagtatcatcatgattaaaaagttcagcaatatggattacaaccagaaacgagagagatgtgggcaatacatcgaagccctcgaagaggaacgtcgcaagattcatgtatttcaacgtgaacttcctctttgcttagaccttgtaactcaaggtatgtataaatatacaatgaaatatatttatctataaaaacatatatttactacatcaaatgtaaaatttgtgatctatttttttctaaattaaataaaaattacaatatatttatgaaaattctagtatgtatagtaacgtacattttaccatttccatattatttcttaagcgatcgaggcatgtaagagggagttaccggagatgacgacggagaatatgtacggacaaccagagtgctcggagcagacgaccggagaatgtgggccggtcttggagcagtttctaactattaaagattcatcgacatccaacgaagaagaagatgaagaattcgacgatgagcatggaaatcacgatccagacaatgattccgaggacaagaacacgaaatctgattggcttaagtctgttcaactctggaatcaacccgaccacccacttcttccaaaagaggtaatacattaaataattaagatcaaagctcagacgaatcttaattatgagtatgcaatgctatagtggctaatttttaacatgttattatgttcttaactcctctccaaaattattggttaataaaaaaagtctcaaagaaaacgctctaatatttgtgatttgcgtttcaggaaaggttgcagcaggagacgatgacaagagatgagagtatgagaaaagatccgatggtgaacggtggcgaagggaggaagagagaggcggagaaagacggaggaggagggagaaagcaaagaaggtgttggtcgtcgcaattgcatagacgcttcttgaacgctcttcaacacttaggtggacctcatggtgcgttttgaatttatttatatgatttacattgttttcaaactatttgaataaatttgttgttgttatatagggtttttgagattttggttagtatattgatttttagtaaatgaattttgcagtagctacgccaaagcaaatcagggagtttatgaaggttgatgggttaaccaatgatgaagttaaaagccatttacaggtaactatatgtctatattaagcacatgcaaataagatgttcatcttaagttgttttttttttttttttcctaacttaaaatctatgctatgcaataattatagaaatatagactgcatacaagaaggccacgccaaacagtccctaacaacggaaactctcaaacgcaacatttnnnnnnnnnnnnnnnnnnnnnnnnnnnnnnnnnngactactctacgggcaagactaccggaggagccaccaccagcagtaccaccacaaccaccggcatctatggaaccatggccgcaccgccacctccacaatggcctagccattccaattatagaccgtcgattattgtggacgaaggatcgggaagtcatagtgaaggggtcgtggtccggtgtagctcgccggcgatgtcttcttctacccgtaatcattacgtcaagaataattaatttgtttttactgtactctaatgttttgtggtcatttaatactattattttgtttattctctctatactgtattagaatttgatgccgggattaaagagtgtatagagttttgcaccaaatcaatctttctattttacttataatgtatttcatatttattttggagttagttaatttccatcttctttttttgggtaaaatgtacaagtagtaatcacttacagttgttt

SEQ ID NO: 30642 - DNA, 1809 bp, Arabidopsis thaliana landsberg
gattgttctaagttttgaaaagccaccccattccgcacaaacctgcatttgcagtctagaccgtatcaataaagcaagaaacaacctctctaggagataagatatgtatggaatcctccgtacaaggaagaaagatcaaagaaaccttagtaataaaaaaactgcatggatctggatttttggtatcaacatcctccattacatgtattctgtatatttctcaacaaccttgaaataatgaaattttcaaattggattttattaatttgagtgaaagactactaacaaaaagttcttatccacctttatcaaattttctccattgttatgtaatccaaataaacattgtcctgcgtacaacgcatcaagaacgtatgaaatcaatattgcaatttgcaattgtattagcttaatgaaaaccaaatttggtgaggattatattttgaaatattgtggtttaatgaaaacccgtaaatcttgacaaaaaaacaaaacaaaaaaatgagaacccgtaaataaacgttgtataagtaaacgtggcattatattttagtagatttacgggttcgagatattttggttgaggtttactatatcaattaaattgaggattctatactaaatttggtgatttgaatttaaaaatctttcaagaaatctatcaaaaatattctcatataatatgagtatttgtttttttttgtaaaagtgttggtcatatagaattaaataataaaaaattggccatctttccagttgccgttgccagccgtttcctacttgtgctttttcacttttccgttctctcaaaccttttttctctgcttccgtttcgtttctccgttcaaaacaagatcgaatcataaaaagtttcctcctttttttcttctcgaaacaaaagagaattcttgacgtcttctactccattttccatcaatacccatttcttctatcgctctcgtttccaagaaaaaagagggttttagagagaagcaaaactcaaatggcgacgaacatcggaatgatggatagtgcatacttcgtcggaagaaacgagattctgacttggattaatgatcgtcttcacctcaatctctctcgcgtcgaagaggtacttcttgcttgttggggttttgtgttctatatctgcatgagtgctttctctaattcttctatggtaatgttaatttgggaattagggttttgaacttccaaggaattgtagatttgggtttgatttgtttcaattggctactgagatttgggactaagttgatgctgagtctaatgagagtagacaaagggctttaggctttggcattgtatgattgcttacttgttttgattgttataatattgcagtgttatagattcactgttgtagggatcgaaagagttctactagttttgtattgaactactgttcttgaatgaaaattttgtgtctttgttctaagtaaaaaaattatggattttgctaggctgcatctggtgctgtgcaatgtcagatgcttgatatgacatttccaggagttgtgccaatgcacaaggtgatttttagcttttatatttatctatcttacgaatattactttacttcttggtgactgaatatctgaaattatcctctgtaaggttaactttgatgcaaagaacgagtacgatatgatacaaaactacaaggtcttgcaagatgtgttcaacaagctgaaaattacaaaggtaaatcaatcatctctcgatttatcgtgttcatgtgatacctgtgtgctctgtatatagagatttctcaccttgtttgtcttactg

SEQ ID NO: 30643 - DNA, 2052 bp, Arabidopsis thaliana landsberg
caaacacgagtttctaggaaagttaggttacgtgtcgtgatcggacaaatgagaggtcggtgtcgtagctgaggccagaaaggattacaagtacattagggtttgcttcgtgaactgcttcggccccttgttgcatgtacctacatgagacaaataaaatataaatcttactcaagtttaatcaaatctagcacacatatatatattgacaaaaaaatatatgtttaaaaaattacaaaacaacatatttgaaacaaaccacattagtaacatattaatatgtgcccattgaatcattgctaatttttgaatacgaaggaattaaatatatacagtataatctaaaatataacacacataatttcttttcttttttttgtttttggttagacgacgtaagtaatcattgggggctggtatagactgttgctataatattgactagatataagtattttgatcgtttactatggttctagtcttctagcataaaaaaattatgtgccacttaataatattggctctaggaaaaacaaaaaaaaacaaggaaaaatatgatcatttcttatttgattgatacattttattttctgtgaaaccgtacgtaagtaaagtctttaatccttataagtcaattataagtgacatacttcaactattatctaatttttttttgataaaaatactttaaaaatgtccatttagtttcttcttagtgttctaaacttttttcgttaaaaaggaacttttaatgtaacgtatgccactgaaggtaaaaaacaaaatactgattttaacattacagaatagcgatctcttacacgtacacacatgcagcgaatggggtaaacatgaaaaaaaggcacttaaagttcaaagcaatacgtgcaagagatggccactagtttatatttttctttctttctatgtaaccgttaaatatttaatgcaattcaatttcattaaaccaattatatagaagataaactcagaaagaaaaaggatccgaataggttatacaaatagacgtacttgaaccaatcatcgacgttttgttttggtcctctaagttcgtttctgaggctcatgccaacgacattagtagcacctttgaaagtcatggctatcttggtcagaccggcgatccacgtagcagggtcaaagaaagtgtcaccaaagaaaccgttgccgtcgttgtagccacaacaccaccctggcttggtcacgtggttgtctaatatcaccatcacatttttgtttcccaacttagctaccaccttctgcaaaaacgaaagaaaaacaaaaaagtaagttttgttttcaaaggagatgagtgacttagggtaaaaaacgacatgatatatgaaattccggtttgaactattgttttaaagtatttggatccacatctatgtaatttctttttgacaaatccatctttataaattatttttgtatattatgaacaaaataaagctattctaaatttttcggacggatatccgaagtccgaaccaatagatttacctttactgataggacaacactatgagattgttggtaaatcaattagctagtataccaccaatgtaaactcttgacaaattaacttaaaaaaaaaaaaaaagattgacaacaacagtaaaaaattagtgattgttattaaacaacattatttaacaaactaatatgttttaatatctaaaatttacatgaatacgaggtttaaaagaaaatataatttataacttaaaaccataataataagcataaatttatattagattcattaaattttcaaccgaaaaaaaaagtttttgtaattcttttattttatgccaatgaaagagatccaataaattgaatactatcataccttgtaagcttcaatgaggggaagatcaatcatggatgggttctttgtttcgaaaccagaaatatcatcattaagaccaagactttgaaaagattgtctcacagtaacattattagccaacgtctcatttgtagctagatcaagtggccaagtaaacctaacacagttgaaaccca

SEQ ID NO: 30644 - DNA, 3791 bp, Arabidopsis thaliana landsberg
ctctcaatattggatggcccatatgatatcccaaaagcattgacactttggattagagatcatgtatagcacgccttagaagaaggatttttacatgaatgtcatatggatccaatgtattaatcttgtttatgttaaattcttgagtaatctttttctcattcagacattaaaaaatctcgagttcactaaatttaagcaatttaaaattccgctaatcaaaacttgatgtgaattcttctactccagtgcaatgtaaattggccgttgacgagcaaagtcttgacttttttatatcattgagggggaatctcaagactggatattctaattattaaagactcttcttattaatctaatcttcttcaaagtttcaatctttgagtttctccgaaagattcaaagcaaaaccaagttagttataatgtcctcactctgtttcttttaatccaattgctagtctttttgcatctttcttgtgcccgctcgaattgtttcagtcttagaagacatgagagaatcgttagttgcaatcttggtgactgttatatcagttcttggagcaattcaccaagtgaaatctcatgaagaccaacctttatcaggaattgctgtccataagattacatttggtctcaatgaaaaagcttatgtcaaagcatctccaacagttcttggatctaacgtaattataaccattctcttcctctatttctcatcgcttttgatgaattactaaacctcaatgcatttttttttcagggtcaacatagtgaattagtattggtccaatatagttctccgaaaccatctgatgatgattggattggagtgttttctcctgcagatttcaagtagtttaacacatccttcttatcaaatcagtgctgagattgtaaataagagatttaacactgttttgttcctgcagtgcttcgacttgtccaggagataacaaaatggtccaaccacctcgactttgttcagcgcctgtcaaggtttccttgttttctcactgttgattctacttttcttctctgttgcaagtgttttagctttctcctcctgtttctttctttacagtttcaatatgcaaactttagtaatccaagatacaccaatactggaactggttccttgaagcttcaactgattaaccaaagatcggatttctccttcgcgctcttttctggcggtttgttgaatgtaacactctcattcatctacaacttctctagctttactagttgttagcttcatctttaaccatcccttggtttttttcttttcttgtgtgatatagcccaagcttgtggcaatctcaaacaaagtagcttttgagaatccaaacgcaccagtttatccgcggttggcgctaggcaaagaatgggatgaagtatgattctaaaactcttttggttatcatattctgtgctacaaagaagtgaaaatgagttatgtaaaatagatgacagtgacatggactagtggttatggactcaacctagctgaacctgttgttgagtggggcgttaaaggaggagaacgtaaactgtcacctgctggaacattgaccttcgcgcgtaacagcatgtgcggtgctcctgcaaggaccgtgggatggcgtgatcccggatacatacacacagcttttctcaaagagttatggccaaactccaagtatgtgccatgtgttttctctgttttgtaccaatgcattagcttcatggagtaataatcactgagctttgattgatcattatataggtatacctacagagttggtcatagattgtccaatggtgcattgatctggagtaaagaatatcaattcaaatcttctcctttcccgggacaaaactctgtccaacaagttgtaatctttggagacatgggaaaggtttgatcttttagtcttaaagcatatcagactgtttattgctgtggtctcaaaaccgcatttatgtccttttcttgtgccatgttgttgcaggcagaagtcgatggctcaagcgagtacaatgatttccaacgcgcttctctcaacaccacaaagcaacttattaaagatctaaagaagactgatgcagttttccacattggagatatttgttatgcaaatggatacctttctcaatgggaccaattcatagcacagattgagcctattgcttccactgttccatatatgattgcaaggttttgctttttttgtttcttttttaaagacaatgttgttggctttcttgtttacctagtcttgaaaatttgactctgtgcagcggaaaccatgagcgtgtctggcccaactcaggatcgttttacgagggtttagactctggaggagaatgtggtgttccagctgagacaatgttctatgttcctgctcaaaacagagctaaggtctggtactcgagtgactacggaatgtttaggttctgtgtggctgacacagaacatgactggagagaaggaacagagcaatacaatttcattgaacactgcttagcatcagtcgacaggcaaaagcagccatggctgatattcctcgctcaccgtgttctcggttattcttccacatatttttatgcggaagaaggctcttttgccgaacctatgggaagagaaagtcttcagaagttatggcagaagtacaaagtcgacattgctatctatggccatgcacataactacgagagaacatgcccggtttaccaggtaaacatcatgtactgtactggcatatcgaagaatggttcttaagaaaagggaattattccattgtttgtttcgtttcttgtctgtagagtgtatgcacgagtcatgagaagagtaactacaaagctccattgaatggaaccattcacattgttgctggaggtggaggagctggtcttgctgaattctctgatcttcaaccgaattggagtctgttcagagactatgattacggattccttaaacttacagccattgatcactcaaaccttctgtttgagtacaagaagagcagtgacggacgagtccacgattctttcacgatatcaaaagattacagagacatcttggcttgtgcggttgatagttgtcctgcaactacacttgcttcataaaaacttttcaactgcttgagctcttctgtactcacttgttccctcttcattgttaaactgttataatgtttacacatcaattatacgcactttgcagagaggacttatattaaacgcgagagctcgagaaagaatcattcgatgatgatactttcatgttcacaagtattagacctaagacaacatgagaatcttgatcttcatcaagatttgaggttttggcattcatttttatagccaaaaaccagagagatccaaaagataaaacaacaagaaaaaaaatgaaacagagaacacaagacccttccggtttcttcaccgattcttcgatttaaaaggtcgaagaagaggtgttgacaacgatatgccgaagaggacgatccacatctccaccaccaccatgtttaacaaactcagctggtgtcaagaaactaccatggcaaatgcacattatcctcacttcctctccttttccatacttgtacagaatcccatcaacccgtcttccgtttggcccgtcccctttagtaaacacacaaggcatatcaaccaaaccagtagacgtagccatcccttttcctttcctatccaccgagtcttcccttctccctcttttttcattctcattctcataaactttgaaagctctagtcacactcggtctcctctgttccctgg

SEQ ID NO: 30645 - DNA, 4618 bp, Arabidopsis thaliana landsberg
tgtaaagggacctagttcctgtatctgcattcatcagcttatctactggtcattgaggtcaccagggagacggtggtatggccccagttttggggctggtgtattttaactggaaaccatctgtatattgtccaccaggctgtgggatgttggacaaggctctgctactgaggttgaggtatctcccttgaactattcaaagtacccaaaactatggatcaaatagtactatgattttttttgttgctgcaaactatgatccatgtatctttaaaacttgtaaaagatagttcaattgaataatctcagtattctatacccattagttgcaactgcgacgtccctatagttggactcgagaactattgatttgttgacattaattcttttctttctttgtacatgacagtcagaatatgttgaagaatcaaatctgtacttgtttgacagaacatagttaagaaaatgcttgagttgtatcatgcgatttctgcaacactatttacaggttgcattttctgatccgtttaaatttgtgcttttttatacaaattacgattgatttttagttgttttttccaagtatgtgttttaaatctttccaacgatttttttcctttggatatttaaactttgtactttcttaatgtatgcaaaaaattataattccaattttgtggtcaacctatgaaaaagagatgtttcactgtccaaaattgtagttttgctttgtgtattctcagtgaatggactacactattacagactgtaagtgatggtgccttcaataatttaatcttgtccattgctatataaagttcgaggcctttattgtccgatcgacctctactggaagatcccatttgtttaagttaatggctaaaccaatttagataataaaattcatcaatcgtagctagaatcattgttatataaaatcaagaaaaatttacagaaaactaaaaagtcacctgcgaagacaaactgtattgattaataaaccagtgaaatttataattacaattcaaaaaatttatctttttcaatcaaattgtttgacgatacaatttgacgatattcagagtaatgtgagataaatgtaattaaaatcataaatttatgatgtaattactgttagttcacattttgaagatattaatatttagttatcaccaatgataatgaatataaattccagtggacccagcatgtcagttatatgacttatgaggcatggtttatgatataacatgtcttgttcttgttttctcatgttttaggttgtttttcctgcacggaatatcccagtattatggctttgattaaggtaattatactaacaaaaaaaaatcaaaaacaatacctccaatatttattaaacctgttttatatatagtatgatatatctctccactgctcacatcaacactagagatgaaaaacaactaataaagtaccatttgtcttgataagtctcatttcggtttaccaaatttataaaataaccacatgttatggtattcttatgatcttatcaaccatcacgggccatttgacttcttgttttggcgtaacccaatcaatatttgtctttgataaatttcaattttggttcatggactattgcatgcgaatattatataatgagtccaaacataatttaatagtatatttatctgacaaccaatcataaacctataataaggaatctaatacaggagataagcaaatttatcaaacatcaccccatagattttctccaggtttcaaggtagcataggaacatcttcatttctacgcctaagaacatgtgcaggtgtgtccacttgtccactcctaatccattgtatctaaaactataaataataatgttccattcctaatcatgtcttttctaataacattattgataaccatgttttttgtgtaaagtgataacattattgataaccttaaaaatgcacaaatatataatgctcaataatttcttacattttgtgtaaatgacttctaaaaaacgccaaattgtttgttcgccgaacaatactaaagtactaacaaataaataaaacacaccgacaaaagaacaaattaatgccactaatttattgaacgagattcgtgtaaaatgaattatccggtttggtgacggacaccttccaacatttaacctctccgtcaagacttccactaatgatcgaaacgacatcgtctaactccttttctctaaccgccgccagcgacttaaccggcttagtatgaccggaaagaacctccaaacaactataactagaatcgggtccacgtcgccaaattctgaccgtccgatcagctgatccactgagtagcaaatcagagacgttgaacaagctaagtattgctttatcatgtcccctcaaagcacctctcaccgccatgtaattggaagtgtcctctctctcccaaaccaaaatagaccggtcacacgaaccggagaacaaaaccgatccgtcgtcgtttaatgctaatgcgttaaccgccgatttgtgcttctctaaagtcgcaactaacgtgtgacgtttctcaccggtcggtttggcccaaacccggatacgtctatccgcggatccagtgtacacggtgccgttagtagaaacggcaatggcattaacggcgtcatcgtgagctttgattgattctttgcaacgaagatcggaggctctccatatcttcaaggtcttatcccaagaaacagagtaaatgaatccgtcattaacggcgagagcagtaacggcgtcagcatgttcgatccagagacgtttcttatgacggcgtacttgaacgtagtttttaggaagagcaaaacgtcgtaaacggtcgtttaaagttggaagcgtcgttaactgtttataaccgctttttgccgttagtttccaaactccgattttaccgtcttgatgcgccgtgaagattttctcaccggagaagccgacggacttcacggttcctgagaaaggatcttggccgttgaatgtgtcgagatgagcacacatgtcgcggtcgtagatacttacttcatgtccagaaacggcgaagagatagccaccgttgacggcgagacaagttacaggaagactccgttcacggagtttaaacgaggaggtaacggagtgagagacggtgacggtggtggatgggattttctgaagagagggaactgaaggaagcgtttggagagagagactgctatggaggctgcttgagccggtggttacgtcgctgagtgaggaagatgacgtggcgctttcgccggaatccaaatgcttcggcgatttcggtattcgtcttctgtcggaatcgaacagttttgagataaccctcatgatggtttcgatgtttggtaattgggcggcgtttctatcgattgataactaaagtgattcagaagaagggttaggtttgtgtcggagagatgtatatagaaagaaaagaagcgcgtcgtgcagagagattacgccacgtggcaggtacgtacagagcggtgcttactaaatttctgggtgttttcttgaactaaaaagatagatcgtacaattttgtacttatagacgaccaaagggtattatggtaaattgaaagcgaagaagtcaaatactgaaataccccaatttgtgtagtagaaagaaacaagaagtaaagaaatcaatcaaagtaaaggaaagagattgggttttgcgttacagcattgaagaggttggatggtagtgaattggcagtatgggtgaaggaaagaagagtaggacccaagtaattatgagccgattgtatattatcaatgcctaaattacgattaggtttaggaagaagatattatagaagcattttcttgaatagtggtgtgagttgtaataaatgggtgtgagtgcataagtgggaaacttggacgtaaatgattataagaaatgagaatggtcacatccgttgctggaaagtggaaaagtgtggctaaataaagagagacacaatgaattggaggtcaatgtcaaaaccgagctataatttaatagccgatcgttaaccaaatgatattagttttagaaaaataattagtacgacagagtcggactcgatcgttatcgatagtggactgggaagtagcgatgagtacaagattgccagcccaaaatagtgaaaggttagtaggaaggctcttgagcctttcacttatgtttctatgaacattactttgatttgtaataaggggaaatattggctaattacatgagctatcatttttgtcaccgttctatagacaccatcgccgtgactttcaacttacaagaaaaaaaaccatgaatgtcatcatgcattactgtgtagtcaaatgttatgttctaattgatgtgtgattcgtcaacttcctcacgtgaaatggaaatataaaacggtatattaataatataataatataataatatagaacacaaatttgtgcggaagatgtgaaactgctgtctgactgatctttccttgacacaaaagttcttgcctctgcaggaaaacatgattcaggaaggaaaaatgtcttcttttgtttattaattttaaccacgtttccatgtaagatttagcactcgtg

SEQ ID NO: 30646 - DNA, 3580 bp, Arabidopsis thaliana landsberg
gctgactgtcggggtcagcgattattattagtcaccgaacgaatttttcttgggttggagccaaaacctagcaaaaaaatatctaagtgggggcactacattattgttttaacaccaaggaaaagtaaacaacaatggcccatttttactgtatcgagaaattgatctcgaaaggacaaatgtacccttccacttcgggaatccattattgtgcataacacacgctgtttcactatatatactttcacataggatctcaacactctcactaaaccaaaatcctcaaaagcctatttgggggatcatcaaccttctatcatcaccatggatccttacaaggtatcttcgatcatattcttcttactttttctttgtttttgtgtggtgtatgtgtatcttaattagaattaggttcaactatatatgctcgttttctaaactattttttaattggattgatgttcttaaatcttaagggtcaaaatactttttatgctcaaaaacttacttaaattctgtgatcgcttgaacctaagttgatgatgttgatttctgttttggctggctatctttaattaaaacgttttgatctataaaccactgcatgagaaagacacgccacatgtggtttttgttgtttttttccttagattagaagttattaatttttttttaatattattacacacacatgtgttctaaaaatcggacgtccgaccttatattattttagtgatattctgatatcagccaaatcagattaactaatcatcaacaaattgatttatcagatctactaaacacctgagtaatcgaaatctacacgtttgattaatcaaatttaaataatcgatcagttagatctatacatatgataaatctttttttacaacattcggttaatcaaaccattgtcggtcgatctatcaatacaagtgtatattttttcacatacaaaaaaattatctcaccgacgaaaaaaaaaacaaaattattatgtagatccatcaaacaaaaggcttgaatatacggaagtcacttaaaagtgtaataatcgaataaatattagtggataaaatgaaatttatctacaaccctactctccgacatgttactgtttgcgtcatcaaatctaaagcctttttttggcaaataatggtcggaagactactcgtgtcgggatggaccacccggatccgatcaggaaacgggttttgatatgtttcgggttacgacataaaaattaggactttttatcaaatcagttggtagtaaaattttgtggattgttcttgtcgattccgtttgattgttgaccaaattttttctgggattttgttgataatctatcgtataatggtgattgcagtatcgtccttcgagcgcgtacaacgccccattctacaccacaaacggaggtgctccagtctccaacaacatctcttccctcaccatcggagaaagaggtatcgccaccctgaattttaagagtctaaagacaagaatcggaactgtaacttgttacttgttggagctttgaaagagatgtaaagtctaagctaggatcttgttaatggagtgcgatttttgataacatgtgttaattcgtattgagcaggtccggttcttcttgaggattatacatttgatcgaaaaggttgccaatttcaccagagagaggatccctgagagagtggttcatgccagaggaatcagtgctaagggtttctttgaagtcacccatgacatttcaaacctcacttgtgctgattttctcagagcccctggtgttcaaactccagttattgtccgtttttccactgttgtccacgaacgtgccagtcctgaaaccatgagggatattcgtggttttgctgtcaagttttacaccagagaggtataagaaaagattcaaagtttccatttttaatcgtcttttagcttctttagaatcaggactgatttttgtcttgttactgttatgatcagggaaactttgatcttgttgggaacaacactccggtgttcttcatccgtgatgggattcagttcccggatgttgtccacgcgttgaaacctaacccgaaaacaaacatccaagagtactggaggattctggactacatgtcccacttgcctgagagtttgctcacatggtgctggatgtttgatgatgttggtattccacaagattacaggcacatggagggtttcggtgtccacacctacactcttattgccaaatctggaaaagttctctttgtgaagttccactggaaaccaacttgtgggatcaagaatctgactgatgaagaggccaaggttgttggaggagccaatcacagccacgccactaaggatctccacgatgccattgcatctggcaactaccccgagtggaaacttttcatccagaccatggatcctgcagatgaggataagtttgactttgacccacttgatgtgaccaagatctggcctgaggatattttgcctctgcaaccggttggtcgcttggttctaaacaggaccattgacaacttcttcaatgaaactgagcagcttgcgttcaacccgggtcttgtggttcctggaatctactactcagacgacaagctgctccagtgtaggatctttgcttatggtgacactcagagacatcgccttggaccgaattatttgcagcttccagtcaatgctcccaaatgtgctcaccacaacaatcaccatgaaggttttatgaacttcatgcacagagatgaggaggtacgtcttagtacaccacttgagctaccattgttagtctttttacttggaatcaaaattctcatttggtttgtactttttacagatcaattactacccctcaaagtttgatcctgtccgctgcgctgagaaagttcccacccctacaaactcctacactggaattcgaacaaaggtccgattcctgccatgccttctctaaatcttcaaatcctaaactcaagtttattagaatattggtgctaagaaaaccttttaattgctaatgttgcagtgcgtcatcaagaaagagaacaacttcaaacaggctggagacaggtacagatcatgggcaccagacaggcaagacaggtttgttaagagatgggtggagattctatcggagccacgtctcacccacgagatccgcggcgtctggatctcttactggtctcaggtcagaacaaaaaaacactcggtcaaatttctacgtcctttttaccaagtttcagcaaactaaaacattatttatctctctgtatctctcaggctgatcgatccttgggacagaaacttgcaagccgtctgaacgtgaggccaagcatctagaggccaatctccatataagctcagtctatgtgaggtacaatcaatctcatcgatctatcatcgcttggtcgttaaatccgtcaaaaagataatcacatgtgttgttgtttcatgtctatataagaataatgcttgtaatcccaaaaactcatgtttccttcctaacaactctcactgtctttgtaatctctttttacaataaatcaatgtttcctaagcagtaaca

SEQ ID NO: 30647 - DNA, 4875 bp, Arabidopsis thaliana landsberg
  unsure (1)..(4875): unsure at all n locations
caaccctgtaaattataaatgtgagaagcataccttagcccatggaggtagacaaacttcaccaagaggttcaccatcttgttttactccaagatggtacgagttagaattaaccagaaattcaggcatgtagaagaactcagggatcaattcttttacatcgcttgtattggacaggcaatttcgaaaggacccctcaacactttggaaaagacgatctgcgtgatcaaatttaccaccctggccacataagtaactattcagtgaatatgtttgtattcaccatttttcataatctatttcaaaacataattattgcctacaatactccacaaatctgctattggtcaaagttgaaaacaaatacctgcagactacgatgaagggatgtaaacggctctaacctcaaaaggtaatacaacacacttcccatacttgaatagtgggacccgtaatagaaactgcatcaagttttaaacaaaaattactaaggtgcaaagggaaaagtatttcttcagtacagaaaattaaacactgcaaatggtacctaggtatatcaggatcagagaagctgtgatatctgtcctcaaaaatctgtaaaaaacatatatcatataacattacattaatgaactaatctcagaatggaaatatagccatcgctttatactaacctcaaaccttcttgtatctaaagctccaaccggtttagaaagatcacgaaaggtagatgctttgctaaaatcaagagtctctgatgagtagtcagccaccacccaagggaaaacaggatactgagtcaaatcattgtaagatctgcctgcaagggtgttgagaatcatcaagtattcaaaatttgtaatctctctccttctccatctgtctctggctgtttctgccatctccatagctattcttctgtcaacaaacgaaatcattgcagtcctgtccctaggaacattctttggaaacaggaattcattcctggtagaaactattaacatcccgacctcctttgcattcttttgagatgcaaaattgagaaagactgggggtacagattcctggaagaaaatctcaagagctgtatactgaagcaaataccgcgtccaatgaacacttttcacctatcaacagcacgtccatgaaacattatcaaatatgctaaaatgatatatgaaattttttcaatcagtttgatgtttattaccttccctattttccatcttctgtggcgcttaaccttttttaagggtttcttatttttgtttcctgattccaaatctagaaacgtctcactatcataaggcgaagaccattttacaaggttctgtttattttcagcctttgttacatcactaccctttgaagtgctaaagttcttgaagacagctgatccaccagttccttccaccaaaaactccccagaaaaatgtaaaacatttttcataactgccaaccaaccagccagtttcctcttcggagttacgagaacacaaggaactgatgtcaaaacctgagaaataacgcgaaagcatgttatacgtaaccactatattggctactccttcaaaatttgtgaaatatgtacctcgctggtaccaacttctagagaagatgcatctactttatcctgtacgacatccttgagaccactgctggttctcacaagctcagagaactggatatctgcagaagtatccatgaaactttgctcggcttgactactgtcattctcacaggaatctgagccaccctcatcggttatcctgcgaatgcctttaagtaaaaatttcttcatctgttcaggtatatgtatcacaccagacttgctttcattaataacgtttgaagtctcattttcagtggcagtggaagtagaaggtggatgacacagcctttcgtcaaaatgataatttcgtctcaactttggtctacgcctccaagaatcttctgtcctgtcaagtttccagcggtttaaaatgttattaggaaaaggagttgcagaccaaggacccctctcatccatcaaagatcgcagcatgtgaatccatttctcagtaacattttgttgttgctcttcatggcttaattgcactgaaactcgtctattttcatcccatgtaacaacagtttttaaaacgttttgcagctcaccatcaaaagctttcttgctgttgcattctatagataatgtttcattattcctttcaccaagggcttgcacttgacgagtacgatcagatatcaatgttttcatgtatgttgtttcatcagtgaccgcagcaagcacacggtctttgtgtataagattctggatagagcccatttctttgaagattccaccagaatcagagctgtcatctttattcataccactggtggcaaggatggattttccgcaacttacagtttcacgtatcaggtgcgatatgacatgaaaacgagcaccgtcgtctagctttccatactgggatctcacataaagcaaacacccaataaagagatgcagtctgctcttgctttgttcatcatcagcagctaagaaggaaggcaagagtgaggtcacctgctgtacacatctagtggctttttccagtgaagacatgcacagataaagggtgacaagcctaaacacgattcgtgggcatttctccccccttaggagcgggagctggatcaacctttttgttcattattccactcaatgcactgtcaattcctcctgacacaacaactgcggccatttcagcagctggaacattcaatgattctactaaacctcttgctctttggccaatagagggaccagtagctaacgatttgggagacatctttaccggaccccttccattaatatcacatattatcttccacagattgtcatacaaattccaccatctttcattggtcataagttcagttaccgtggtgcaagactgctgacattctgtgtttctgaaaaatgaaatgatgaaaataacatcatcaccagaactcgcaagcaagaatattgagtagaaagtattatggatcagccatagatgttgtacaatatctgtaaaagcagcctcgcatatattttaaaataaatgaaaactacaaagagcagtgacgaaagaaaccaagtaaaggctttctttcacatagaaatcactagccacatttttacccaaattcaccagtcattttctttattggaaggccagttatgtttctctacaacaatatcatgggccaaaagttatgctacccataacaggtattctattattggtttcaatggatacaaagttatccataaaggagatgaatgcatatcttgttacaatttttattttataccgataatcatctccatatacttattttttataagagctttaaaacaaaattgtaaatggcactaaactaaggatgcagtaacatgaaatttataaacagcatacctagagatttcttcagtcaaaaatcgttggaaactctcatctaatcccaaagtggggtcctcacggtttccaagttgtaataaatcctctgaaaaatcagtgctaattgctggaaactgaaaaaaatacatttgacattaaagctccaatatataaacgaaagcacacatatgcttttcttagcaacagagactggatcaaaccacttgttagcaatgaccttaaatacaatgaagttatttaagtttagagagtgtcgagtgaatttagttaatccaagatgtttcactcgataacttaactaataccttcaccaccctgactgattgttgatagtgagtacattcatcaacgaatggaacgagaaattattctagataatctaatacgcaccaaaagacntaagcatcaacatggttaacaatccaggaaaacgtagaatcgcacccaaaaacgccataattctcaagctacacgtaggacaagaaggcagtttcacaagattttgcagcgtgtcaacatggatttgattcaacaatcaactgcatgataaaactgaaaaaccgaaaaataggtgggtcataccaggagcctactgccaaattcacagacaagcatctcatcaacgagccgcaagagatacagcacattgtcgcgacatgggtgcgaaaggaaaatattatcttcagatgagagttccaccaaacgctgaatcaagtcttcatagagatcacggagaaaagaccggtacgggacatcattctgtgatgaaatagattaagctaagaacagcaacaaatttgttttaagatataagcaagaaaaaggtttgattaacttacatgctcactctgcaagagtatgaaattcacagtttcctctagctgctgccaacctcccttcacagataaaatatagtggcagagaacaacacaaaagagacccctgacaaaatgttgctcatttaatgccaagtcatcatgattaagcaattcagatctgtagtcttttatcacatcaagtttcattgatgctgttaaccacgcactccatccaaattcctacacataaggtttgtattttaaattgccaatttaacacctgcatatctgaaattttcagccataggtgtctactctataccatcaaagcttcaacattcataggatttgaatcaagaagatcgagtatgtcactgatgatcttcattcgtgctaatccatccttgcagcccgagaggaattcgaaaataaaaacaaaaatttgtggaaggaaaaagtgagagttgcttggtttgcttctgtgcttatcaacctggttgtgtttctgcaaaacctacaagaacaaaaaaaaaacaaatgatcttccaacaatattctctggaaagttaagaagtagaaaaacgaatgcttataaaaatagatcc

SEQ ID NO: 30648 - DNA, 3981 bp, Arabidopsis thaliana landsberg
tatcataactgactcagtatgttcaccataacatttttatgtatttgttctgttgctatccaggtgaggctgaatcaatattagctagagcacaagcaacagccaagggactggccatggtatctcaatccctcaaggaagctggtggagaggaggtgatttcctgaattatgagatcaatgaattaactattacttaggcgttaatactgttttatcaaatttggatgtgttagtgctacttaacccttcacatgtgaatgcaatgaatgattccctctagatgctgcataaagatttgagttgtttattggaattgcaaatgttgactctttaagtttatttgtttttgctatccaaaagagaacctcatatgcttaatggtggtgtgatatgcaggctgcgagtttgagagttgcggagcaatacattcaagcttttggcaaaattgctaaggaggtaaacacatcatttacttgatcccatttacttttctaatctcgtccttccttgggatttatcttatagagttgtatttttttgttcttgttagggtacaacaatgctgcttccgagtaatgtcgacaatcctgctagcatgatcgctcaagctttaggaatgtacaaagggttgtcaacaaaggtcccaacaatggtttcagggaaacttctggagtagaatcctctactaacgtggttgttgccaaacttgaatagaagctataatgtagctgaacctagggaacaactattcttttgatttgtccaggcttttagccattttcagtttgtttatttcttcatatgagaaacagttatcttaccatataaccattttgcaaactagaaaacagatctaatctcaaatttctgacagagtttttgcaccatatttggtcttctaagtgttggctcttgttatctttatatcaatatccaaattttgttatgtttgcttttgctattttgttgctattgtcttgaatcgaattggcacagaaagagtatctggctaaaaccaaaaacgcaagagcggttgagaataaggtttggttgttctcctgatgaataggtcgttgacagagaagagccttaaagaacctaaggtgacatgaaatttttagcccttttcctgaaatagctttgtgttgtgttgtgttggtacgaaccactatatatatctcttttgtgtcttcacctacatttgctcagcctctaataaggagaaaaaagaaacaaacagttttggcttcttgaaaggaatcagaatcttttagctccacagttcttcccattgtgtaaatttgttttcgtttcaaaccgatttctttctattaaacaccatgggaggctgtgcgagcaaacctaaggaatctgatatccctgaaaccgaaaagactgttgtcgagtccaagaacgtcgaaactgaaaccgtatctcaggtttgtagaacaagttcattagagaatgatcggtttttatccattttgtctatgttttaggtgaaagatgtgtgattgttttgttgatttacaggagaaggcagatgaagttgtcacagaaaagaaggaagagtctgctggagatgtagcagagacaccgaaggaagctgaggcagccaaaccggccgaggccgaggccgaggcagctaagcctgccgaggctgaggtagccaagcctgccgaggctgaggtagccaagcctgccgaggctgaggtagccaagcctgccgaggctgaggcagctccagaggtggtgaagaccgaagaagctgtcgtcgaaactgttaaggagactgagccaccaaaacaagaggaggctgttgtagcagccaatgacaccaaaaccaacgaagagcctcttgtaaccctttaattctttcacattttcatttctcaaaaccccaaaattgttgtgcatcaaatctgtaatatgtatatgtttcgcaccactgttgtattgctattgttaccatacgtacgttaatgaaacaatagacttgttgtgatttgtgttacctcctaaaaacatctttttctcagttccaagttatggtaaagttattaattcttaactttccccttttgtgaagataataaggttataaactatgatgaaatagggaaattttggtttcattgaaattggatttgatacaattcttctctgaaaccaaaagggggaggtcaaaaatgcagactttatcaatagctttctgcaacagtgccctagtgataagaagaagaaactctatcggaaacagaaacagagtaaagttgagtttaatctcgtcttcttctccgactcttgtttgccattcaaagtctaaatctcaaaccgatagcttgagggtgttggaatgggacaagctctgcgatgttgtcgcttcttttgctcgtacttctttaggccgagaagctacaaaggtttgatttttctattgggttttctcctttagccgttgattctctgttttatattgacacagagattgttggttttcagaaaaagctttggtctcttgaccagagtttcagtgaaagtttgaaacttttagatgaaactgatgccgccattaaaatgcttgaacatggttccttctgtcttgacctctccagtattcatatctccctcgtaagtttcatcatcttcaatctctgaagtgataatctttgcatgaaaattgtatagtttttgatgtaatactgatttgtgtgaaggttgaatcgggaattcgtcatgctaagaggaggctttctttacgagcagaccaagcacttgaacttgcttctcttcttaggttcttcgaaaatttgcagcttgatttgaaagctgccattaagcaagatggagattggtacaaacggtttatgcctttatctgaattggtatttgcagttttctctccaaatttttgatactttttttaacttggacattgtggtggcctcatattcactttgtgtttgcagataatgcaccctgtgattaatagatcatttgtcaagttggttgaacaagttatagatcctgatggtacaatcaaagattccgcggtttgttctttttctcactttgactacattgtcatcaagatgtatgatccttatgttgaactcatctttattgtttcagagtagtgccctgagacaatcacgtgaacgagtgcagacacttgaaagaaaggtcaagttagtttttctttgtaactgtgaattgaagatatcttttgaagtagtattgtctgaaaactacctgttgtctcctttcagctgcagcaactgctggatgctatcataaggagccaaaaggatgacgaatctgtcatggtaaggattctttaaatcttcattttctgaagttggttttattaattattgaagataaaattccagttagcggctgaaattgatggaagatggtgtatacaaatgagctcaaatcagctaacttctgttaatggtcttctgctttccaggtaaacttgaatttttaggtttaagttaccaaagaagattcagaattttggtttgcaatttatcaatgatttattaacaagagttcattaccattttccaagttattgagaagttatgcttctcttttagtgtttattttcaagttctatctcttgaagataatatgtgtttcagtggttcaggtggacggtctgcgacgtagccaatagctgcggtgtctatgaatgatgaccttcaaagtgcgagcagcatcagttgcacaggttgaggcagagattcattcaatgttagatgataaggtaattgttttctgcgtattgtattatgcgtgtagacatttttgttcattaggatacaaacagtattagtttttcaagttagaattcagcaacagtccttctaactgttttgtgcgtgggtacatgtttgttcactttgaggcaagcatagcaaaagcaaaatgatctttatcaaagtcaggcggtgttgagccactcgattca

SEQ ID NO: 30649 - DNA, 841 bp, Arabidopsis thaliana landsberg
  unsure (1)..(841): unsure at all n locations
attaccgaaaaatagagatcaaatctatcaaagtaacaatctgttagtaccaacacattgtctagcaaaaatagagatcaaattcaagcatgttctagcatccattaccgagtgtttttaatcgagtgtttttactgtcctgcttgaatttcagtaccattgtcttctccattagtttgtgtttcttcctccattttatcaacctccttagtttcctcattaaccattacctcctcctgtgacacttcctcattagactgctgagaaggatctgttatctgaaatgtatcctctttgtcttccataatagtatccaagaaacttaaagagttttcctcagcaagtgtgtaatcttgaaccatgagctgattcaaataatccgagaaaagatcacgctgctacaataaatccgtagtagctttctcactctccttaccaacagtttcctcatcaccatgaaacagatttttacgcaccgtctttactgcgaccgcttccagccccaaggtggaggaattgttcgcagcaatttctgaaacatcaacccccaannnnnnnnnnnnnnnnnnnnnnnnacctgaatatgatcccaggaaagcatccatcatctgttgatgatctgagaggctatgacccgtctcaccaaaatcactggaccaacccgtccagtgggacccagtcggtgctggatgtgtgaatattatgaggaagatatcaagattgacacgtcctgaaattcaaggcttgatcttgatctatgcatacttaatagctcatctggtgccttgtgaaatttctgtgtatataccttccaataaactgcgccaccttttatgggatg

SEQ ID NO: 30650 - DNA, 4347 bp, Arabidopsis thaliana landsberg
aattgctcggtccatcatatgttggcatagaaatgtcggagagaagacaaaccatgtaatccacagctgatcctattaatccctgtgaggttgctgacagctcctcaagggggtctaccgacctatgggtatcaggccggggaaataatggtcaaaacggttcaatgacctgttccccgccaaaaagttaaccgcttgttaggaatatcctggttgagttgtcgaatctcattgttcgtaatataagacctacctgcaccacaaggatcaatcaaaatgtcatattgcatttctaaagcctaaacagtaccattagtagttgcaattatgatctctctatcgctctctgagctttcagttttctttctgtggatatgctcaacatgaaaatgatgctgataaaaagttaagcaagtacctcctcaggggtcagtggacacttcccgatagcccgtctttcgttgtaaataagccttttatctgcaaaattttctttacggtacttcctaagtatcttctgttcctcagggttaaatatgtcaaagcacctgcggaaaatagacaatgaaccactgttcccatgtgtgctgatgtatagaagatataaagacaaccaatttcttcgctgtcacttcaacaagaacaagattctagaaaaccagctttgatatatagattaattaaatagaaatgaccctatagctgatggttgaagaaagaaattgttgcaaaagagcataccccgcaaatgccaacatatccatttcaaaacgaagatggatcgacatgaagtggccctgtgaccggagtttatcaacaatagattcactcaacttcatgatgtgtggcttgaatctcaaagcatggtagttcactctgcaccttaacctttgatattcaggattgtcaatttcctccgctaaacgatgtgaaaaaggggtaagatagatagcactatgttccctcattgcctttagagcagttgtcaggtaccactcaataggagcatctcgaggaggacgaatctgattcaaggaaataacaaggaacagagatatttaacctatattttcagacttaagcttatgtgaaaaccagacatctctttatgcttgtacctgaaaagcttttatcttcttggttttcccatttttgtgaacatcggggatctttcccacaatcttaacatcatacttcagtgtctcaataaaatgttcaacgtcatagataccttgaaaaccactggaataaaacaaccatatattagaggataaagacatgatacttcaagaattcatgtaatggcatttgatctcctcagcacatatccttaacattaggagaagaaatccgcttagaataaatgtctgatgatacttggaaagtcatacggattgcattaccttgacatttgtaactattaataactaactcagtattgcacagaaaagcttatattttctataactaatgcaatgaattaagggactgtaacttctctttgcagcagatgtaaaggaatcaacgtacctgtcatcatgccaaaacgagtttgcatctaattcgggcaacacaagtgtagcattcatgatccgcgcagcaagtactgcattacatatctgcgatatccacatatcaacatttgtcaaatcaaagatataacaaccagatccatagtggagggtttaagctacctcaaatccactagatttagagatacattttgtgaagtgaccaaaacaagctaacaacagtactggggtgtaaagggacacgttgattacaaaaacagaacacctaccgcactacgttgctgattcaaaccaccattacatcgaacacggagataaccatttgtctccttcgtaggagctgcaaaaaggaatcagaagaagattcatatcattatttcaagcttggaatgccctaagacttttagattagcatcgagttaaatctttacagctcaaaacacgagatgaacatacgaggccagtcagatcgtggtgcaaaatacggtctccaaccaccagatttagcactctcccagagctcttccacgtttatctgctcaaaaatatcatatagaatccatcaacggttagatcaataaagactcactaagattatcatctataaaacatgaggttaaattcagatcttaagctcctgcaaaacatttggttcctggaaaatcaaaacggatacttcaattttcagttcacttctcgcaattcatcgccaatctaacagaagatctgatattcttcagctagaaatcactactccaaatacatagcaaaagtgatctaaccttagatggacgggtcggttcgcgattgctaccgatgttagccgagaaaagcagcgagagcgtacagatcagtagaacaatgactccgatagacagtttcgccaccatcccctttgttccaactcctcccgtcttcccatgaagtcggtggtgacctaacctgcaacgtcactcaaaatcaacaccgatccaaccgaatcatctctactgaaacgaaaattgcaatctcagacaccagattttttccgagaaactaaaaatttcccagaaaattgcgagagaagcgataccttcgcatcgcgtttaaaatcaggaagaagacgagatcttctctagtgatttgagaatttctaatactctgtatgagctctctctccttggagtctttctcactggcgagatgtagatttctgaattttcgttaattaaggtaattaattatagctgcttcgaatcaccgtcgcagccgcgcgagtcacaccagcaacaaaccggcgtcgggtcttgcaatcaaaccgaccggttgattattaaacctgcatttaaaagaacgaacattaaaatctaattattttatgtgatccatatttcccatattataggcgccattttacagttaagatttttcaaattttacaatttgttttttgaattaggcttatcttctttttttccccaaccattctcggatgggaacacaagttgcataatttttacaaaaaaaatataatagcctcgacttcactatttgaaaattttattttatgtatagaagcctgttaaatcctaatgttcgatcggccaaaataccaaaacttaaaagtcccaaaacaagtagaaaataaataaacaaattaatctacatggttgaaccgggagaattggatattagtggaatcaagcagtggctttcgagagctgcttaaaaatgtcggttatctccttaaccggtgaatcaaccttgagaaaaccgataaaaggactctctgatggaacgatgtcgtctcgaaggtctgttgaccggagaagagcatcagaacccaatgtgacgagccccttgacgataacagtcttgtgtgtgccggatatcaattcctcatagtccgtatcgccacgatctccaaccaccacgtacatgttcgccacatttagcctccaccgcacgaacaagtaccttcaccgcaacaattaaatcgcgataataaggaaacaaacatgttcaaaaatataattttgttttgtagcatttccgtagcaaaatgtggtttagttaacgtacctgagagcttgagatcgagaagcaagaagaggaacgatctgcattctcgttgaattccgacaatacattggatggcaacgaaggcctcttagtcgtaacttctgacgtaagtcatctactctcatcacctgtagaaaccctgattagatactctgcagtctgcattaatgattggtacagttgttgaaaatcaaactttaccttggaacgatctttgatcatatatgcaacgcaatgggaattgctagatgcctgatcctcttgaataagacttggagagcccttgtttcttgcctcaccaccaacagcagtagtgttcatcagtttccacaccgtgttcttaagcccttccatgccccatcggtaatcgatatgcgaggaatagtcaggatccggaagaagctttccctcttcccctcctggataatacacttcgctcccgctgctgcatattaatgtgtcgaactcactcacctgaatcttggcagacttcaagaagcgagttaattcatcaagcggcatagaagtggaaatcgcaaaaccagagtttttagccatctgtggatccgatcgcacggctttgatgatattctgaatcatcggaaccattgctttctcatccggagctccctcattgtcatagcaatcaaccgctaaaaccaccaaccgttcccgtcgcctcaaaaccggatacttgctacccaagttatcactttgtttcttccctgtaattctggtttactcttgatttcag

SEQ ID NO: 30651 - DNA, 4220 bp, Arabidopsis thaliana landsberg
tcgtgttaagtaaagaggttcacagtctgttgtcgccacaagaagtgccttcattcgattcttcttcttttcattactatcttttccactttcctgtaatagttaacatgcaatagtcccactcatcttctatgcagtcagacaaaaagacggttgactgaatctcaattgaaagcataaacaaaatttcaagcattcaaaagccacaaggttataaataccttagcaatttgtcgaaacgtatcgaaaaccttgacaacagtcaatggttcgggcttgaacatcatagtctgagtcgaacggcttccttttgctacaagtcccaagtctcccagttcctataaatcaagttcaatttcagaactgctaattttcttattcaaaaaccttatagcaattccacaccagacaagctcattgaattacaaggcaacaaaagttttaaaaagtcaacataccgtattctgcttcttaacatgatcctcagttctaccaaaagcctcagagatagccttgataattgtactctcaccaattcccaattctacaccttcatgagccggggcaatctcattcgccgaaagataaacagtagcgaccaaatcctcaggagtagtggcaataacagttctcaacatgttacacagaatatcagtaatcacaatccggccactttcatttgagatcagatcaaaagccaatgcgacaaacagaaacggaactctctcccctttctcccagcaagacattttttcaggatcgaaatcattcggcttcttcttcagcaatccaattttgctcttcatttcgtccgtcttgctcaaagtcttagcctttttcgctcccgtctttgaatcctccgcaattgacgatgtatccgatctgggatttgcagaatcagaaacaggctccagcagatcctccgtttttggaagtgtaccttcggaaacaatagttttgcccaaattagcatcttgggtttctccaattttccttttgttcggcgagcgagacaaattagttgtctggggagtcttcttcttggcggctgcacgagcattggacatgagagcatcaaatgcagaagggcgggaagaagacatggctctatggcacgagctaagacgcaagtgggaaatttggcggctaaaagagattaacacggaggagaattgagagatttgggttttagtacagagagaaggtatgcatcggaggtaattcgacgatcgaatcgctaacatcagtcgattttgaaattagggttttagaaaggacaggtgttgcaagtttgcaaccttgaagaaaggtgataatatattggcggcagaatttctcacccgccactctctcctttatgttgggccaaattaggaccacctgaagaagcgggctaagatatcttaagatggttcggatttgccgaaagaatacgattttttatccagagtttctacctgtaattactaattagggttagtccaaatctttaatagatcccaatgatcaaattttatttttttgaaaacttcaaatttggacaaaattgtgatgattatttcaaaggttattgtaaatataatattttataaattacatcaaatgctatcactaatggatactcatacactaaactgtgccctagttttaaatttttgttattgggcctttttattttatgtgggtctatgatatggaaaaaatatcgttatagcccaatagacagtataatgtcagcccaaacgtgacgcgtatggttatcgaactgtgaaatctaagtatcttactcattcgcacaatgagcgcgtagacgccacctatccgaaatccatgcgaaattgctgttttccgtaaaattaaaaaattaagcgcgtgaagggctgtttacgagttcctcaacttttaatctttatcttgtttaattggccaattaggatacaaatcttagtgtagaattaaaataaaacacatatttcaataatttagtggttgcacatgcaccctgtatttcttcactaaatccgcctgttaatttgggggatcgatgatttaccttctcatcacctagtatatgtatttctcccctatacatgaatgatgaacatgtgttttgtagtccttacaacacaaaaaaatctattgtgtgcttcctataagatccgttacactttgtttgtaaaggatcttaatttcaataaggaaaataaaccaagattgaagctaactcaatttcaggataaatgcttctcactcttgttgttggacgactaacacggaggctctagaaggaaaatattcagatgctaacaaatctccaatgactccaagttcttcgaattccatccaatccccgagtcctctggtgactgtagtaccaaccccacttcttcgaccgactatgaatagatcatagtcgtaagacacggagtgcaaaattttggatgtctctgtgccatctcccaccgtccagtcaatgatggttgacttatctccaggcctttggtcttcatgacggttcatgtctaccatttggctatgaatcctcaagctactctcatcggcatgagacgtagggatcagacgcaagaccgttaaaatcacttgttggttacctctcatgtggtcagctaatgccagggcctctttgtcgtcattcccacccacgtaaatcaagcacacctgcatttaatgtatgaaaataaaaaatattcaacatcatttagaataaacaaaaaaaaacaaaaaaaaaagaatgtagttacttacacggcacggagattctagggctttggtttgccaaattggtttgcgataaacaaagattccgacagaacaaggggcgcgtttcagaacattaagattaagacttcttagggtttgatcgtctgagataatgacatttccgttaggctcccaagtgcggtgaaacgagaggagaataagattggaaccttgactaagagcaaaccaacatatttgttcatgcatctctttagcggaagttaaagacgtgaacatgtttatggaagcggagtcccaataaacctcttgaaacagttggaaagagcttatgacattttcggaataagaccgacttccaggctttggtttttgaagctggtgggagataaacgtgggagtagcttgacccaataactctattaggtgaagaacacaacattccattggagagtctttagatggggaagttgctctaagaaggctaataaacgaaattatgttgtcaggcttgttgatgcacaccagcgtttgcatttctggcttctctttcaagtttcttcttccgtaacacacaaatctcttagaccggtcatacaggaaatgtatagccattgggggtaacaaagagtttacgagaatgtatacgcccaggagcgacaagacctccagactaatcctctgttaaaaatgagaaacattaaaacagaaatatatatacaaattaagatgatcatcatatccgttatatgagtatagctaaaatattcttacgtctttttcgaaggctgtaagtacgtaacccaactcgaaactactcttggtgcccataatgacacctaggataattgagtctctcaaaggtatctttgtagctaaggcggctaaaaacgaagtagcgaatttcgctatgtatacgatgggaaggaaggaaaaacactcgtacatatgtccatggagatgccttccatttccaaactcctttcgtagaaatgaccaatctagtttgatcatgctaagtgatccaaagaggggtaaaaaaatgccctcgttgaagctatcgaatttttgtataaatactgatcctaatggcggcccgttagggacagccaaaccaagagcaaatgcccctagcggtccgaagaataagaagcggctccaataaagataagataagtaagcaagcaagagaccaatgtagagatagacgttcttcaccggggctccttctggcgtatgtcttataacccaaagcataaattgtcgcacaaggtacacaaaaataaagaatgccataaaagctaatcccattttcactccttgagtttcatcacggctaacgtaagccgatacagtcaagaaaaaggcaagcaaatctgttaccattcccgctgactgagctatttgcccgaaatcagtgtgaactatcttgaggtcaaataacaacatgttgacgcaagtgaaaggcgtcatgctcattg

SEQ ID NO: 30652 - DNA, 4816 bp, Arabidopsis thaliana landsberg
aaattgaacgacacagacacatttatagaaacatgattacacatgcgctaacaactttaatatttactgagccaaagcacttgtgttgtacacaagaagagcacctccggcaagaattccggcgagagttaccgcccaaattgccaatccggtgactcctcccttgtacacgtcaccactcgctgaccactcgttctcgttgtaaataggactgcaacccaaacattaaaaatcaatcatctactacgtaatccatggttctttcttatctacaaaaaatgttatggaggatgataattctaattcacctgtatccatcgacgttagctccatacttgtcgacgtacttgtaaacaccgtatccctgcgattatacgtcattgtttagagaacccaccaaattattattaaaaaggatattaaacgacaccgttttcagttactacaaaccttgccctttctgccggaggcgtcgacgccgtccctcaagtccatgctgccgttaattcctacacacacatcgattaacggaaataagctatacatgaacggtaacgtgtatatgttgtaaaagtctgtgtaataataatataaacgaaccgaagggcttgtcggtcttgatcttcttgacgccactggcgacaattttgaaggagggacgagctcttgtgagcgacggtaatcctctagccgccgtcttctccaccgtgaaaccagctggtttcaatgtcaccgaagatagcatcactgaagcagccattatttttctcacaagatgatcaaactattcttctctcgatctcttctcaccctaatgttcatgttgtgtggcttcaaatacgagggagagaagatccggtaagtgattgtggttatgacacgtggctaatgttgtgtggctttggtctggatatcttccttactaacgttatcttcaactggttaagcagatccgtcagatcagttttttcttcatttcgtaatgccacgaaggagatgaaaaaaaacaaatgccacgtaggatattcaatactttttatttttcatttgtgacccctacaagttattttattttatttttgagaaaacccctacaagttttagtttacttaaaacaaccccactagtttgtcgtaaactcgcaatgtcttccacgttgtgaattttgccaagcgttgaaatgaaccgcatattcgtacaccgatcagcgttaagatactgcgtctataattgctcgctcgctgcgtctgtagtgttgacactagtagatgatattatttttcttttcttgattaatcaatgtctaatgctactcaaattatggcttctccataactggaaacatcaacaaacttgaccattgtctaatgcaagttctaatcatatttactagtaacaaataaatctgtatataatacatgattgtatcgtacacaaggatttggtcaatgttttctatgcttattctattattcttctactcaagtcattaagatatgatattaatacaaattaaagtcgtttaaattaataactattggttgatcagtcgatatattcgttacacgtctcagtcgtgatgagaaacaaaactaatataattaaattgagagtgagtaaggttacaagctatcgatttcatagattcagtctaaatattacccaccacaattttaataaatcaaattaaatcccacgtctgcttctaatgttagtagtagaccccaaataacaaaacaaattattcttttttcatgagtaaggactaaggactatataagctagctgttataacttatgagtcaaatgacctttctgaaagaaaaaaaccacatatattgaaatcttctaatgcaaatatatgtacattttgcctattattaagtctgtttaattcagtctgtaatatatattttgactatatacaatgtggataagagcataattttgatacttaaataaattacgcatctttgctgtattacttcacataatcccaaaaccccaagcacgatgatttgtatacagataacaaaacatgcttaactatataatgtcaaatgaaaacaaacaattttttacaacacatctttagaatcagtaaaataaaacacatgcgcgaacgtcacatctaaatagctatattatattatgccgaatgatgaattgaacaggtgtggttgtgtaaacttgtcaaacagcaattttttaaagagtcggattggttaaatacttaaatccattgcttagaagtgaacatttacagaactgaaccgggccggttttgactttatggtatagtaggaccagccgcaggtgatttcacactcttggaagtaaagtgggacccagaaaaaattagactactccagtaagtaagtaaggtcatttaacaacgactaataacgctaattaattagccaaaaacaatgctaattaataatgattaacgacttaattatactgttgccttcttctcaatggattatatcttgttgtcttcttctctctctctatatacgcgaaactttgtcgtctctctctcctcgaagaactttttgaaagtttgtctttctcttttagggtttctcaagctttaatcttacagtgtccccctctccaatcgactttaactaaagaagcccattttcttacttttgtttaccactctctctatttctctctccggggaactacttgtcggtggtggtgaaatctccgacgaagcattctattcgccggaaaattactatgatttttactggatccgatcaaaggatcggtttttaaaagtgggagcttgatgggtaatttagggaatgtctttgaatgaagcaaagactggttttgctaataaaggggaaagaaaagattccttttttctgttgttgttgtttcagatattacggagctttgctttgcctttttttctaatctgttgtttttggggaaacttgcatgtgaagggatttgcgttgaacgaatcagcgtgaccggattttcttcttgcaacactgtgttgttgttgttgttgttgttgttgttgttgttgtatttgtttatcttctctctgaagtttatgcggcaaatctgttgaattaagttaccgaaacgtggtggggttttctatgtgaattcttatcgaagtcattcatggatgagaagcagctagtttcgtcgagagatgagtctctttggttatgttctcacccctgtcgatctcggtttctgtctctgtgagttaactcgaggttgagctaagctagggattgaagttgttggattttagcgatggaggatattgggttggttaagcaaggttggaaatggatgcaatctcagaaacatatgtgctccgatgcttgttctgcgatgcgatgctttggggagatgataggagggcttgtggagcgtcactggccattggtgtgtagtggatgtgggaagctattaggattgcttcagttgtcagttctttattggaaagactgcatttttaggggtttccattgcagcgccaaattgggttcagctgctttgcttctgataatgtggagttgcttccttagcttgacttccttatcttgcttgctctatgttctccttagtatggtaataatgtcttttgattttccccttttcctgtaatctctatttctggatttgagatctatcaatagaagtgtattccactcaccaaactgatagtgaaacttatctaaggattgaaattcagaaaggcgattattcttgatctagatgctattcctcactaattgttttaagtctacattagattggagatttggtttattgagttgaggttcacctgaatttactattgcagggagctgctgcagctgttgttctgaacttgggttgcactcctgggctctttatcgtaggactatttggaattttgattttatggatgtatgcaaacttttggatcactggaacattgtttatagtcggaggtaagttttgattttttccctgatcagttctgttcttatgctcttccactgttacaatacagccactttagattagtttgttggctgggttgagtctttccggttattggtcaatgagtatttttatgcatgatctcgactatttacatggtattgatttctctatttttgtttgattcaggctatttattctccttaaatcatgctcgcgtggtggttcttgtggcgggcttatatgcgatgtattgtgtcaaagtcagacttggatggcttggtcttttcctctcaataaatcttgctttcttgtccaacgatatattaaattgtcttcttcaatggtgtgacaatctaagtgaaaaaccacaacacgaggaaccaaagaaaccgaaagaagcaatcatagaagaagactattcaagggaatttgagtatccttcagttcctgtcgaagatgaaaccgagacaaagattcacgagaataagtcttctgctaaaccaactgcgccttctactgttgttaataccgtaaaggaaatttctagtgttaaaatagtcaaaatagaagagtcaagttcagctgatgaaatgaagagaatactgaatagtttgaatcattatgaagcattgggggtccctcggcataaaaagattgatgctgcggtgcttaagaaagagtataggaagaaggtttctcctcttttccaatgctgagtaggtggttaatgaaatctctctgaatgttaatgaagtgtgttcaatatgttctaggcaatgtaggttcaacctgataaaaatatggggagtccattggcaagtgaatcattcaagaaacttcaaag

SEQ ID NO: 30653 - DNA, 3457 bp, Arabidopsis thaliana landsberg
  unsure (1)..(3457): unsure at all n locations
agctaacacatatttatgcgtcatcaaagagactatatgataactgaaatgtgtaaatgttacctgtagactgtgctgccttgtagtcctggtaaccttcacctgaatggaaacagttagcttgaaaaaacttccaacagttaattgggtttgaattgggtatagatagaaatatgannnnnnnnnnnnnnnnnnnnnattgttcttcttattagttaagtaggcaacacacagatatgaaagtataactacacatgtaaatcaatctgagggattacgtgttaagtgttctaagggtcacaaaagaaactgcggttttcttacgtcgatgaaattgtaattcaacgtgatgatccatcccaagggagcttcaaaccactaagtttttgattggcaagatgaatgagcaacgagttcctgcaaaagatatagcgaagatcaaagaagggttagtattatcgcctcattgtgtttctttatctcccagggaaaactttacatgcttacttcagaatagcgtatatgatctctgtgcgtataagaagtcttgactatagtttcccacttggtaacacttgtggagttttcttcaacattctttttttggggatgaaacaggtatctcggtgaagggatctttgagcttactgacggcagattactgaaaagccaagactcggaaggctttttgggtggcggcggagcaagtggagatagatcacagccactgttgttctttcccaactcatctgccttcatcatcttgactccactgctaatactaagagtttctacagccttaagctcgcgaacggctttcggtttctttccctccatttcaggttcctctgaaattgtttctggcaatttcttgacattagagttacgattctcattgctggtccttggagaattctctgagtcaacatataatgtcttctccatggcagagctcgttgaacagtcttgttttgtactttttggatagagtgattcgtgagacttgcttatgtttctgatatgcttgttcaacctgttagctctcataacctctgcttccttacgagtcccagggaaacccgcagcgtgaagaggagaactgtttcctacactgcgatacggtgacatacagccagtttgtctgtaaggagatgatggcctacttgcagaactcttcgattcatgttgttcagaaccaaagttaaacttcttcccaacacttgggtgtactggagactgagctatacttcccaacttttgcttataatcaagagcgagctgaaaacatttttgattgatcttcagtgagtttctgatcagtctatattatactaaaaaggtgaaaaggaaggagatgcttgagaaggaacctttttcacagattggaaccgagatttgagctgagcgaccttgcttgacttcacttgatcatggcttggggttctcagagagtaaggtttctctttaagaccattcactgagctcagcataccgagtgagtttttaaagcagatttgtggagacatcataccacagcctctcttagaaagatactcagaaacttcatcgtcatctgaatcctcctcgctttcttcgtcatctatgtcctgataataagatggagtaaaactagactcataccttgtaggagttgcacgattctctgctggtactatatctctaatctgtctcattggttctgacatgaggggcaatggctgtcgcttccaagaatattgaggtggttgctccagagtcaaggatttcgcagcaggtaagaaacgatccaacatgaattgaggatcctcagatggcattgacggtttcattgcctcaacaccaccaccaccacttatgctttgctttagagacaatgtatcaagggcatcagagaaaacatcatcatcttcactctcttctgcttcttcttctacatgtttactctccaagggagaatccggaacctgatctaaacccatgtcttggacaagaactgaaacagaaagagattcacttgtcttggactcatcagtgagctgctttggcatgtttctgcgtacagagattgcagatcttttcatcctccttgttgaaagaagaggtgcatcgaagttaagttgtttctccgccatagaaccaaccaaagccgttagagaagctcagagatggactgacaccaacttatttttctctgccaaacttaatgatgttacacagttctccaaaacagatctggaaaaccaaaacataaataaataagtcggagctacctagattccatagtagttgactaatttaagtaattaattatacatactgacacacatgaacccaacgacaaatctgaagaagatggaaaacgtacaaaaacgttaagaactttacaagaaactttcatttaattcaaatatatagttgcgccgctaaactttcaaacccgtgattcaaatcattggaaaaggatttatggggagttatggaaagagatcattgaagcaatgtagaaactaagtgcagcattgcatgattgaattgtgaaatctactaaccggagagatgtggagggaggagcttcggagttgtgtaagttcgttatttgcaccgagagagagtgtgatgagtctgagtgaaagggcctagagaaaaggacgagacttgagtcttgaggaagagtaagaacaaaggcatgtgaaagagagagaaacaaaagattgagtaagcttttggttttgtgtatatttctgtgccgtgaagatgacggagacgaaaatggaatttcaagaaggaaaaaaataaagaaaagcgacaagtcacgagtggcttgtgttagtgtcttcctcacccaaattgagtcacaaattgtaaactttaaatttctatctatttatgtcgtctcaaccaattctagagatatatactgtgacaaatatcacttttattatgctcattaggcttaagacatatattttcatatcactgtagattttatcatcgttttctaatccaaattttgagaaattgtggtagaatgatgctaagaaaatttatggccgagatgttttattgtttagctatcattcttcctatcaaaagttaacagatacaacaaaccatccattgtgataacaagccaaaaattaatgaaattaaacaaataaagccctttatagaataagcatcaagaaacccaaaatagttaaaagctattttcagttctgcacctgagcttctgcatcttctttttcttcattggctgcagccattagttcatcaaacttctctgacttcacaagcgtaatctcaatctgcaagaccaaaacccaaactgttaaatcaagataagaggtcgatgaaaattatagtttcacaagtagtaggcatgaagaactaccttagctttctgcacaggacgttctcttgcatcatccttaatatcaacagttgaagtcatgatctc

SEQ ID NO: 30654 - DNA, 1856 bp, Arabidopsis thaliana landsberg
gcaaatcctagtttaagcttaatcatgtatctcatttacgtttaatgaaggttttactatggttgatagattgtgttggggtgttggtcaacaaattccagcacaaaatagttgtgttagaggagaaaagagattgataaatatgtagaggacatgaagataaagggtgagagtgatattttgatcttgaaaaaaataattatggagtaactgataagtgatcatggacaaaaatgaaattaagagaatgattttccattcatttaatttgtttagataacttcatcttcttctttttcttcattctcttaatttcaactttgtccattatcattcaatccaatcactcatcaatcaattagccttgactaattgtacagacataataattaaatcagtaaaagtcaaaagctattatcatcaagcaatggaatcccatcccagactgcaattaacaaatggcaattgagagtttaacagaatttgacaacttctttttgtttttctaattgacaactttttatttggtcaaatcctattgaactataatatactattattatagtttattggtgctaagaatgtgaaccaaagtgattagttagcaagtaataaccttattgcacactataatactttcttatatttcttctagtatggttacgttttagtgttaaactaaaagaactgacaaaaagaaaaaaattagatatagccattagttataacttatagctcatgatgtcacatatgtatcatgtggcttacatttgttcaattatcccagagatagtgatttgttatccataagccatatcactaaccttttttatggacagattccaagtcttcaaaataaaatttcaactacatgtattactctacataataaggttggaagctgatttatgcaacgaagccatcttttttatacttcctacgatctttaaataaaaatgctcagaggtacagaggacacaatccaaggtgaaataaaaaagtgaaccaaaaattaacgaaatagaagtgtcttaaaattaagcagatagagatagggaacgaagaaataagatcgttgaacagaaaaaacttgaaacaatctagttttgctcttgggcttctgcagcctccttctcttcattagctgcagccattagttcatcaaacttctcagacttggcaagcgtgatctcaatctacaagtcacagtgtcaccaatttagcaaccaacatagcaatttcccagagaacaaaaatcattagacggaagctagaattccacagcataagcaatttatcaaatgattcgaaaatatataccttagctttctgcacaggacgaccccttgaatcatccttgatatccacagtcgatgtcatgatctctgcaggaaaaaacaatatccaaataagcaaaacttagtcactgaatctttcaaatctcttgtgctaacattaactcattcaagattaagaagatcttactcttttcaacagcaaagccattgttcttcaatatctcagcgaccgtaacaacagtggcaatagctgcacaacgcacaaatcaatgttttatgagaaaccagaataaactcttccaataaagaaagctcggataagatattacaaaatcacagaagataaaagattctatgtcataacaataaaaggaaacagcttttctgataataactttgaatttaatgaactcagttacatagtttaaaaaccatacatattagatttgatctataaacaagatcataaagaataaacattacccattcctagtgcagacaattcgacatcatgtactggtgatgtactctgtaacaaacaccaacatgtcataacat

SEQ ID NO: 30655 - DNA, 5058 bp, Arabidopsis thaliana landsberg
acaaaaccgactctattgtgaattcataatataggtactaaaatttatattgtatcactatttcttattaaaaaaagtgttaccgttcatttatatacctctatattttatcgaaaactatactttaaaaactacatagaaaaacatgcataaaatcttaaaacaagtttgtttttctaaaatatatttgtataaaggaaccgtgggagtatatatatgttaatatgtactatatattttgtcattcaacgtatgttttcttcgaaagctaccaatatgtgtaaaactaatgttgcaaagtggtgttacttgggaaaattcggttaggaacaaaggggctaaataagtcgctttgtttacgcaactcatcttctattcttctttatatatcacgcgtttttcgtgggcttcaatgggccacatgaggtcgacatttttaacctttatattcaaaagtacggcaaaaatacatcatgcgccacgtggctttctttgtttatcataatctcacacgtctcacttgtgacaaatgctaacgctaacttaactagtgggtttggttagccaaaataccaaatgatacaataagaaaacaagccgagttacttggcaacaaaattttgttcgaggtgagaaattcatgtgcaattgaatattagtatgactcgtctggctttaacatcaaaatcaagcacaaaacagaaaagaaaaaacgtcatcaaagtaatgactatttgactaattaagaaactcattttcttgtttgcaaacccttttttatatatttgtagttttgtagacaaacgaacgtgatgcgtttggaccagcgtcacagacgttgacggctttgggacacgtttgaagaaagaatacgccgtcgtttcgtcgacattccttatttcagtcttgctctctttttaggttcactacacgaattttcacgtacacaacttcacaacacgtttttgttacgagattctgtttttttgctcgataatttattttagtttaaggacaacacgtaaacagattgatttatatggttggtgtaattataaatgcaccgacagacttgaaactagaaattctaccgacagaaattcttgctcggaaaccatagacggtacctattaatgtcaatgctctttgattaaaaacaaaagcattaattgatcttacagttatgggtttatgttttataggaaagagtaaaagcccattatatttatgggcttatagaaaagagcaatagcccatttaaccgacttactctatcgggtataaccaaaaacccgataacccggctcgttcatcggggaattttccgttttctaaaagtaaatctctttgaaataaaaaagcttctccgtttccctcttttgaaaaaatcagaaaccctaaaatcgccactctctcgtctctcttcgcggtccattctgcttcatctctcccggcgaaaccttaatcgaacagctcggattcgatcctagtctctgttgttttctaagaaagatggagtggaatcgggagactctagtgttcctttcgcaatgttttcttaacacgctctctccgataccggagcctcgtcgaacggctgagagagcactctcggatgctgctgatcaggctaactacggcctagcccgttctccgtttggtggctgagccagcaatcgatgaacagacgcgtcacgccgctgctgtcaactttaagaaccatctccgttcgcgatggcatcctgctggtgattctggtatctcaccgatcgtagattctgagaaggagcagatcaagacactcatcgtctctcttatgctctctgcttctcctcgtatccagagccagttgagtgaagccctaaccgtcattggtaagcacgatttccccaaagcttggcctgctttgcttcctgagcttatcgccaaccttcaaaacgctgctctcgctggcgattatgtgtccgtcaatggtattcttgggaccgctagttcgattttcaaaaagtttagttatgagtatagaaccgatgctctgtttgttgatttgaagtattgcctggataattttgctgctcctttgactgaaatattcctgaaaacgtcttcgttgattgattctgctgcgagctctggtggttcacctccgatcctgaagcctctcttcgagtcccaaaggctgtgctgtacaatattttactctttgaactttcaggacttaccggagtttttcgaggatcatatgaaggagtggatgggagagtttaagaagtatctatcttcaaattatcccgccttggaaagcacagaggaggggttaacacttgttgatgatcttcgcgctgctatttgcgagaatatcaatcattatattgagaaaaacgaagaagagtttcaaggctttttgaatgagtttgcatcagttgtctggacattgctccgggatgtgtcaaagtctcctagcagagatcaactagctactacagcaatcaagttcttgacctctgtgagcacaagtgttcaccatgctttgtttgcgggggacaatgttatcaaggaaatttgccaaagtattgtgattcctaatgtttctttgagggtggaagatgaagaaattttcgagatgaactatattgagtttatccgtagagatatggaaggaagtgatgtggacactagaaggagaatagcttgtgagctactcaaaggccttgccacaaactacaaaacacaagtgacagaagtagtttctcttgagatacagaggctcttgagttcattttcagcaaacccgtcggcaaactggaaagataaggattgtgcaatttacttggttgtctctctatctactaagaaggcagggggtgcatctgtgtctacagatctcattgatgttcaaaacttctttgcaaacattattctcccggagctgcaaatccgcgatgtcaacagctttccaatgctaaaggcagggtccttgaagttcttaactatgtttcgtagtcatataccaaagccctttgcaatgcagttgttcccagagttggtccgtttccttaaagcagagtcgaacgtggtccactcttatgctgctagctgcatagagaagctcttgctagtgaaggaggaaggcgcaaggggtaataggtatgctgctggtgatttaagtccgtttttgctgcagttgatgacaaacctgtttgatgcgctgaaattcccagaatcagaggagaatcaatatctgatgaagtgtataatgcgggtccttggtgttgctgatatcagtgctgaggttgctggaccttgcatcgggggattgacctctattctcagtgaagtttgcaaaaatcctaaaaatcctatatttaaccactatctctttgagtctgtggctgtacttgttcgacgggcatgtgaacgtgatatttctcttatatctgcatttgaaacgagtcttttcccaagcctccagatgattttggcgaatgatatcacagagttcttgccttatgggtttcagttgctggctcagcttgttgagttaaatagaccacctctctcaccaaactacatgcagatcttcttgctgctcctctcgcctgagtcatggaagagaagtggcaatgttccagctcttgtgcgcctgcttcaagcttttctgcagaaagcacctcatgaggttactcaagagaatcggttgagtcaagttctggggatatttgaaaagctggttgcatctcctagcacggatgagcaaggcttttatatccttaacacgattattgagaatctggactacagtgtgattgcaccttacatgaaaggtgtatggagtgctctattcacacgcgttcaaaacaaaaagacagtcaagttccagaagtcgctagtaatattcatgtcgcttttcttggtgaagcatggacaggcttatctagtggagactatgaatactgttcagccaaacatcatcactgctatcgtggagcatttctggattccgaacctgaaactgatcatggggagtatggaggtcaagttaacggcagttgctgcaactagactcatatgtgagactccggctctcctggatccatcagctgctaaactctgggggaagatgcttgatagcatagtgacgcttgtttccaggcctgagcaagaaagggtacttgatgaacctgaaatgccagaaatctcagagaatgttggatacacagctgcatttgtgaaactccacaatgctgggaaaaaagaagaggatcctctgaaagacatcaaggacccaaaacagttcttggacgcttctgttacgaggctttcttctgcttctcatggtaggtacccacagataattggtgagaatcttgaacaagcaaaccaaacagctttgatccagctctgcaatgcttacaactgtggaattgcttgaaggtaaagtgtttgtattgacttgaagaatggtttcagattcgtattcaggaatcaatcttgatggtgattataaactgtttttggcaggagaaaaaaggggaaagaagaagggaaacacaacatcactgcattgcattgcgtctgcgaagaaaaagtggtcaagtcataaatgcatatttttgtcctaaaatcgggagtttcatagcatgtgcaagttagattagagaagagcatccatcatcttccaccaaaacttggatttcttatttttgattttcgcatttaaatgggggtttgtcttgatttccctttaaaagtaaagcatgttgttcatctctgtatggtggtactatgtgtttatgtgcattttgtcgtaatgtctgttggtcatggattcatcatggttttggttgttattaaagatggagaaagccaagcatgtttcataaacttctcgatttgaagaactagtttcgacgtgggcctgtaatcgaagtttgacccatatatctaatcaagtcaatttttcattatcatttttttgggggccaacatctcttccttgattaagaaatttgtttttatttaaactccgtgctttaaattttaatttaatctttcaag

SEQ ID NO: 30656 - DNA, 1903 bp, Arabidopsis thaliana landsberg
ttcaccccataatatccctttagagactgtgtgaaaagatacaagctgaacttccttgctgaacggcgaacccatttccatcaaaacctatgattttttaagaatggtcgtatcaaaagagagatcacaaatcaggcacaaggttagacacatgaaaccaaatatagaagctaaccttcttggagctgataaagggacgctcatcctggtatatgttctgctgataaacctcgtctcccagaagaaccagtttctcgttataacagaacttcaatatctctcttatgttagcttcgcttagacactggccagttgggttcccagggttaatgatcaccattgcccttacctgtacatgcattcaagacaatttgtaactggagcaagaaagacatcaccgattattgcaagagaagaaggaaaaagagtgcttactgttatcccttgagaacgagcctgagcaacggattgtcgaaggttagcaacatcaagtccccagttttcagactcatcaagatagtaaggaacaagagtaccacctaacagtgatatggtagctgagtaaagtggatactgtggaaccggaactagaatctgccaaacggaaaataaaacttataaatgaaatgtcagaaggtaaatcatagcagaaaagacctcttgagacagagcattaccccatctccattaccgcgtataacacaattcaagatttgcatcacacctttgctagctccatcagtgagaaagatgagttctgggtcactaaaaataaagaaccaaaaagcctaagctgggtttgtttctacaacaaaaatctatttcattgtgcagatgaaaacaatcaccttggatacccatcacgccgttgaatgaactcagcaacctctttcctaactcctggaaggcctcttgaatcactgtaagcacctattgaaacagaaaaaggcaatataactaactgttctgtttgtcaacactaatctacatattatagatgggctcataaggtcatacctaaaccgcctgaagtcaaggaaagataatgtttagctcttgcaatagcatcagctggaaatagcattccaacatttgggtcatctagtagaaacggagcttggcaaagcgcaaccacctgtaattggtattcgttttactatttaggctcaagcggagattgaagtctggctgtctaataattgtctatacacacatacctggcgaggaaatgtcaatggcttctgtcctaaagcatgagggttcccaacgtttgtgaaaataatctgttatagcccaagttaggaactgccaataactatggacaaatcaagtgctagatcataattgcaactgcacatcaagtccctaaccaacaaaggaccacaggtctagtctatctaaagctccttgtttcatatttaaagttagatacagagtcagagacacattgataacacctattattgagtaaaccaagatgtaaaggcacaagacatgaagacaacccaaagtgtttacctttttgccttctttctgcagctcagaagctcggagataaagttcacctcttacggcatactgacacttcttgacgttttcattcagagtatcgtagtctaatgccttgagagccatttatgttcactctgaaccaatccctagctcacttcttccctcctctacaattggaagaaaacaattcatcatcagcaattggaaccagaataccgagaatttggataaacgatcaagatcaaaactaattcgactctaagaacaccaaaaggccactaatttctgggtttctgtagctcaatttccagaacaaattcgtaatacacagtgtaaaggagacgccttttcatagggtatttcagaatcattcaaagaagaggatttgatc

SEQ ID NO: 30657 - DNA, 5087 bp, Arabidopsis thaliana landsberg
agtatcttgttggccatgcataattggatatcatgaaacactaacttttaacgaatatctctttcacgtaaatcattcctactttttatttccgatctacataacatggttttttaagagccaacacgagaacgatgaggcaaaacataaaacttcgcatgttaaatatcagtatttatttgataactaattagattagtttataatgctgcatacgttatatagtttctgcaaatagttcggtaaaaagtaaaaacagaaggcgaccagtatgatttgaaaatcatggatgtgatttatttactttgcaatggtacaaaattatcgtttacgaaaagttggaaagacacgtgtgatgtgatcactccgagacgtgaaagaacagaagttttgtgagttttatttttggagtttcagagttaattgtaaaaatctcatgttacagttttgtgcggaatgtatcaatactatccaaatgaacaacaaaggcaagggaagaaaagtaagttcgtttggatttactaagtaatcgatgagaacaagattcttatggatgatccttgttctgccacattgtattttggaacttgtccattgtgattgcgattcttttgaatagtatgaaattttccaaatctaataagattcgaattggtttttctgttttgtcttagaatataaaccgaactttactccacactaaaagtcagtccatttgctcaagaacaaagcatatttggacacagaaataatacaccgaaatcaaaaaaaaaaaaaaaaaaaagatttgcctgagctatatatatcctaccttaggattttacaaaaagaattgttgagaattatatcataagttttgtcctaagcgtcttatctacaaagacccaaacattaaattattagactcaactcatatctgtgacttgtgtcatatgtggctactaactgtcaagttatcacaaacctttctccaccatggcatcaaaaccatccggttcaaagccaatttcataaaatgcctaggttcaccagacggttcctgcctcctcttagatcatcatcctgaaaggcgctttttgcccgagtctcagacgcgcaaaaccgagtattctggcattgcaagatcagcaaacagctcgatcatgggattcaaattgaattgacaagcaaacctcttcttcctgttttgcttttttactcctcctcttcttcctcaagttcccgtggagcagtttcttcattagtgcgctctaagagatcctcataagctctcatagattcagcagtgaatctctccatagcttcaaaaatccgttgcaaactaccttgtaaactatcgctgctagtatcgctttggtaaacaacgttgccggatatcgaaagactattaccatcacccggtgccacaagaatcattttcttttccaatgcttgaatctctctctgtatcctctgttcttctctgtccatgttcctgactttcttctctgaatcaccatgccccgtcatcatcgtatctaaccgatcttgttcccaaagctgaagcacacttgtagtgaaactacgcattgcctcaataacttccttctcagatatcctatccagagcttgagaccattggttacagatgacaaagataggtggagccccaatcctaccaggtgaaaagggaactatcccatcaggtgtttcctcaggttcatacagaagacatttcatgagccatttattcaactcttttacataacccttctgcgcactaacccagctagagaatcccaatatccaattaataagttcatgtccaagcaaactcgtcgcttctagatgttcatcgcctagtttcttgcttgctcttatcgggcctaaaccttgtgcttccctaatagcttgacattgactttgatgacattcaagcattgttttccacattcttgtaagcctaattaaaaccgatatcaacatttgattagcgctacaattgcaaatatctagaacattgtatatatttggagaagacaagtttatatttacccttgaatcaatgcattcagttgcggccacaggtcttcgtctcttatcttattaatcgtcacggatattttgtcgacaacctgaatcgcaatccgtatttttgtggacatatctctcactaatttccgcgttttatctactttgatagcctcggcacctctttgatccaaacgctttagcttcctaagctttttctcgtgagctagacgcagtttctcctcggcctacacaaagaacaactctctcttcagaacaaaggaacagaacagaaccgaacagtgttctaagatcaaagatttgatacaaaaacaaaatcaaccattaccttgacttcatgataaagcttcttctcccaaagatggagcttgtgcaacgtcgaagaaagattcctcgacctcgaagcaagctcttcttcaatatctgcataagtaggtggcacaacagcagcagcagcagacgaagaagttcctccagaggtagaaggtaacgaaggagtaacaccgtgcaacatcttcgaagcagctgcttccaattcacacgacacaaaacaaatacaagttcaaaactttacttaaccaattacagaaagctgaaaactttaagtaacaacattgtaaaaagatcaaagctttaccatgtttacgaccataaggatgcttcccaacttcaagtaacttagcaatctcacttcctgactctgcagctttcacgaattgattctcaatctctttcgcaacttcaggcaccgcacgtggccctcctcctccaccaccaccacgtgtcgccgtggcattactccgccgttcctcatcttcaacaaccttcttctcaacaacgtgaacttcatactccatcccttctttctccaccgacacacttggtctagactgatacgcagatgcatctccgacatcacctccaccgctagtactagcaccggatttatcaagcggcggagacggggactcttccctcatcatgtgtacggcggcgggatttggttggtgaccaccaccggcggcgaattttggtttgccgtaaacttctttaacaacttcgtaatgtgaatcatcgtcttctaaatccggtataccttcttcttctcttaactctctcgaatctcgactcggagtatacggaggataataagtatcaaagggattcaaaaaatcccaaccgttagacctaggcggcgacggtggaggtggtggcggttttgttgctgcagcagttgtagaagcagaagaagaaccgtagtatcctggtccgggtccgggtactggatttgagtatccaaaatatgaatttttaggaggatatggatatgaagatgatgattcgcctatgtagactcgttgaggactagttggcctttgctcatagacaactgaaggaggcatggacttgttcttcatgtaattcatgtgcatataacttactcctcctcctcctccagagtaaggatgccccatcatatctggattcgggtacgggtttatataacccggttgttgttccatgtatccgcccattggtgctgattcgggaatagggaaattgccgagatggtggtggggaggagagtggtgatgcaacgaatccaaatccaagtcgtcgtcgtcttcttcatcttcgtcggaatctgaatcgaattcgagatgacccgaatcagaaccggaacccgagtgagcgtggttgtggttgtggtgagaagaagcaagcttttgtttttttggggaatttgttgcttcgtcgtcaaggtcaccttttctctgaggaggaagattaagtcgaggagaatcaccgacgttagcgccgccggaagcgacgaaacggtggtggtgattgatgaaaagatggagagagtgaccgatttctcgaagcgaatgagtgtaagccacgtgtgattcagctaaagcgtaacgttgatgaatagcagcttctaagaaagcacagcgttcacggcaaagagcaaccgccggaagatcgtcaagcttagaacttgtacaacccataacactcaataatatgattccaaacccaaaacaacaaagaaaaaaagaaacaaaaaaaaaagaatcaacttaaattaaattataaagaaaaaaaaaaaagagagagagagagagagacccaagatttgaaatcaggtgtagagaattgaaattaaaagacttttcgtaaagaaagagaaagaaaggtaggtgagaggaataagagatggaggcgcataaggggcaaagatggtgtgggttgatgttgatagagattacatacaaatgaaagaagtgattgttttctctataagataaaaaaagagataaaaatgaatgatattagctgaagaagatgaagaagaagaaagaaagaaaaaaaaatcagcaaaaggactgtgaaggaatcttgccagcaccgagattttcgtccgtttcttccataggattgagtcggtgtttttttcttttctttttttttataatttaccataatctcctttttcagaaaattaattaacctgaaaattcttacacggtagattttttttgttgggaaaatttaacctttttaggacagtactttgagagagattcagacatggatcttagaaaaagagatacggtagtactactagtaatttttgatctttatgttaataataacgtgtaagtataagtggactacttttctactttggctttgtggtttggtttgacggtaactttgactcgttttgaccatttttgtgtcattcccttaattatgttctttaattacgtaacgacagtatttgatttggacaatttaaattcgacatgttgatggtaacgggtaacgtaagaaattaagtgatgagattcgtattgaacttatgtcttgctattaattagtagtaattgatttattgattattctcaaaggaatgtaatggaatttgttttgatttaaaatagtactacagttgttggtttggtgtgttcaaactagagacgtaactaaaatcgatgtttgttagctttcaggcacttcaggcttcaagtgtgatgctaacgtcg

SEQ ID NO: 30658 - DNA, 1756 bp, Arabidopsis thaliana landsberg
  unsure (1)..(1756): unsure at all n locations
cttgccagtggcaggatatgtgttcagatatgatctgatcaaaggccaaggctgtgactttattgtgacaaaggaggatctgtttccccatccactcaacttagttttccaaaaggttgggcaagagagattcaagcaggcttgtggaactgaatgtgatttctcctctctatcagaggcagatttggtcgaggtaagtgagacacatgtgtatcctgtggcagtgaaaacagatgcatcatcagatcagaagatgattcatccacagtctgaacgccaaaccatcagataactcatactttttagagaaagatcataagggtgaatacatacaaggcgagtcgtgaagtagatcctgtgggtgaatgggaataggtacttcaagagatttttggcaaattcattgctttgtccactcctctcttaatcatacttttttttaagacgtgacaacataaatgatactatttgataaattaccataaaacatcatctaatattttgttggcatgcctgcatggttgtggtccagtattttggtaaatcgtcaggctactttggtactataagcgtttgtgaaacagagcatgaaaaccagtagaaacacacaacatagcaaacttcattgaacaaacacacaaaacaaagttcataacgacgacagcttatttaggtagaaccacagaagtgctgggtcgctggagcaaacttctgtggctttgctctatacatgagcaaagattggaaaacaaaacaacaccaacttaccaaacaacatagttttagtttataaagcttcatttgttaagcttattagtcttcccaccattgatggacaaagacgccactgtttctgaggcttttaatgataccggtgcagtcgctgtagcctgtgcagtgaagaaacagttcatcaactgagcagatagctcctgtctttatcagctctgagagaaacttcagctcagtatcgcttgtgttcatcttcagaaccacaaaatcagcgaagctagcagtttccttgaaccatgctagaaaatcaaagctatcatcttccacaaaaggttcttcgtgatctccggtattggctattgtagttttagttgctgcgagtcctggatgatagatgaaggttacaccnnnnnnnnnnnnnnnnnnnnnnnnnnnnnatgtgttgtgatgcacaaagtagctattaaaagctttcctatcaatcgggtacgatgggaagaaccagttcgatcttgctttcacatgatccactgccccgatatcaatataaaccagcctcttcctagaagagagatcaatgaactcaggcaagtaatgaatccgtctctcgaaatccgaacgtttttcatccagaagaggctccaataatccaatgtatggccggttgttgagaacagacgagcaatcagcaggaaagtcatgatgagtttgatccaagcggaaactatcttctccatctcttttgaatacaaccaaaacctgtttacccaatgaagcaacatgaacaacacttgagttcttcagcaatgaagaaacaggcgaaacggatctaaccaactcgttagagtcagacccactagttgtaccgacaagcatagccccagtttcaccggtcttaagtatacgctcgatctcataaacaagtgaagcagggacagcaactgactgaagatccatagaaaacacaaaaccaaaagaagcatcctcataatgtagctcacttgtgaacttcctatgcttgaaa

SEQ ID NO: 30659 - DNA, 1902 bp, Arabidopsis thaliana landsberg
  unsure (1)..(1902): unsure at all n locations
ctccaatggaacgtactttcaagaaatgaggtaagacttgaactccaataactccaactctttcattttaattatttgcattgaaacttgtgatgtattctattgatacaggtgtttgcggatcatgcatccagcctaaacccaatcgatgtcccaagggaattgatatgggaattacctcgaagaacggtctattttggtacctctgttcctacgatattcaaaggtataagattttctttattggattgtgatgcgattgtttatataaaagaaagttgttctaaccacttgagctctatttttctcaggtttatcaactgagaagatacaggcttgcttttggaaaggtacattttgtattaagcagtttcttcttgttctgaaacataacttatcttttgatattatgtagggtacgtatgtgtacgtggatttgatcgaaagacgaggggaccgaagcctttgattgcaagattgcacttcccggcgagcaaactgaagggacaacaagctaacctcgcctaatccgttggcaagcaaacaaatacaagcttatggttaagagtgagagagcacactgttccaatctagttaatgtaagaaagtgaaaacgtaaagttaacagtcctagagttgtacaaggtttctaaatcccattttagtttcgtcttaaatttgtatcaaacacttgtcacaaaaaacagacccgtagctgtgtaaactctctgttcccttcgtttggtttatatctgaatttacggttagcttttggttacctgaatcaagatctggttcgatatgtggaggatctcacttaacttggtttaaatcagatagttcaaccggaccaaagaattctattgttgtcaaatattagatgatgggcctattatacatggaatgtgggtcattaaatgggcctaaatatttttggaaccagctccgatcttcaacttttttttgtctcgtctccataaaatccccaattcacaaccctaattgatcggagattgtccaaactctctgacatttttgccgaattcgaagcattccttctatcttctccgtcttcttcgcagaatcgcgttatgcatctcaatttttagattgtaacttagggttactgattgttgtaatgctctgaattcccctctaacgaggatttgttgtcactgcaatcgatttttgccgattaggtttaatttagggcattatttgcgtacctcttgtattgtatagttctttgaaatggagaatcctcgtagaccgtttgatagatccagagatccaggtccgatgaagaaacccaggctcagcgaggaatcaatccggcctgttaattccaacgcgcggcagtttttgtcgcagagaacgcttggtacggctacggcggtgacagtgccacctgcttcgtcaaggtttcgagttagtggtagagaaactgagagtagtattgtcagtgatccgagccgagagcttaccagccacagccggttcatccacattatgagcttgtgaatcagtacaagtnnnnnnnnnnnnnnnnnnnnnnnnnnnnnnnnnnnnnnnnnnngaaccttacaataattgctggagagaatgttcatgctgctaaagccgtcgtaaccgccatttgcaacaacatcctcgaggtgaacacccagttttcatgcccactgttttgttgttataatccgtgctttagttctcaaattcttgtttgagtaataataattgtacgatataaggggaataaggtaaaaggtggtggttgagatttgtgttatctgtatacgaggttcaatgagaaccccagttttttgaatcaaccctagtatcctttataagggaatatgtgtttttatatttcttcatcaagtcgcaatcattgcttttgcc

SEQ ID NO: 30660 - DNA, 3411 bp, Arabidopsis thaliana landsberg
  unsure (1)..(3411): unsure at all n locations
aactccgttccgccatataactccgtctcgaaatataactcatcgcatattatttttttttttctaatattataaacttttattgactttaaatacatcaatcataatattaataataatttaaatcaaaaattatagaaaataaatcgtgattgtcaattcacttttgataattttttcttgtaattagtcaattagtgttatattgtggagagttgaatagtctcattttgcaattttagaagatcaatggtatatttccaaaacattgcagttttgaggattcaacttgcaatttacccttttcaaaaatcactttcgacaattaccaaaaaccagttcccccatttcatttcacgctttcttctcttctcatctcagagctccgtgatgaagaaatggttagcaatcgcagcgacggtggcgataattgcaataatcgttagacaaggcacgacacaatacggatggaacaaagaggcggcgttggaaaagctaaaggaatggtcagatcggctcgggatttgggcgattccgacgtatgtagcggttcacacaataaccttagctctttgtctccctcacgccgtattctttgaagctggtgcttctatgctctttggtttccttcctgctcttctctgtgttttctctgctaaagttctcgccgcttctttctccttctggatcggcaggtctgtttctgaatttggcaatccatttctctgttatgtgatccaaattgatcactttggatcgtttgtttgtgtatgaatttgatcgaaatggtttggatttagatcaaggtttatagctaacacactctgcgttagtttatcttatagttttgtgaatgcttaagctttttagatggagatggtttagattttcgagtagtgcaccattgttggaaaccttatgcagaacgtttagcatgataagaggaacttttgtgtagagaaatcgatctcattgttggttatcagaggaaagtatcacctttattagctgagaagatgcatgtcgttagaacttttcttaaaagttttagatgcatgtcttcagattctacaatggtgtgtggatgagattggttcttgtcttgtggatgtgatggagatgtatgaacgaaccgttagatgcttgtcatttggtacttaacatatttgtggatatgcttgagctggagaatgatttgcaattttcacatttatcacttgggagaacagttgacattctctgttacgtttttatgtttccaggtttgtttttaagagttccaccagagctacagggtgggcgcatagcaacaagtacttcaatattctctcaagaggagttgagcgcgatggttggaagtttgttcttcttgcaaggttctcgcccattccttcctatgtcataaactacgctttggcagctactgaagtccggtttgtagctgattttctgttccccacggttattggctgcctcccgatgatcctgcagaatgcatcagtcggtagcctcgctggtatggctgtggcttcagtagctggaaaacagaaaagtcaggtctggggttatgttttcccagtacttgggatactgtcaagtgttctgatttcattgagaatcaaaaagtactcagctggaattacagaggcatcatcagatacctctgctaacagctctagtttagcttcatctgaaactgcgaatcccgcttatggaaccgatggatccaagaaaagtgagtgatgatacaaaccatgatggtggtttttcatcgccggtattacactttggttggtttgcagctatcagattctcaacatcatggcttatttgggacgagttaggcagtatcttaatagtaacaaagctttagtttttgtagttcttaagttaaaagctttgaacaaaacagtgttattttctataccagacacaaaaactgtgtcgttgtaataacacttaccataacattttctttcagtgtatgtttaaagccgtttatatggttgaagcaatgtgactaaaatttttgtagcattgaaacaagctatatttgcattgctatggtcttgttttgtgaccaaaagacttagatgcagagtggatataactttgctaaatgtctgattttgtaaataacttgtgaagagaaaatctttatttggtaagagttgttttctcaatgtagcagtttactcatcattttcaaagttcaactctcatataacacaaagaggttagacagtgcagatgcttatggttgagaagctttacctaacaatggtacaaggcggttttgttgggatcacatgtgaagttaggcacatggattcgttcttggagttggtacaaggacttcaaaaagacaacgatgatgtataataaggacaagttgactatgtctctctcttttatcttaacattctaaattaggatttggtaaactgagagcagttaccttttgatgaatctcttcaagtataaaaaccctcaccattttactactatctcatcttaaaaaccctcgagttacacaaaaatggctatctcaaagcttattcctactcttgtgctctttgttttgttctcttttgatgttagtgttgctcatccaggtctaggatttggatggggaagtaatagtcccattggaggatctttttactcaaatctttacccacaattttaccagttctcttgtccacaagctgatgagattgtcatgacggtgctcgaaaaagccatagctaaagaaccaagaatggcagcatctttactcagacttcacttccacgactgcttcgttcaggtaaaagtatctttacctatttttgttttccctttatgtgtctcttatgcttaactcttatacactacactttttgtgtaaacagggctgtgatgcatcaatcttgttggatgatagtgctaccattagaagtgagaagaacgcgggaccaaacaagaactccgttagagggtttcaagtaatcgatgagatcaaagccaaacttgagcaagcttgtcctcaaactgtctcatgcgccgacattctagctctagctgctcgtggctcaactatactggtaaaattaagagacgttcaagagaaactattggctcagttatgagttatatttattgaatttgtggttcaatacagagtggtggaccatcatgggaacttccactagggaggagagactcgaggacagcgagccttaatggggcaaacacgaacattcctgcacctaactcaactattcaaaatctcttaaccatgttccaacgtaaaggtttgaacgaagaagaccttgtttccaaatcacgccgagctcaacatgtatttatcttttgtatcaggagtaaattaggaaaccaaaccgagaccgatttcttaaanccggattt

SEQ ID NO: 30661 - DNA, 639 bp, Arabidopsis thaliana landsberg
tctatatgttgtataaatatatatatcatgacagtcgctctccattacttcgataatggttcttttttttttcgaattctttctatttacactgactaactcctgtattagcttcgttgactaacctggtcacaagtccttgaagcctctgagctccaaagctaggaacaatcttagccacattaccgaccctggagcattttggtttcccactgcaccatccaccaggagtaaaactatctttatcattcctccgtttaagtaattccttatcgatcttattaagtacttcatcatctcttctgaatttcctagcaaacgcagcaccgctccatatcatcggcattgtgtcgttgagtgacaacacgtgtgggtgctgctgcggcggattgtcccaggaaatgtagtgtaggtcatggtttactgcagtttttgcaaactcaggcacgttgcaaatcacggtctggaagtaaccttcgggcgatgaaacgaagttggtgtaatacattaggagagttcgtggtaaattgtcccatccccatatgcaatactctacaaacgggcgtgatagagccatccaagctgatcctgtgacaacaacagtaacgaaaaaatatttcaagctttgatgcatatgac

SEQ ID NO: 30662 - DNA, 1971 bp, Arabidopsis thaliana landsberg
gaaattttttaatgttttattcgtggctcgaaaaaaactttttcggtcatctcctgattaaattaatcctcgtaataatcatcacattcatccctatctctttaggttacgttttttttctgtttaacaaaacaatgtcaaactttcaattcaacttcgatttcctttcttactattttaaaaatatgtttcctctctaaccaacactcaagtattttcttcatgatgctttcaaaaaagaataaaacttacgaattactttaaaaaaaaaaagattaatgtcttcttccgttgttgttgctactaccatcatttaaggtttatccattgttattttcctcgattcttttttcaagtttcaacttggatgagaaaatgaaaacaatttgttaaatgaccgaatcaatatacttctcttgttaaactaagtatcaaagtctgggtggtgtagtcggttatcacgctagtctcacacactagaggtccccggttcgaacccgggctcagacataattttttttttttttcacataatctttttttaacatgaagtaggggaggggcaaaaacgtcaaaatacagaaaaggaaaaagatacaacatttctggtttttgtgtgccggcgaagaaccggtgagtgacgggtcaattcacatacttgtttaacggcaacaaaaacctaccgataaatgctaaactaacgaaatcggatcatagctcgacgaagtctcgatcttttctattctctctttctgggtattcgtgggttttacccagatttcgaaattgaatggcggacgaactggaattgtcgccgttggttccaccgtcgccgatggtcgagccttccgagatcgatctcgaagctggaggacctggtgaacaaattcagtgccgaatctgccttgaaactgatggtaatgtcttctaaaaccctttagattcgcttcttccttaaatagattctttgcttcttgctagtgattgttgaacattttcatgtgctcatagatatgtctaacttcagttcaagaattcggattatgaaattcgaattggctagatcgttaatggttctgatgtgatttagattagtgttagtgataaactctttttttataaaagactagtgatttaaaaccgtgatatagtgagagagcttttgttctaacttacttggttgattcaagctcatttattgatcatggtcaggtagggatttcattgccccatgcaaatgcaaaggaacatcaaagtatgtacatcgtgattgcttggatcattggacagctataaaggtcccatttttcatacgctttagctcaaccttggtccatgcttgtgctgtagttagtgttacttgaaacttgaaagctgtgaatgtttgctttcactctttgactatttgttgttatcccttccattttcaatcaaatatgacaacctgtgtaagtgttattgaataggaacttcccttttgttgtaaatttctatttttgttgaatacgaaaaccattcgaaggctaaacaactaaagaatgatggttttggatgtgaaattttcagagttgatatatgtttcatgagtgatgattagagtggtggtgtttttggtagtatcatggtaaaataatgaatagcagatgttgacgcctggtaagctcgttttattgcaggaaggtttcgcgtttgcgcactgcacaacttgcaaggctccatattatctgagagttcacagtgctggagataggaaatggcggacattgaagtttcgcttctttgttactcgagacattttatccatatttcttgctgttcagcttgtaagtattcatttttcatgtgtgcttctgtttcttacagtagtttttctttcatttggtaatatatctaactcatgccttttaaatgacttcatctgctcacaggtgattgctgcattggcctacatggtctatttcatagatagtt

SEQ ID NO: 30663 - DNA, 1825 bp, Arabidopsis thaliana landsberg
  unsure (1)..(1825): unsure at all n locations
cgaattaggatcaatcgttgaaagtcatgatgttttgaagcttaatttccatggtggagttgatgggcttgcgggtaagctcaaggcatctcccacagatggcctttctactgaggctgctcagttatcccaaaggcaagagcttttcggaatcaacaagtttgcagagagcgaaatgaggggtttctgggtgtttgtatgggaagcnnnnnnnnnnnnnnnnnnnnnnnttcttggtgtttgtgctttcgtgtctttgattgttgggatagctactgaaggatggcctaaaggatcacatgatggtcttggcattgcggctagtattctcttggttgtgtttgttacagctactagcgattaccgccagtctttgcagttccgtgatttggataaagagaagaagaagatcactgttcaggtgacaaggaacgggtttagacagaaactgtcgatttacgacttgcttcctggtgacattgttcatctggcgattggagatcaggttcctgctgatggtcttttcctctcgggattctctgtggtgatagatgaatcgagtttgactggtgaaagtgagcctgtgatggtgaatgcgcagaatcctttccttatgtctggaaccaaagtgcaagatggatcttgtaagatgatgattactacagttgggatgaggactcaatggggaaagctaatggcgactttgaccgaaggaggggatgatgaaactccactgcaggtgaaactcaatggagttgctaccatcattggcaaaattggtcttttctttgcggtggatactttcgcggttctggtgcaaggaatgtttatgaggaagctttcaacgggaactcactgggtctggtctggtgatgaagcattggagctcttggaatactttgctattgctgtgacaatcgttgtggttgcggttcctgaaggattgcctttagctgtgactctaagtcttgcgtttgccatgaagaaaatgatgaacgataaagctcttgtgaggcatttagcagcatgtgagactatgggatctgcaacgacgatttgcagtgacaagactggtacactcacaaccaatcacatgaccgttgtgaagtcttgcatttgcatgaatgtgcaagatgtagcaaataaaggttctagcttgcaatcagaaatcccggaatctgcggtgaagttgttgattcaatcgattttcaataacacaggaggcgaagttgttgtcaacaaacatgggaaaaccgagcttttggggacgccaacagagactgctatattagagttggggttatctcttggaggtaagttccaagaagagaggaagtcttacaaagtgatcaaagttgagcctttcaactccacaaagaagcgaatgggagttgtaatcgagcttcctgagggaggacgtatgcgtgctcacacgaaaggagcttccgagattgttttagctgcttgtgacaaagttgtaaactcgagcggtgaggttgttccacttgatgaagaatcaatcaagtatctgaatgttacaatcaacgagtttgctaatgaagctcttcgaactctttgccttgcttatatggatattgaaggcgggttttcgccggatgatgcaatcccggcttctggatttacttgcgtagggattgtgggaatcaaagatcccgtacgtcctggagttaaagaatctgttgagctttgtcgccgtgctgggatcgctgtgaggatggttacaggagataccattcccaccgcgaaagcaattgctagagaatgaggaaaatactgatgacggtatagccatcgaaggtccgtt

SEQ ID NO: 30664 - DNA, 4954 bp, Arabidopsis thaliana landsberg
  unsure (1)..(4954): unsure at all n locations
tacattcataaatataacttataaaatcttacgtcatgaagacagtaagggcatgacattatagtaaaacccggtacagaaaatgaattacatatatttttctttggactcaaagctagatagacacaaaagaattacttgtgccagacggcatagcgatggccacttgttgctagagtccagtctctaccagaagggcaccaagagccgtctccaagcttcatacatattttctcaccaacaatggctgcatataagttagattctgcttttaaaacacggacagttgacctactgtggatatcttgtcgcctcctaatgtcaatctgtcaatgaataataacaaagaaaaaacacagaggacaggtcttagaagagatcgaaaattttggaccatggatgatggtccaatgataagcagagattgaacagaataccagtttgacaatctgatcatgtattgagcttccccaatcgtaaaagtgatcgtagaacacacagggaatgccgggatgagtaagtatatatgcatagccctacaaaaacacaaaaccgatcttcttcgattagggagagacttaaaatgcaagtaaatggacagacttttgtttagagagctactttacctccataacgtggtgtgaagggaacggccaatgagcctatgagagcaacaaaaaaggtaagcaaacatatgaaggctaaaagaaaatgattacagaagtaattgttaagtaacctgagtagagccagtgtcatggttatcaaggaatgtgacagctcttgaaggccaccatcccattacacccggtggcttcccttgggcatcacataaacgccaatactgaccctttacggcttcctgttgtaacaagaagcatttgtgtttcaatacaatggtgggattatgtaagcaaaactcaatgaattttagaggtcttgaagaatctacttacctgcagaattcctttagttgtgaagtcaaatgcagcagagatctgtcccgtcgcatcgatccaactgattatacgctgtctatggctatctgtagaaaaaacaagtgtcatagttacataacactagaatcatggaactagactcactagtcatacatgtcatacgctataagatgaagaaacgcaaggaaaccttgattatagtctagaccatggccattgtaattgcaagaatcccaacattctccaaccgagaataatggtttcgctgcgccaatgtattccttcacatagtttgctgaataactgcatcggttacattcaaatgttacagattgaggactccacaagcaaataaacaagtcacctaagcgaaaagcctaaaacttaccccctagcaaagtcaaaacggaaatcttgaaacccgacggtgttgcgtaaccaacgaagccatccaattatatctttcctaacaaaatgctgagtgtgatcaacatttggaactccattgaaattatcccctgtgcttcggttaccctgttatagtagaaaacttttcctttagagtctctaagaacgtaatgatatgtcaaaagatgtaatttaatcatcatcactcaccagtcctccggtacaagaagtcacggcgtgttcatcccacggtaatgaaattccatcataacggttatacattccaccatgtcctctagttgtcccaacacgatgattgatgactatatcagccatagctctaactttgtattgtttcatcttgcgcagtaaggatttcaatagatgctcagagccatatgctgagtttagtgaataaaggtcctgtggaagataacctgaaatgatatagtaacaacgtttctgcagttagtaatggttattcgttttcaaaactcaaactgtacaaaggctcattatgtctaggaatcagtttcctctaaccttccggtgcaagagattgagatggtggtggcaaccatgcagaagtaaagccggatttcgcgatgtcaggaactttaccatccaagtttctccaccaatcatatttatgagattcccaattatatgcctgataaaaaagacaaggatcaaaccacaattgaacaactataaactataagtgttacactataaaaagacagatgagcttacttggagaatgacttcccttccatcgcgtataacccgacctgatatagataagcaatggagttaatagttcagctttgaaactaagaaacaaaagaatcatgaacaaggcttaatcctatattaaaggctttgttattaccgatatcagtttggtcgttgcattcatcaaagacctgcaatagtatcatgctttagaacaaagaaagatgacaaaaatatccaaaaaaaagttctaggggaaaaaagaaaacagaaggcacttacattgttatagtagcccatgtcgagacaagattcaatgaaaacctcaaacagtaatcaacgaaaaaacagaacgattacctgcatacagaatgataccatttcagagagatccaaaacaataagtaataagcgtattgagacacaaaccagtatgtgttctgaagcagcaaactaataaatcaaaagatcctaaattccaaacatttccactaagataaaaaaatcagtgaagagcaacatttgtttcatgacagataaatgaaacaaaaacaaaattctgtttccaatttgagattgattataggctaaccaaaattctgtttaacaagatcacacacataaaagaagatcaaataccaaggaaacgaagaagctaaatcacacaagtcccttaaagaaacaatcctacatatatatatagagccgaagagagaacgtgaagtgattaaacagtttctgatcccaaacgaatcagaatcaaatgtcaaacaactttcggccacacaaaaaacaaaccttttataaatgttacaatgaagaagaagaattaaaagagcaaattggactatacccacaaacacaaagtgtcgattcgattctacggtattcattaagagatgagccaatcatagaatacaataccttcttcaaaaagtagaaagctgtaaacaacttgagcagagaatctcagagattaaaagctatgtctttttttctctaactcaatcgagaaacgaagattcataatttgccaaagtagtttttttttttcttcttcgtccacctgaagaaaaatctagacacgcgttgactgttagaataaagtcgataacttcaattgaaataagatttgtatacgctttttcatacgacgcgtgtaccatcagcaagacaacaacgcctatacctcaaggagatttgaaagtttcatactttgatacaattagaacggctataattttctctctttcttttgcccactagaacagactgtatttccaaagatgtgtgctcaatggatatagttgactttttcaaatttgacttgaattataagagaaacatttgggcttgagactaataagcccatatataaaacaaaattataggcccagtgaaagagcggtctgatatcaaaaacgccgtcgtagagaagcatacctcagtcgtcttcaagggtttcgacttttgtgcggtagcgattaacgttgttgcagaggaaagctggaaaatagagagttcgatgaactcttgttactataatggaggctcaggagtttgaaaaccgagagatttccccggttcgaggttcctgattgagaatcagatcagaagtagctcaatatgttgccactaccaccgatgaggaaatagacttgtcctgcgacggaggtgtcacggagcctcaaaaagttgctataatcttcgcgttttgtggtgtaggataccaaggaatgcaaaagaatcccggcgcgaaaaccattgaaggcgagctcgaagaagctttgtttcatgccggagctgtaccggagtccattagaggcaagccaaaactatacgatttcgcacgatctgcacggacagataaaggagttagtgctgttggacaagtagtttcaggtcgcttcatcgttgatccacttggattcgtgaatcgtctcaattcaaatctccctaatcagattagaatcttcggttacaagtatgtaacgccgtcgtttagctccaagaagttttgcgatcgaagaaggtatgtgtatctgcttccagtgtttgctcttgatccaatctcgcatcgtgatagagaaacagtaatggctagtttgggtccgggagaggaatatgttaagtgctttgagtgctcagagagaggtcgtaagattcctccaggtcttgtgggtaaatggaaaggtaccaactttgggactaaatcattggattttcagtcagacatttcgtcgaacaactctagtgcattaagaagtgacaacaagattgaagctttgagttctaatttagctggcttatgctcagtagatgttgaagtaggtaggatacaagaagacagttgtaaattgaatacaaattcatcagagactaaggtaaagagcaagttttgttatggtgaaaaggaaaaggaaaggttcagtagaatactaagttgttatgttggatcatataatttccataacttcactacaagaacaaaannnnnnnnnnnnnnnnngaatcgtcaaatcatctccttcactgctaatactgtgattaatcttgatgggattgactttatcaagtgtgaagtcttaggcaaaagctttatgcttcatcagattcggaagatgatgggtcttgctgttgcaatcatgcggaattgtgcttctgaatcacttatccaaagtgctttcagcaagtaagcttctcctttttctttggttttgaagctttgcaatgtctatagttttgtttgttttgatactcagtccggaaattatgtaaccagggatgtgaatataactgtaccaatggcgccagaagttggactttatctggacgaatgcttcttcacgtct

SEQ ID NO: 30665 - DNA, 1110 bp, Arabidopsis thaliana landsberg
agcaaatctctcctgaaagatgaagggccaaatatcaatgtttcaaacattgggggaacaaaataaactttaaatcatctttcagggcaatttcttaattatgtaagagttatgatcgggtttcgagttagggttcaatctcgggttttagatcaacccgattcacaacaccgcattgaaattggagttctctcgaagttccgtggcgtcaaaaatggcgtcaggtgatcggaaatccccagaacaaacaaatcaggcgttatctcctccgacgccgattgtgcaggaaaatggaactccgacgaagcgtgtgttgatcacttcccttttagcaggtttcgcaatgcttcttctctctttcgggatttattattacgtttagttgatcgcaagaactaggatactctataatgagttccatcttagaacaattttgagatttttggttgcacatatcatcggaaagtagccaaagttcatcggaaagaagcaattagattctcgttgttgtatcagttactagaagttcgattctaggttttatttctccattaattagaagaattcataacttttggtgtatagagagaatttaattcaccagctttgattgactattcaattgcttacttattgcatagaacatgtcaggaatgtttgcatcacagtgactgagaagatgtttcatgtgcaggagtaattggaggaggaactggtttagtgtctaaacaccggatagctcatcccaatattcctactgtttacgctgctaattttgctattgtcgccggttgctattgcggtacctaattcccttctttgttatattgtgcctgctcttttccatttgtgttatcaagattgaaacggagtgtttccattttctctaagaaggtggagtgtctgtcatattatgtgaatattgtgtgattgttgcaatgttttggtttggtaggagctcgtgaatctgtgagaataactcgaagatcagaacacgatgatttaatgaactcagctattggaggactttttagtggtgctttgcttggacgacttcaaggttcgaaatcttgaattcttttctggcagaatctattctactccatgtcc

SEQ ID NO: 30666 - DNA, 1375 bp, Arabidopsis thaliana landsberg
ttccattaatgtaagattagttttagtttctagttggttaaagtttcagactttgagttcttattggtcctggatagaaaagaagtgagaaatataaacttattttaaatgttttcttgtaacttataacttcttatttcacacaccgttgacctgattcgttgcaccaactcctaaatttttatattgaaatttttatatatcatcatgcaggacccaacaagcttacaatggctgtccacttgtgtctgtctgttactgaaatttataattgtttttgatcagcaacttgtgttctttcggctgtgaactagtttaaagaacacacggcttttttttaaggtcaaattaggtcgacatttaccatatatagactcattacacactggtgggtttctcatagattagagaaaaaaagcttcaagctttcatggaacatgtcagagttatcttcttctttgcttgtttcctaacgcttgctccatttcatgcctttgctcaggtagattcctatgagtttgatccagatttcaactgtgttgatcgtggcaacttcacggcgaacagcacttttgccgggaatctcaaccgccttgtctcctctctctcctcactcaaatcccaagcttatggcttctacaacctctcttctggagactcatctggagaaagagcttatgcaattggtctgtgtagaagagaagtcaaaagagatgattgtgtcagctgtattcaggcagctgcaagaaacctcaccaagcagtgtccgctgacaaaacaagctgttgtatggtacacgcactgtatgtttcgttactcaaacaggacaatctacggaagaaaagaaacgaacccgactaaggcttttattgctggtgaagagatatcagcaaacagagatgactttgagcgtctgcagagaggactattggacagactcaaaggaattgcggctgctggtgggcctaataggaaatacgctcaaggaaacggttcagcttcggctgggtaccggagattctatggaactgtgcaatgtacgccagatttgtctgaacaggattgtaatgattgtttagtttttgggtttgagaatattccgagttgttgtgatgctgagattggtcttcggtggttttctcctagttgtaacttccggtttgagacgtggagattctacgagtttgatgccgacctagagccagatccacctgcaattcagcctgctgattcaccacaatcagctgcaagaactgagaggacaggtacatagaaatgtttgaatgtttctctcgtgtgtgctactgcagatgttgtccctagcagaatatgtttttgtttctaagattaagatagtgaatgttttaagcgttag

SEQ ID NO: 30667 - DNA, 3459 bp, Arabidopsis thaliana landsberg
  unsure (1)..(3459): unsure at all n locations
ggtgtgtactgttttgtatatacgaaataaatgtttggaggcttggaaaatttttcagggaaaaaaaaatcacatccatatgaccatatctattaatgagcaacactcatttcatcatatagatgccgagtgatcatttaatacactgtaagaaaatttaaagctttctgattccaaaattctcaaatctttttattacagtgtctttcatattcactttcttacaaagattattattaccaaatttagttacatgtctgctgctgagtttcaaataaattattgtcttaataaagatcttatcctatctccacacacgtttcctcctttttatttctcactttcaagcttagaaagaatattcttgttcgattttttttctcccgaacatgatctttcaatctcaacgacgatttctcagtgactaactactacatttgtatacattcttcatcatcatcatctgtgtttttgttcatattcatttttcagttatcgttttcaatttttaaaactttttttcttgggtttcacaaaatttgtcgttaatcgatgaatttgattgttttcaagatcacccatctctcgaattcacgaaatctctcagcttttccgtgattcttggtaaaaattcacaaaatcgaaattggagaaagaaagaaaaaattagggtttgaggaaaagcttcgatttttcacacgatgagtcatcaccggcgagattccggcggagatgtagttcacgtgattcccacaaacaatcctccgccggataattggtttccgaatctcggcgatagtgctgtttgggcgacggaagatgattacaatagagcttgggctatgaatcccgataacacctccggcgacaacaatggtccaccgaacaagaagactcgaggctctccgtcgtcttcatcagccacgactacttctgctgcgagcaatcgtactaaagcgattgggaaaatgttcttcaagacgaagctttgttgcaagtttcgtgctgggacttgtccgtatataacgaattgtaactttgctcatacggtggaggagcttcgtcgtccaccgccgaattggcaggagattgtggcggctcatgaggaggagagatctggtggtatgggaactcctacagtttctgtggttgagattccacgggaggagtttcagatcccgtctttggtgtcatcgacggctgagagtgggagaacttttaaaggaagacattgtaagaagttttatactgaagaaggatgtccttatggagaaagttgtacgtttctgcatgatgaggcttcgaggaatagagagagtgttgctattagcttaggacctggtggttatggaagtggtggtggtggtggaagtggcggtggttctgttggtggtggtggtagtagtagcaatgtagtagtgcttggtggtggtggtggaagtggaagtggaagtgggattcagattttgaagccttcaaattggaagacaaggatttgcaacaaatgggagattactgggtattgtccatttggtgctaagtgtcattttgctcatggagctgcaggtaaagattctgccttttgttcgatttcgtttgctttatgaatggaatggttaggcctgaagataaggacgggattgagttcataggtctctagtggttagccaagtttttagtgacttctcgtatgttagtttaaactttaaaccaatgttgcttgatgaatgggttaaaggtgactagagattggacgctgaagctccaagctgagtaaaatggttattcgcttattcgctgaccctgtcgggttctgtatcttatgacaccgctatctttgggtttttgttggtctgtggttaccatttagtctgttaggttatttgttagaagttttagtcaacggtgcttcatggttagactagtgagaatggtactaaaggttatataggagactaactaatggattgagtgcttatatcagttgagctcgccgcaggagtactgataaacattcatttttggtctggtattgtaatgaatctgacgagttgttgaatcttaggatagagttataggtttctcgaattctcaaaattttgatagataatctgtcttacatttgtgaaaaatgttgaatctttgatagtttcttatgggaaacaatttcttagaattgttgaacgatatgaccttagaaagttccgtagtcgtgtagctttaaagttttgagtctttatgatttgcagagttacatagatttggcggaggactcgtggaagaagaaggcaaagacggagtatcacccaatccggacacaaagcaaacagtacaaaaccccaaaggactatcagacacaacaacacttctatctccaggagtacctcataatgcagatgccagttaccacactggagttgcattgcaacgagcgtctagtgcggttacacaaaagcctggaattagaactcatcagaagtggaaaggaccggcgaaaatcagtcggatatacggtgattggatcgacgatattgaatgatgttacctctttcttttttctacacatttagataactgctaagaaaattacaatctccctttttttgcatggtacattttgtagagtttgtatatgtgtaatccttgtatctgttgttgttgttgtttgttgttgtagattatgacttatgttatattatcatctttcttttgtatcttttccatatttgatttttaaaacatttcataatttgattataaagccacaatttttttttatcataactagaagatcgatcaccgtaaaactagaatgtagaattagattagagcaaattaattggccacgaagataacacgtagcttttgtcaccaaagactcgctcaaaactctaaaagctttggcatatgtatgaccttacctttctcctcatttctctcttccccattgacattacccttcccacacggcaacctcagaataaaccctttcttcttcctcaagctacctatgaaaccagtcacaatatttctgatccggccgtttcactgcacggtctcaaaatgtctatatccacgaccgagacagacaatttcaaaccagtccataccctcgtttcctccccggtcaccatagtcttgaccggtagtcttctcttcatcattttcacggggttcttctccttcttcttctgtggatgtntatttaggaaactcatgaggatttggaataaccatcgaaaccgaaaccgtcctagtaacctaatccaaccgtctaatccacctgaaaacctcggtctcgactccaagatcattgaatcattccctgagtatccttattcggtgaaagatcatgggacggntcaatgttccatttgtttaacagagtttatggatgatgacactattaggctcatttctacttgtaatcactccttccacancgattgcattgatctt

SEQ ID NO: 30668 - DNA, 1375 bp, Arabidopsis thaliana landsberg
  unsure (1)..(1375): unsure at all n locations
agttttaggatcaccattagaaattgatggtaaatcttcccatctccgtggcctgtctttcagtgtgcttcctttttatactttattttcataaacgcataaaatagtagcacagcgggatatattttgacattttccacgatatttttcaggttgagagccaaattcttattcttgatatgtggagaaattcattaaattctcttacatggacggaactattgcggcagatattggttgccgctggttatggttcattgaagtgtgctgttcaatcagaagaactaagtaaggtactgattttgtactcttgctgacacgtttgatcattgaaacattttgtgttgactttctttgcttggctatattttattcaagaccatgatgattttcttgtccttttctttcgtattgaagttcagcaactagcatctacttgttttgttcttggagatagatcagttatatgtggggaattgaaggctcttgctcgattatattttgttattgatgatatccacatgtttgtattatttagttcggcattttcttttctgatgcattgttggttgatgttacctttnnnnnnnnnnnnnnnnnnnnnnntcatgaaaaagtatggccttcgtcttggaacgttaaagggtgaattatttagaatgcttaatgggcaaggcaataatggcttgaaaatatccgagttagccgatgctccagaggtaagttggtgttaaattattatcagcttctgtttgtaaataaagtgagaaatttggactaaatttggttggtcgtttacttgtactatttggctgctctctgaaaccctagatgatatctaatggaatatgctgatggtgtgtggttttgtaggttgctgtgctaaatcttgcaactgtaccagaagaacgagagaattcaatatgttcaactctagcaagtgatattacattattcgaaaagatatcagaatcaacgtatcgtgtacgtgttaattgtttctctgaggaccctgacaagagccagtctgattcggacgactccgggagtgttgatgatgaatctgatgattgctcaattagttctggtgatgaaattgaacatgtttcagaaaatcctgcacttcgaaaagttaagtgtaggaaaaggcggaagcataaaagtaaaatgcgggaagtatgtagtgagattgatgaaagccatcccggagaaccatggctgttggggctaatggaaggcgaatattcagacctaagcgttgaagagaagttagatgtttttgtggctttgattgatcttcttagttctggttccactatcagaatggaggtaatctacatactatttagaccaaatatttcaggggatcctctga

SEQ ID NO: 30669 - DNA, 2332 bp, Arabidopsis thaliana landsberg
ctcatttcattgacctttttgatgcatttcattcacctcctaaaatcaatcgtttcttctttttcttaatgctcataggtcacatattgctcttagctcgacctaacactttctttccacaatttgttggacaatatttttgttttcaaaccagtcacatagtatgccgttgggtaaataatgcgggtatggggccggtacttatatctgacctttatataagctttttccgagacggattcaaatcggatactgatcgaagacgggtcatgaatattatgtccagcccctataactaacaagttaagttaatggccacatggtttgggtgcctaagcatcagtgaaatacgttacttatatctgtcaacgtgacataacgtctgttttgttttgagttaaagattaccaatgttaccgttgactatggcataacagcgacctatagaggaggcattattgcgaagaaccttgaagagacgcaaaccataagcaaaaacacattcaatacaacactgcttaaattaataaatagaaacagaggaagtaaattattcgtgtacgttagggtttttaatcttaaaatataaaaaacttagaaaactaaagagtacaagtcttacaaaagattcagaacagaagcttttcaagaaaccaacaacttcagaagaaggaaattcttggtagtaacttaaacctggaagattcattctttcttcatggagtctttttggagacccttcttccggatctggaggcatctcttgatgttaaatgattcaaaaacgctttcgggcaatgcagagacaactgcacccatgagagcgtgaggccagtacggtgtgcattgcgcttcatagcctacaaaacgcagtgctgcctttgcgtaaccctctggtgatgcaactaagaaggatgctcttcttatttttgtcatctttgttgcaacatacaagggaacctataaaacaacactcacttaattagcggtacaatcaagatttcaaaaacttattgagcagtgtgacccaataagttgttttggtagtatacaactccacagtcagctataacatacatggaaactgccacagatcagtcaaatacaatctctggcataactattctacatccgaaagtggttacaattaagtatctaaagttcactacacagattgcctagttttatagttttgacattctttcacaaaatcggcctgaagaaacaatcagaaacaagatctcacatcatcgaagtattcaacaaagagacatgtgatgcaatagttcctcatttgcaaaacccaaaactaacaaaaataatcaacattccaggtccattatataaacagaaacagagtcaggaaaccatgacagaatcacatcttttagagattcaataaacaacattttacacattttcctgtctatattatcagacaaaacttctaatcaggcaacagattaactttgataagccaggaactactatcctacaaagataagattggttttactcatttatcaatcctacttctaatcaaaatctcaagcaaaatcatgttactaagacgacaaaattgattcagtaaagttcacctggcattgaacatcaatcccactcttcttatactcaacatgtagacactttgtgaactgatccacgtacctaaaacaacaaaacaaacaaaaaaagtcactactttaaaccactcaaaagcatcatctcaaacaaacaaatacaagacaagaagattcacttacgttttagcaccagcataaacagagtaaaaaggataagaaggaataagagcagcagcaccagaacccatattaataatagcacctttcttcctcttaagcatattaggcaacacagcttgagtaactttagtagttccttcaacattgatcttaatcaagttattgatcaactcttcatcaacctcatgaaaatacttagcataaggataagacatgccagcattattaatcaaaatcccaacatctaatccttcaatactctccttaatccgtttcacaccttcatcaatatctccagagaaatccatcacaacggtcaagatctgagtttgactatacttagatctgatggaatcagagacatctttgagcttgtctgggttacgagcaacgagtataaggttaagacctttctgggctaactgaaaggcgaaagctttaccgattccgtctgttggtccggtgatgattgcccatgaaccgtatcggcggaggtttttggatggtcggaggaagtagatgtagaaagatctgaggagggtgaagatgaatttgaagattgagattga

SEQ ID NO: 30670 - DNA, 1518 bp, Arabidopsis thaliana landsberg
  unsure (1)..(1518): unsure at all n locations
atcttttttcaacttactttcatccattaacaagctcctcattttgttttatgcgtaacttcattcagagcttatgctgttgggattcatatcactactactcacaattggacaaacaccaatctcaaatatctgcatctcccagaaagttgcgtcaacaatgcacccttgcagtgctgctgaagaagctaaaaaatacggcaagaaagacgccggaaagaaagatgatggagatggagataaacccggtcgaagacttcttcttgagttagctgaatcttatatccatagaagaagtttagccaccaaaggctatgacaaatgtgcagagaaggtaactaataatctcccttctctctctatataaaaatcattctctgcttgttaaaccgatggaattttgatttctattgatggatttactcaggggaaagtggcttttgtatctgcttatggaatccaccagctgcatatattcatcttcgtgctcgcggttgttcatgttgtttactgcattgttacttatgctttcggaaagatcaaggtaactaacatttcttgtgactttcggaaaaagagtgtatgcaaaagatttttatacttgttttcttgagtattgcagatgaggacgtggaagtcgtgggaggaagagacaaagacaatagagtatcagtattccaacggtatgtaaatatgtgagtattcgacgaaacttaaagaccagaatgggaatgaattagtcttgttatgcagatcctgagaggttcaggtttgcgagggacacatcttttgggagaagacatctcaatttctggagcaagacgagagtcacactatggattgtttgtttttttagacagttctttggatctgtcaccaaagttgattacttagcactaagacatggtttcatcatggtatggaatttattctttttatctattgttcattataacatgtatctctcaaagacaatgatctaacatactgcatatttcaggcgcattttgctcccggtaacgaatcaagattcgatttccgcaagtatattcagagatcattagagaaagacttcaaaaccgttgttgaaatcaggtttggatctaataatgattgctttataaagtctgagcaaagccaatttggatattttatcttaaatctctgccaactttatgcagtccggttatctggtttgtcgctgtgctattcctcttgaccaattcatatggtaacgttcattgcttactcgcaaaaactacattttagctgcatcaatagtcgcacaaaagtgacatcggttttcttttgaaacaggattacgttcttacccntggttaccattcattccactagtcgtaagtacaaacaaactcttgaactgattttgtctttttgcagccagttttgtaacagagtgaaaatatataactgcaggtaattctaatagttggaacaaagctttgaagtcataatacaaaattgggtctaagatctaagagaaaggtgatgtggtga

SEQ ID NO: 30671 - DNA, 1231 bp, Arabidopsis thaliana landsberg
tactcacctgcaaggtctcaagtcgttcttggacatggactccaataatgatgaggttcgtatgattggaatatggggaatgggaggcattggaaaaaccaccatcgccaagtgtctctatgaccagctctcatcacaatttacagctagttatttcacacaagacattaaaggtattcataaagagcttgatctactgcatttgcaaaacagacttctctacaataccctcggtgatgatattacgccgtggagtgtggaagctggacgcgaggtcatagcggcaagacttgggaaccacaaggttcttcttgtgcttgatggtgtggataaactggtacagatccatgctctggcaaaagagacaagatggtttggtcgtcagagccgaatcatcataaccacccgagacaagggcttgctcaatagttgtggagtaaaaaccatctatgatgttaagtgcttggacgacaaggattccctgcagatgtttaaacagattgcttttgaaggaggcagtcctccttctgttgattttgaacagctctcaatccgagcagctcggcttgcgcacgggcttccttctgcccttcaagcctatgccttatttctccgtggaagggccaactctcctgaagaatgggaagaagcagtatgtggacttgaaagtactcctgacgagaatataatggaaatcctgaaaattagctacgagggtttagcaaaagcacatcagaatgcttttctccatgttgcatgtctctttaatggagacactttccggcgtgtcacttcactacttgatgttagcagaatggaaagtaacttgtggatgagagttttagcagagaaatctctcatcaatataacaagtaatggatatgtaaccctgcataagttggttgaacaaatgggaagagaaattatgcttgccagtggaaaattcatcggggatccggagacaattcatgatactcttgtaagtatctacttaattcttgatattcatcttgtaatcctgcaacttatcgtgctcactgctatattttctatcaccagggaatgggacaaactgaaagcatctccctacacatatgtgaaatgacctgtgcattttcgatggcgaccggtgtttttagcagaatgtataaacttaggtttttaaaggtctacaagcatgttaacgagagagaatcgatgttgcaggtgattcctgaagatgaataccctt

SEQ ID NO: 30672 - DNA, 2160 bp, Arabidopsis thaliana landsberg
  unsure (1)..(2160): unsure at all n locations
attctcaatccgagctactaagcttgctcacgggcttctttctgccattcaagcctatgcattatttctccgnggaaggacagcgagtcctgaggagtgggaagaagcactgggtgcacttgaaagcagtcttgacgagaatataatggaaatcttgaaaattagctacgagggcttaccaaaaccacatcagaatgtattccttcatgttgtctgtctcttcaatggagacactctccagcgaatcacttcccttcttcatggccccatacctcagagcagcctgtggataagagttttagcagagaaatctctcatcaaaatatcaactaatggatctgttatcatgcacaagttggtcgaacaaatgggaagagaaattatccgcgacgacatgtctttggctcgaaagttcctcagggatcctatggaaattcgcgttgccctggctttcagagacgtaagcatctatatcatctttgatctattcttttaaattttcatgcatcctgacctgacgagtttctggctttgtgtttcttttgtcttcttatcatcagggaggagaacaaactgaatgcatgtgcctacacacgtgtgatatgacctgtgtgttatccatggaggccagtgttgttggccgtatgcataatctcaagtttctcaaggtttacaagcatgtagattacagagagtcgaatctgcaactcattccagaccaaccgttcctgcctcgtagcctacggctattccattgggatgcatttccattgagagccctgccttccggttctgatccatgttttcttgttgaactcaatctgcgtcacagtgatttagaaactctctggagtggaacaccggtaatcttttctatgattctgcatcttgtgtttgtgtttttgatagagcaatggtgtgaaaacagagaatccttgcgagaaacataattccaactatttccatgtgttgttgtatcttgctcagatgttgaagagtttgaagagactagatgtgacgggatctaagcatctcaagcaacttccagatctttcaagtatcacgagtcttgaggaattgcttctggaacaatgcacgagactggagggcattccagagtgtattggaaaaaggtctaccttaaagaagcttaagctatcctaccgtggagggcgtagaagtgccctgcggttttttctacgaaaatctacaaggcagcaacatattggattggagttcccagacgcaaaagtgaaaatggatgcacttataaacatatcgattgggggagacattacttttgagttttgttcaaaatttagaggatatgctgaatacgtctcttttaattctgagcaacagatacccattatatcggcgatgagtctgcaacaagcaccttgggtcatctcagagtgcaacagattcaattccctccgcatcatgaggttcagccacaaagaaaacggtgaatctttctcctttgacgtctttccagatttttccgacctgaaagagctaaaactagtgaacttaaacatcaggaaaatcccatctgggatttgtcacctggatttactatacaagctgggcttcagcggaaatgattttgggaccttaccagaagctatgagtagcctttcccggttaaaaactctttggcttcaaaactgctttaagctccaggagttgccaaagctaactcaggtgcagacacttacacttaccaactgtaggaaccttagatcattggcgaaactatctaacacaagtcaagatgagggaagatactgtttgcttgagctttgccttgaaaattgcaagagtgttgaatcattgtcagatcagcttagtcatttcaccaagttgacatgtttagatctcagcagccatgattttgagacattgccatcaagcatcagagatcttacctcattggtaacactttgcctcaataactgcaagaaactcaaatcggtggaaaaacttcccttgtctctccaatttctcgatgcacacggctgtgattctctcgaagctggttctgcagaacattttgaggacataccaaacaaggaggtgaatacttggctcttgatccgtctctactatgattgatgtagttaccctttatcatctcctttttttaatgggcacata

SEQ ID NO: 30673 - DNA, 2003 bp, Arabidopsis thaliana landsberg
tacaaacacgaaagtccatgttcttggagaggaatctcttgtaataacgattctaaagtcttaactttgtctcttcccaattctcagcttcttggttcgattccttctgatttgggttctctcttaacacttcaaagtctcgatctttccaataattccttcaatgggccattaccggtttctttcttcaacgctagagagcttcgtttccttgatctctctagtaacatgatctccggcgaaatcccttccgcaattggtgatcttcacaatcttctaaccctaaatctctctgataatgccttggcgggaaagttacctacaaatttggcgtcgttgagaaacttaacggtggtttctttggagaataattacttttccggcgagattcccggcggttggagagttgttgagttcttagacctgtcgtcgaatctgatcaatggctcgcttcctccggattttggcggatatagtctccagtacttaaatgtctcgtttaaccaaatctccggcgaaattccaccggagatcggagtcaatttcccaagaaacgtcaccgttgatctctccttcaacaatttaaccggtccaatccctgattctccggttttcttaaaccaggaatcaaatttcttttcaggaaacccgggtctatgcggtgaaccgacccgaaacccgtgtcttatcccttcctcgccgtctatcgtctccgaagccgacgtaccgacgtctacaccagcaatcgccgcaataccgaacacaatcggttcaaacccggttaccgatccaaattcacaacaaaccgacccaaatccccgaaccgggttacgacccggagttataatagggatcgtagtcggagatatcgctggaatcggaatcctcgccgtgattttcctctacatctacagatgcaagaagaacaagatagtggataacaacaacaacgacaagcaaagaacagaaacagacacaattacgttatcaacattttcatcttcttcttcttcaccagaagagtcaagaagattcaggaaatggtcgtgtctacgaaaagatcctgaaacgacaccgtctgaagaagaagatgaagatgatgaagacgaagaaagcggttacaatgcaaatcaacggtcaggagataacaagttagtgaccgttgatggagagaaggagatggagattgagactctgcttaaggcttcagcttatattttaggagccacaggttcgagtataatgtataaagccgttcttgaagacggtagggttttcgcggttcgtcgactcggtgaaaacggtttatctcagcgccggtttaaggattttgagccgcacattcgagccattgggaaattggttcacccgaatttggttagactttgtgggttctattggggtaccgacgagaaactagtcatttacgattttgtccctaacggcagcctcgtcaacccccgttaccgtgagtctctttaaccaggaggcgtgctataacattgtttgctatcttacacatgtgtgtatatgagtttgctgaattttgtgtgtccttgggcaggaaaaggaggaggttcttcttcaccgtatcacctaccgtgggaaactcggctcaagatagcaaagggcattgcacgtgggctggcttatctccacgagaagaagcatgtgcatggaaacttgaagcctagcaacatacttttgggccatgacatggaacccaaaataggcgatttcggactcgaaaggcttcttacaggcgaaacaagctacattcgagctggtggatcttctaggattttcagtagtaagcgttacacaacttcctcgcgagaattctcgtctatcgggcctacaccaagcccgagtccaagctcagtgggggcgatgtcaccctactgcgcaccagagtcttttcgaagcctaaaaccgagtccgaaatgggacgtttacggctttggagtgatccttctcgagcttctcacgggaaagattgtgtc

SEQ ID NO: 30674 - DNA, 2474 bp, Arabidopsis thaliana landsberg
  unsure (1)..(2474): unsure at all n locations
aaattttacataatttattaatatatagatccaaattgtgcacattatgtcctttttttttcaacgcacaattaggtgttcatctttgactttgaattgtatggaatgaaagaaatacccgaaagaaagaaaaaaaatcctcgtttttttatgaatcattctagtatgttgagaatactttggtcaccggcatacaccaatttctctgattcctgatttgctatctttatcaaatttgttgtttttggtttgatcaaagacagaaaccctaggaaaaggttttgtcgacggcattttaaaaatatatgaaatacaaaccctaaacaacgttaatgttttacggcggctctctttttaatcaaataaaccctagaaaacgatttatcggcgcccttataaaaagtataacgaaaaacagaaaccctaaacatcgttcaggtgggtttttcaaaacgcagcctagtaaccaaaaatgagaaaatacattatttgcaatatgcccatgtcccgttaaaatataaggctggaatgacggaagttttgttctctctctccttctcaattgatcgctctttaggtcaagaaaaatgacggcgacgaaaaccctagtttctttactaagagactaatcagaagtagggttaaatatacaaccattcctagcccaataaagttcaagcccaagaacacccaaaatatattattggcattaacagcccatagatatgcaaattaatataatcaaatacaaacaaaatgcatgttattcggcttttttggattcgggtaattcaaatcggagagtttagtatcctttatggtggatatgattggatattctgtattcatgtactctagtcgatcgcgttcaaatcagatagaggattttaggacttaattgagtaaatatacaaaattggttcagtttgattcggtcattcaagtttaggacgaatcaggtttagacttttagaagttataaataccctaaaaatgggtactaatcagttcgtgtatttcatacttgattgtatctcatacctgaacaagtaaatgaatacctgaaatactggtatgtttttttggtggattatggttaaatttcagatcttttgctagattttgggtataattggatccaaaactcaaaccatttacaaatatatcagatatttatgtcccgttcgaatatcagctttgttttgttctctttgctttattctcatgttgcggttttaaagcttcaattttggtgagttttgcttgattgaattaattttttcgttttatatagagaatctacgaagatctacaaagtttttttaagctctcatgaaatctagaattccagtgtcgatgaaatctcacactttgtaaagcttgcatagatctaagatcaaatctaggcatgggcatatagataacccgttccggttaaatgggtaatggatttactactcttagggtaattgcatatattcagttccggttcggattaggtacacccggattcgggttagactgggtactaagtctnnnnnnnnnnnnnnnnnngaaaattttgaattctttcgggttcgggtctgaatggataaaaattaaccgtaaacccaaaatgtgagtaataaagagaataaaacacttcaaacttgacatccaaatccaatccaaaatcacaaagtgtaatacttagaattaagagtgagtaatccgataatgaatttgaaaacataaatccgactatctgaaaataaaaagtatagaactacacgagaagtaggattgtagccttgttggaaactgatgcatgggtaattcaatcaagcatgcaaaaggtaactagtctataaatgtataaaactatatctataccgtatatatacacataccttatatcgggtttatggatatccggtgtgtgtaatgggcaatctctgatccggaccgacccgaactctatccaatgaggtacattcctgaaactcttactcgcccaaatcgggttttttcgatatgggtttagtttgggtattgaaaaaaatagaaatagactaatctaattgtgtatttttgttgttgaatttaattgtcctaaatagtaatgagaacttgtatgaggttcaagagagcacataaagttatgacatttgaccatcttacattgttaatggaataaaagaagagaaaaaaaaatgttgatatgtgttattttatggcaaggaaatagaaattcaggtatttttttcaagcaaaatttcataatttgggttagaaattttctcaaaaatagtaacgacgtcaacgatgtcgttaacggccataacgaagacgaagagaaattagaaaataaagaatagtttgtgtttgttttacgatgaaaaaaaaaattgactgattntatagggtttatggctgattttatatccattagggaaatctgagaaatgcattagttatgactataaactcatacc

SEQ ID NO: 30675 - DNA, 1488 bp, Arabidopsis thaliana landsberg
aagaagaactattatttttatgaattgatcagaagcatttttctattggttaatgatgaaagaaaactaatcttacaaatcatatatactcccatgtctttaaagaagccttcattcatgctgggaaagatagaaggtgagggtttgtttgtgacataaaatgtcgtgtagtgaataattcctataaagtcagatgatcctttaagttgctctgactcttcctccgaaaacaccggtaatctcgatccaacagttctcttcatttcatccggatagtctccaaataccaaaggcttcaacatcctgaattatcattttagtcttcagattttgtccgcaagttattgaaacacagagaaagaaagctttctttttgctcaccagccatagaagaaagctttagctctttgagttgcgatttcatcgtctttggagtttgtatagggagataacccaaatgcaaatatactaagccctatggatcctttctgcttactctgcaccatcatatgaactttgatcatacgaggttgaggttcgggttaaaagagcgaaaaatgtgtgtttgtgagtatatataccttgtacttaagtttatacaactttgaagcagaggcatgagctagcaatatgttatggcctgcaagatatggttctgtagaagaatttccactagtacaattgatgaatttgttaggagaacaatgtccagggggcgagattccttggtcataagaaccaatggcgaaaattgtagcttcgtttattgtagtccataacttcacatcctccccaaactctctgaaacatacatctgcataagcagtgaagtcttctctgcaatggtaaattaaacaacaagttttgtttactatttcacatcatctttttctacataatctgtaaaaagaaagtacaatgccgctttttgttaacctacacgatcatgtggttgagccatccttcatattcgtcctcaagatattgaggatgatcaaagtggtgcagtgtaacatatggttcaattcctatagtaattagtttacttaaagtcaagttaacaataataaaaccgcgcacaatatcgagtggatatgacaagaggtcttaccatggctaactaattcttggatgaggttcttgtaaaactgtagacccttttggttaacagggcctcttctatctaatgagataatttaagaactcataaacttgatctaagattcatgagtaaaactgaacattaagcgaacatgtttaagaagacttactaggtattagcctacaccaagagatggagaatctgaaagcatctaagttagtgtccaccatcaactttacatctttctgaatagtcacaataaactcaggcttgatgaattaaaaactcataatgtactaagagtaaattttcacagacgagaaagaaccttatatttgtgatacccatcacaatgttatatctccgttcccttggttattatctgc

SEQ ID NO: 30676 - DNA, 3471 bp, Arabidopsis thaliana landsberg
tggcaaataacatcaacttttgttattttatcttaaactacaaaatctgtaagagaaaaggagtgacgcctacatcattctgtggttgagccatcctccatattcatcctccagagactgaggatgatcatagtggtagagtgtaacatgtggttcaattcctgtagtaagtctacttaaactctagttaatacgaactaaacctaactcttgagtcctaccgtggatatgaagataggtcttaccgtggcttactaactcttggatgaggttcttgtagaactgtagacccttttggttaacaggccctcttccatctaatcagataataaattacgaactgatcataaatttgatcccttcactgagctataacatgtttaagaaaacttactaggtattagcctattaccaagagatggagaatctgaaagcatctaagttagtgtccaccatcaacttcacatcatcctgtataaattcataatgaaactcaggcttgatgaataaaacctcatgatgtagtcagagaaacagagaagctaaagaaccttgtacttgtgatacccatcacatgctatatctccgttaccttggtcacctgcaatgttagaaacaagaatcaaagcacaagagtgacaaactctaatactaataatagtttgtgttaaaatgaaaagcttacgagagtgacaaagagtgtcccacaggctaggtttccttccgtcttctgcagcagctccttcccactagtagagaccaaacatttggttcagttttgttcaaaagttaagaaaaaagaagctcataaattggttccaaacctgataagcagaagtgccggctccaaagacgaatccctcagggtagtcagatctgctgaaaacgtcgctgcatttcccggagaaagcaaaagcaagaaaaatggcaaacagagccaaaatctgttccatttctcacacacacacacactcttttcttcgttccatgttagaataagtaagtccagtagccatttgcgtacccgctagatatagttgtgacgtagacattaatgatgatgcaatttagataagaaacatattgggaagtgtgttgaaatgaattatgggctttatttactatgataagaaacagattacgctggatcggagcccaggtctgaccaacccaaataacgaaagaaactaggggaccggaaaaccatgcggctatgcagccccagccccacatatatgagggcttttgggccaaaaaaatatttttggactttttgttacatttcaattttttttgggtattcctaaatttttgttaatagtatggactatgatataataacttttgagggattaaagtaaaaatatttggtcctcttataaagaaaaaaatattttatttcataaaacttaataattattacaaagcataaaatattaaacatacattatcttaaaattttaaaatagatgtgaaaaaaacggaataacgataagtttttctgttgattgttgattgttgcaaatttcaatatacgaatacttataacgatgttttgaattgaaattttctacgaatacttataacgatatatatagtaaaagagaaatttcttaacttataattaaacaccattaagtaatgtatggaggattaacaaaattggatataaaacaagaatgtataatgttcattttgacgccatttcttcttcttcatattttacaatttacactaaacattttcccaaattcagctcataatcaagtgcgcctcatattttcgccaaattcatctaattgaaaacccaaatttcaatatactcatgtcttgtgaagcaaacaaatctcttatttcgcatttctttgggcttcgcaacattattgggctttgtttggggcccatttagaatgaagaagtactttagttaaaaactcagataaacctagccgtcgtcaccgtcaccgtctccgtcgaaatccccattacttacgacaccgcgagctctcaatcttcttcttacactctattgcttgtgtttcctcttcactacaacagtttcgtgtaccaaaggcagttctttcttttgtcccaaggtaagctttgtgattccttgagactgtgttgatgaagcacagactcagagacttttggtttatgattctctttatctttgtgacatgaagcagagctaaagaaaacatgggaataccagatgcagctcaagacttgtcgacagagatggaagttgatgcttttagaagaatcttccctcttcgtttctttgagcgtcatctctctgaatctcttcgtcctgatggaagacaacttggaaaagctagagacaccattgttaatcttggtataaacaatgaagattgattctttttagtttttatcaaattaaaaatgtcaactttatagtggtttcttgtgtttgttgtaggacttgtttcaactgctgatgggtctgctcttgctaagattggttccactgtaagaacccgccttagtcgtttcgatagtattcacatgatcagcaatgttttgcttacatagttgtttcgtgtttatagactatgcttgctgctattagaatggaagttatgactccttctacggactctccagacgaaggatgcataggttgttatctcgttgtcttgttctctatgtggttttgttgttcttctttggtgattcattttgtgattcctttttggtagctattgagttccatatgcctccaatttgttctccgactgttcgtcctggaagaccagccgaagctgctcccgttatttcaaagcgtttgtctgatactattttaaggtgtgttttggtttgatctttctctttatattttctctgtctcattgagcatcaaatacaatgttccttctaaaagtgtttcttttttgttctagttctggtatgattgatcttaaagaactgtgtctagttagtggaaaagctgcttggatgggttatctggtgagtactcgttggtcttatatcggtgcttgtccgtcagttgattcacatctattcttctagggatctttctctttgatatttaactgagttctctagcatatatatgaacattgttgctctctgaaatttctcataggacatatattgcctggatgctgatggtgctctctttgatgctgctctgcttgctgctgtcgcagccttctccaatcgtaagttcttctctgttctcatcctttagttggtttcacagctcctttagagaacctttgaataaagctgattctcaagtttatcaaatccatttcgaatatgagtaaaaagagcaagccttagagaacacttaaatcttgctgagtgagtcatacctgagtaatattcttccctgcacaatagcggtttgttcagaagttgtgtgattggtgttccgagacagaagaatttttcctctgatgcataaaatatcttatatag

SEQ ID NO: 30677 - DNA, 4585 bp, Arabidopsis thaliana landsberg
tgccgtcatcggcacggaccgcgttccgatgcctaaacagagtcctctaacaaatcgcattttcaggtatatcttcttaacactgatttggtctcttagttcgttttattctccgttctgaaattgttttggttttgcgaattttgtttggaatgaaagatctccggtagaactaagctgttgcgtggagacgatgctcccttaccacactgccactgcttccgctttgctcaattcaatgctctcagtttcacgccgtggttggatcgttgatggtactttactctcttctcattgcttattattctctatattgtttagtttcttgatgatagaataaagtttacatgcttagttatctggtaaatgaaatgcacaaacaaaaatgcttaaagacaaatgtgtttcattttttcgataggtctcttgattgaattgaattgaattgttaccgagtttgatttgatttgagtgtttagtgtagtctttcgtgtgcatgttttagtggagagcttgctaagaagaaacctctttgttgttgaagatgtcaatcatagtaggattattgattagacaaaatgtctgcattcttaagtttgttgcataatagtggtaaactggtaatgatcatatgcttgtggatctccccacattacggttgttgttgttatgggctaggtttagagttgctctgttctacatagaaagttaaaacaagatcttaactttatttagtgtagtgaatgtggattttttatgtgttcatttattcaattaattctaaacttctctggcatctctcagttttcattatgtgtgcattgttgattgggaggtagctctattaggctttttctttcctgaactcaaatttttttggatcctgagttttgagtttctcgtgcaattgtgttattgaactttccttatgcatggtttgtcccagtattaagttcttaggtatatgcccttaagattttggtttttacgaacagaagtcattttttacagatctttttggcatctagaatactccacctctaaataattggacagtctaggaaaacatactactctaatagaaaaatcctttagcagagtctgtcctgtgtcatctttttgtacatatctttacccagttaaatccaatgtcttgaatccattgagaaaaaaacaattttttttgctttgtagggctagacgagactagatgaagatccatcaacaaaagtgatgtgagtcaatcaatttatcttctggtcttggagttgggtctttttactggatttgccatcatggttatagagtttttctatatggatacataagcgatcgtttcttagaaagatgggtcatttgtagttgattctctgcgatagtgtggtctttgttaatgcggtcaaatatgcttgagatattgacatactgctatattttctgaatatcttggactagaacacttgtcatcagcataagaatcacactgatacaaaaaattggtattcactcagattgcaatgatgatgtatgatgaattactgggagaggtcagcgatgcatgcagtctaagacaaggtggtgctgaaatgagacttttcttttgggtttcttgaacttgatcttagggcagtttgccattagaagtgataataattgagttacgtctctaggcaattttcttttgtttttgttttagctcgataaatgagtcgaaagtttctaatgtagtgtctgtatcgtttgttttctggtgttgtagatggatgactcttgttctcaccattgcagtaagcaggaagattttcttaagagttctaagaccccttttgttgattcttaaaccatatctgcaaatgttttaactattttactttataaatataaaagtgaatcagttttcatgggttcttacatcgaatcgccttctattgtggctcgtatgcatatggaattggaactattttctgattcttttaaaattgaagggagattatgttccaaaattgaatacagcaagcagctagattttgactttcatactattatgtatttaaatcggaaaccagaattatggtttgaagaacaagaagaagaagaagaaataacaccacaaaggagccagaagtcaaagcctgaacatcacacgtggccagcgtagtagtccacacgtggccagcgtagtagtccacacgactgttgcaactgctgaatatagtaactaatttgattccttgacttcagtgactcgggaacgaacgagtcttaaatttggaaataaagaatcattttccaaaattggaagcaagatctccgtatatgtcagtttcgatgatccactttttgtgggagtacatgtgtgcacagattttatattggattataacaatacacgaataaaaatctttgaattacctattatcatccttgttcccgcttggtctcatccctaaagaggctctagatttctacacataagaccaaattcattttcgtaggagacaaaatgtagattatgtatgctcatctctaactacagtatactaggaatgctcgggccaatgataatattgatatgttaatttgcgcttattattgtacatctaaaagaaatcttgtgtgtttggcttagcttaaaagttaaaatatgtaatattttggttatcttttgtatagtcacacattttgaacatgcccgaaaaccagcatgagagtttagaaaattcgaattagctacgtttttttttttttgtttcaatcatccaccaagatatccggcgatgaatcttcctataaaataccaataattgatacatgcaaaatcttaatttctaaaagtgtatcattataacaaactaacaatacattgaggcggaaataattttagaaaatcatatcaaacttttaaggaaatgaatgattacacacattcactcatgcacagatacacacacgtaaaaacgttaattgcaaattaaataattgagcaactttgaaattaaagcaactttgatttcatgatttgttttcacaccatacctttctcttgctttcttgcaccaaagctgttcaacagtaacctcacccttcttcttcaaaaacttcaatcatgttccattctctttctctctctctaaatctctcccatgggttatctctcttgcaacggcgaatccgccgtcgcaatctgcgatacttataactggaatcctcgtcgacgatctaaagtaccggagaaacgtcatcctcctaagcttcgggttttcaactacgacgaactcgccgtcgctactaacggcttctccgccaataacttcctcggaaaaggaagtcacggcagagtttacaaagcagttctcgacgacggaaagcttctcgccgccgtcaagagaacaacaatcaccactaccgttggtaataacaataacaacgtgagtcaggtagacaatgagatcgagattctttcacgggttcgtcaccgttggatggtcaacttaatcggttactgcgttgaccaccggaggaaaacaaagctgttagtcgtcgagtacatgcctaacggtacgcttcacgatcagttacattctcgtagttcgttagattcacggttaagtagttggaatcggagaattaaacacgcgcttcagatcgcgattgctgtccacgctcttcacaccgcagagactcaagtgatccaccgtgacattaaatcgtgtaacgttttaatagacggtgacggtaacgctaggttagctgatttcggattagcattgatcggaaacgttgacgatgagcgtttgaaatatactccgccggcgggtacgttgggatatttagatccgtcgtacttagcaccggcggacttgacggctaagagcgatgttttcagctttgggatattgttgttggagattattagtggtagagaagccattgatttgaattatagtccgtcgtgtatcgttgattgggcggtgccgcttatcaaaagcggcgattacgacgcgatttgtgatttgaagattaagaaccgtccttattacgccgtgattcggaagttggccgttatggcggctaggtgtgttagatcgacggcgaagaaacgtccagatatgttagaggttgttgagtgtttgaaaacggtgaggaagttatctccggcgtggaataaactgcggcggaggagtgaagagagatcggaaaatgttttggcggttgaggaagagaaggaagagattcatgtgaggattgtgagaggaggaagcaggaagaatcggaaggtatcgaacgtgacgacgagtgtggatgatgtttacgagagattagttccggaggaaacgctgccgtttcgtcgtcggaattttgtgctgagatcgagatcagtaggagcgaaagttggaccggatccatacgacgggtttggtgatgagacggtggttacaatgagattacttattgagaaagaaagaccggtgacgacggcagcgatgaggctcagtaagtcgaggtcggtggggatagtaagtagtcataaaacggcgtcgcggaagagatactgacatgttaactaaaagtcagcattttgaca

SEQ ID NO: 30678 - DNA, 3586 bp, Arabidopsis thaliana landsberg
gtttggacttgagaatgatgaatggctgctatggttgcatgaacatcgccaaaagtgtttgcccacatttatgagcgatgtgtttctggcaggcatgtcgacatctcaacgttcagaaagtgtgaactctttcttcgataagtacatccataagaaaatcacgctgaaagagttcttgaggcaatacggtgtgattctgcagaataggtacgaagaggaatctgttgcagatttcgatacttgccacaagcaacctgcattgaagtccccctcgccctgggagaagcaaatggcaacaacttacacccacacaatatttaagaaatttcaagtcgaggtcttgggggttgtcgcttgccatcctagaaaggaaaaagaagatgaaaatatggcgacgtttagagttcaagactgtgaaaaagacgatgactttcttgtaacgtggagcaaaactaagtcagaactttgctgcttctgtcgtatgtttgaatacaaagggtttctttgtcggcatgctttgatgattctgcagatgtgtggtttcgccagcatcccgcctcagtatatattgaaaatggtggacataagatgctaagagtggagtattagctggtgaaggagcagaccagatacagacccgagttcagcgctataacgatttgtgtagtcgagccactgaattgagtgaggaaggttgtgtgtcagaagaaaactacaacatcgtattgcgcacactagtctagcccctgaaaaattgtgttgatatgaataatgctagaaacaacatcactgagtctaatagccagcttaataatggtactcgcgaacaagaaaaccaggtaatggctggggtaaaagcaacaaaatataagactgtatataggaaaagaaaggtatgcttttactgaagcttctcgccaatctaaacctacgtacattttcttagcttcaaaggttaaaaagaagatactcaaattgatcttatgcagggacatcaagaggctagccaaatgcttgaatctcaacagagcttgcaaccaatggtttgtgctttgatttgatcttctctaattagtttgatcattgtaactgcacattgctttatgagattaagagtaggatgtcttggatatatggccttatagttttaacattttgtgcaggaaactataagttcagaggcgatgcacatgaatggttactatggtcctcaacagaacgttcaaggactggtatgctatgttagttgattaatacaaacctggttaagccattggacatctattataaaccctaatactaaacctgtttaaactgtggatatagttacatttaatggagccacctcatgaaggctactatgtagatcaacgaaccatccaaggcctggtaggttacatatagtttaaatgcttgaatctcccaaatctgtgctagagtataagtcaacgacatgaattttggttcttttgactcttcagggacaactgaattcgatagcaccggcgcaggatagcttcttcacgaatcagcaagccatgtctgggatggtggtacattataaaatccttcaaactgattttaaaaactgtgttatgaatgatcgtgttgttaacatcttttgtttattgtccggtccagggtcaaatcgatttcagacctcctcccaatttcacttacactttacaggtctcagctgcctggataaagtctttactttagtatcattttgtactcgaaccacacgtgttgatatcgttaaatcttttcgttattccaggaagagcatttgagttctgcccaattacctggtagttcatcaaggcagctatagtagcaacacgttttgattactttggagagaagttttgtctcaggaaacatttgcaagaagctgttccaaacatgagaaaaacacaagatctttcatggagctgagttgcaatgacaagatgtaatcttttcttaaattggtttctgtatattatgggattgccttatgatgtattaatgtgggatgaaatattgtgttatctgattgaatgtcttgagatttaatagatgcacttgtaacaacatctttatctaaacacatagaaatctatcctctgtgtattagtcaaacaagtaattttgagatcacattaaatcaaaattgttaaaacaggtttcaacttatttagtagaaacaaaaagttatttttagattaaatgtggttaatttggttaaatacacatattccctggtcgttgtcgtatgtaggtgtgtcccttttgacaaaacaaacaaacagaaaaggtttctttattcagacaacatcaaaactggggaagaaccaaaactaatagagttggtcaaaagaaacatttgcaaaaaaaaaaaaagagaggcaaagatctcgagagatttcaattttcaatggagaaagtgaaataaaccttcttcttatctcatggatctccaactttgagcatagatgattccttggaagcgagacaattcttcaaatcatggactcaaaaagttcttcctcaaaaacccaaatcgattttagtcatctctgctcattgggacaccaaattcccatctgtcaacactgttcttcgcaataacacgatccacgatttctctggcttccctgatcctatgtacaaggtaaaaccaaaaaaaatataactttttgtctcaacagattcttagggctcttagatcgttgaaggatgcataaagttttgatttttaaatgtttaaatcatctctcttgggtttgatttgatatttttgtctgtagttgaaatatgaagcaccaggagcaattgaattagggaaaagggttaaagagttgttaatgaaagaaggaggaatgaaacgtgttgatgaagatacaaagagaggacttgatcatggagcttgggttcctcttatgttgatgtatccagaagctgatatacccatttgtcaactctctgttcaatcaaatcaaaatgggagttatcattacaacatgggtaaagcattggcttcattgaaagatgaaggtgttcttatcattggctctggaagtgctactcataacttgaggaagcttgactttaatatcactgatggctcacccgttccttgggccttggagtttgatcattggcttagagattctctacttcaaggaaggttagaaagttttaacctttttgctgcttggttatatgataagatcattgatttgtttcatgtgtttttttaggtatggagatgtgaatgagtgggaagagaaagctccgaatgcgaaaatggcgcatccgtggcccgagcatttgtatccgttacatgttgtgatgggtgcagcaggtggagatgcaaaggcagagcaaatccatacaagttggcaacttggtaccttgtcttattcttcttatagcttcacttcttctctttgaaacatttcaatcttcatctcctatacttgtctttgattaagcttttgtgtgtgtgtgttcatgtctctttaattaataatccaaatcctgtcttgtatacgaatacaaatcctctatgtactataatatatgaatgtcatgtgaattt

SEQ ID NO: 30679 - DNA, 1920 bp, Arabidopsis thaliana landsberg
tatgattttctgaaataatgttttaattatacgatgtattagtgccgacagtgtaacctttcggtttgaaacactcataatgcatgtttttaacaaaaacgaaaactaataaattggaaaatcctgaaaggaagataataatttatttgatgtgttatatgggcacattgtactaggcctaattctatagtaatcggtccaagaaagaaaatgaacaattacatattttcgttcctttttttttttttgggaacacagacttcaaaaaaaaaaacttttgatcacacgtgtggtgatttttgcacatgcagggacacaagctagtggtggtcgaagccgacggcaactacataacgccgttcacgaccgacgatatcgacatatactccggcgaaagctactccgtccttctcaccaccgatcaagacccttcacataactattacatctccgtcggcgtccgtggccggaaaccaaacacaactcaggcactcactatattaaattacgtaactgcccctgcttcaaaactcccttcttctcctccaccggtgactccacggtgggacgatttcgaacgaagcaaaaatttctctaagaagatcttctcagcgatgggatcaccatcgccgccgaagaaatacagaaaacggttgattcttctcaacacacagaatctaatcgacggatacacgaaatgggcgatcaacaacgtctctctagtgactccggcaacgccgtatctcggttcggttaaatacaacttgaaactcggatttaaccggaaatcgccgccgaggagttaccgtatggattacgatattatgaatccaccgccgtttcctaacaccactacaggaaacggaatatacgttttcccgtttaatgtaacggtcgacgtgattatccaaaacgctaacgttttaaaaggtattgttagtgagattcatccatggcatcttcacggtcacgatttctgggttttgggttacggtgacgggaaatttaaaccgggaattgatgagaagacgtataatttgaagaatccgccgttacggaatacggcgattttgtatccgtatggatggacggcgataaggtttgtgacggataatccaggggtttggttttttcattgtcacattgaaccgcatttgcatatgggaatgggtgtggttttcgcggagggattaaaccgtattggtaaggtacctgatgaggcgttgggttgtggtttaaccaagcaatttctcatgaaccggaaccgcaattgatttagtaaggtatgacggcatttgagtgtgcttttttgttttgtggttgtgttcgggatggggtcaaccgaagattggttcatgttattggcatagttggttagttggttagttggttatatcggttattttgatcgggattagttcagcgagttctttccagccgaattgacttggtggatagagcttcatcgtgatttattttatcagtggaatcggacaaatcgaagaaaaaacatcaaatttagttaaactacaccggcaaacttttgcttcacttaagataatttttatatgtagttgtgagaatatttgggtttgctatttttcgttttgtgaaaatatacaaagtgatgttgtataataattgttatttggaaaggtattgttcaaatacaagtttgtataagtacatttgagttttagatttaacaaaaaaaaaaaatggagatacagaagtataaaatagtcctaaatataccaagtcatataagaaagttggagtttgacgagatagtggcaggacaactcgtctttgttgacaacaaattgaaaattttaatttgagttaaatgagcattttggcaccttgatgcttgaatttgtgctttgtactataatattgttgaaaagattgcttcaattt

SEQ ID NO: 30680 - DNA, 1107 bp, Arabidopsis thaliana landsberg
ctataaactcttactctagtcctcttttgaatatatagtgtactttttgggttactcgaaaagatggatggctaacgatgatgactcaaagtggattaagttgaaaaccttttgtaatggaaacagagttgtctcttagggaaaccagacgaggtccaagcttaacttggggtggttagttttataagaaaactttgatttaaattaaaatatattgggggttgtttacataattaaaatggccacattttaaaaatctcaatttttgttcaccaattggtttttcttttcattttctaaaacttgaactaaataagtttccatcccatgcacggttaaatgaaattattattactttgggatgatatttacaatgtataaaaatatattataagaatgataaaagttaaaagtttattgatatggtcaccatgtactttgaaatcttattaatcataccatgatttgttttttggtggaaatcaatcataacatgatgagattatagttttactgataatagctattatttattaaaagtaaaaataagtattttctactgtatgtgaatggtatgattcttttattattatttttatacagtccatacaacatcttatttatatcatggatgaagttgacaatgtattatacatattgcaaaattaacataatgtttcaaacatttgaaaattgtatattcgtttaattcctacctacagtacattagcgacaacataagttactaattcaccatgtccgttacttaggtttcatttaattaataaaattattatttttggaaaattataatgtgaaaatgatattaatattatttaaaatttataattatttatagacaactcatattattctattttctcttaatatattatatttcaaaaatataatgtaaatatgacacccctctatttcaaaatattagatgttttacactttaaggtatgggccggccgggagtagcgtcatctaattttgcatctaactatggttatattctttgaacctcttaatctcaccacaaatagatttattctcttccatacaaacacggatcatccgataaagattttcaataaaatatgg

SEQ ID NO: 30681 - DNA, 3883 bp, Arabidopsis thaliana landsberg
  unsure (1)..(3883): unsure at all n locations
tcagctataagtcgaaccgtgtctcgtttatccttctgcatcgggcagaagatatggaccttaagggcacttgtgcttcctcttgctttcccaagtaccaagaacttgcagcgctcttcaacagccagtacccactttggatcacgcctataaaggtctgaaataatctctgtcatagcagaattctcgctgaaatgtaatgcctccagatttgggggagttatatcaaatgcatcttgaagaacccgcttacgctccagcttcgcacactcatcatcacacgaaagctttctctgcccgagggggatacggtttccgctcgattcaacaggctgaagtggagctggaagcttctgtaaaacagaggcttcatcataggccgcacagtaaacattagaaccgttggcacttcttcccccagcatcacaagggaccgtagcggttatacgaccacatgaacaagtaattgtgactgaaaattcacatcttaggtcagggcaaggcgcagaaggatggcagagtgctgcacaagtgtgtctgcaatctgttctaggagcaccacatttctgcctacacgtaacacgcatacctgcttcagattcattgaagctgtcacaaggctccgggtgacaagttctggcacaagcatgcatgccacaacgcctcgtctttccacaaatcttggtacatctaatgtctttcaacccacagggtatgtttctgagaaccacatgaccaccaacgcacttcttttccacaggggtagaacaaggaggacaatctccaaaatggcatccatgcgtatcagaatggccacaaggctgaggaatcgggcatggaagctgacagctaggaacaggtgtcccacatgatagtggaggaggaatcgaagttcttccacaagcacatgtaagatcagtgaagatcatctcgagacaaggagggcaatgtccactgtgacataaagattcacaggaatgctgcccacaccttagcttcttctgacaaggtatttggcagacatgtgggtcccaatcgccagataaatcattcttcttcccgttcaagagaggnnnnnnnnnnnnnnnnnnnnnnngtctcccacagttcttcttacgtccacatggcttagcgcacacaaacttctctgcctctgaggaagttgttatgtagcattccacagccctggatgttgacccacaccggcatttctggttaacttggactaaacaaggcgggcaatcacctgcatggcacatctcattgcaagtatgtaacctacaaggaagaagcttcctacatacatttgaacaagaaggaattgggtccaagcaactctgcctgatctgttcttctaaacgcgtattcccacaatagcatgtcttaactctactgggcagtaagtcacagtccccgcaaggtccaggatggcatacctcggaacagaaatgattaccacatccaagaggcttcccacagttaaaactgcatgaatagacaccatcttctgctttcaattcccccttcacattcatatcaccgcaaatgacagtctccacttttttcttgcagaaacatgtggcatttaccagtacctgacaaggatcacaagggccaacatgacatgtcctttcacattgatgacgcccgcaactaagaagcttatcgcaacgctgcccacaaacaagatcagatctccgctcggagcatctagtagtaaccatctttttcccacaaggacagctacgaggtggagcaaaggctttacagggaggacatggaccaggatgacactgcaaaacacatacatgaggacaaagatcctcttcagtcgtctcagcaggtgcaaactctttctccagcggtttcccacatggttccccgcatgagtgtggagtgagatatgggtcagacggtggatctcttctctttccacaaaagcaccgataggaaatctctttagatgatgtcaactgtacagattggcaacctggacatctccagttatcaccttggtttttctcagctagcaaatcaactgaagttggtgctcgagcccacctcttgatacagttgatatggaagatggaataacagctggagcatgaccagatattggcagacctcccaaccttgtcataacaaatcatacactcaatagaactcttgacaagcttctcctgtaactcttgaacaagttgaggcaagtttgggtctgtcaacacaacattctcctccttcgctacccttttcccttgattcacaggccgcgtcatagatgcaactctttggcgattatctggcagagttccagaagcattattccttctttgtcgattaggtggaggtggaccaatgttatcactcctttggtgctggttctcaggagcattatttcttctatgtcgataaggttgaggtggaccactgttatcactcctttgatgctggttatcaggcgcattatatcttctatgttgattaggttgaggtggaccaatgttatcactcctttgatgctggttatcaggcgcattatatcttctatgttgattaggtggaggtggaccaatgttactactcctttggtggtggttataggacggaggaccagaagcgttatgctgcctttgcagataaacaggacgggatgcagaaccagcatcaagggtttcagaatttctatctgtattaggaggaagcaaaggctcatttaccaccacgctcgaggtagatgagtttctaggaatccacgtttgctgatgattgaatcgatgagacctatcatcgctcctatctcgcctgacttgaaagctcatattctgccttgactccacaaacacagaactagatcctgtacccgtcactgttggagcaatggtgcttctgtacaaaaagaaaagcaaatgagaaacattcagattctagcaatgtcaaacattgatggcccagataaattcaccacacacgaaaatacgagcaaaccaatctacgtaacaataaaatcttacacagctacaacgatgttgaaattaactaaagccaaatcaaacgaatcgaaaattgatagcaagacgcctaaactattcctccttctttgggatctaaaaaagggggtaaaatcaaagtgccctattttatcatatctaagaaattttggtgaccaacaccaaccaacacacaaattttggcttcgatattgctgaatcaaagagaacgataaaacaaatgattagaagctcacaaccaaagagggggaaaaagtttggtacctgacaagaatatacgaaagcgtataaagaaggaaacaatcgccggaagaatcaaatacgcaggagattccgattagtctcccttgttttctcagggagagagagaaagagactgtaggagaaaatggagcgatgaggaagattatatatagcgactgaaagtgatagaccgccttgctcccaaaggaaataaaagatagagagagagagtcgcgtacgacttttctttttcaccggcttgtctgaattattttatgcttgacaaaccctcaagaaccgcctcatccctaatgggctaacaatgggcctatactaattgacttaaaccaatctaaaccagtaatttaatttgcagatgatttcggttaactttatatatattaacttgagagttttgagagacttgactacaggatacaaactacaaagaaagtggtcaagactcagaatcggtgaaagatggactctgtaggtcagccatgcatgcagaggcaaatgactcgaacgagtccactgtggacagtgaagatgaatcttcggaatatgagtcgtcatcaatctcagggagggcgatgtgatgctcgtcttcctcttgttcgtcacactcaggt

SEQ ID NO: 30682 - DNA, 1679 bp, Arabidopsis thaliana landsberg
  unsure (1)..(1679): unsure at all n locations
tgtcatgatatatatatttatacaacatatagagaatcttgcagttgcaggctttagataagactattagacattgtttgcattgagtagagatgccttgtaatgccacgacctactgggattcatttttgtttgtttgaagtcatctccttcaaaatccaataaaattataacctttttttattgagatgttttcagttataacagaatatacaaatacaaagatccaatatttgtatcctctcttcttttttttttctcaatagaaattctatacacaatgtttccactttcctatctttttttttttttggtaaaaatggtttaccctatatcaatcactccagcagagcatatctcttgcggagaagaagaacaagagatctatgagaggctcaagtcatcatctccagaatttttatgttgccattggagttagcagcgactaacgtagacgactgtccnnnnnnnnnnnnnnnnnnnnnnnnctgtgatgcatcgtccacttcgagaccagacatagagtcagtgttgttgaacatgtacgacatcactggcattgggaatgccttgtggtacacgaaaacctgtaatagattcacaacaacaagaagctcagataatcaagtttttaggagacaatctgtcagaaagttcatttttctttctgtatcaagcctttacctcgttagtctctgagcctgttgctatatacccatcagagaccgataagccaacaaagttctgcaacacatcacaagaacattacatctcagaaaccggagaccgaagagagtcttgaaagcatatttcagggtaaaatgttacctttaaattagtgtgtccagtgaatgagtgaagaggggattcattaatcccagaagcagacatcgacaagtcccaaagcttcagtgtgttatcagtagaagaggacacaagagtggatgaatctacaaacttgacataactcactgtcttgctatgaccaatcattgtgcacagaggaatcttggggtttcgaagatcgtagtaatacactttatgatctgcagaaccaaatgctagagaccgtccggagtctgatggaaactggacacagcatacattggcctttgtcttgatggtcccaatgctaactccctgaaaacatttccaagaaaaacaaactcttaatcatacattctgagaatgaagatgtttgcattattgtagaaatcagtttcagttttcaatagccgacatttcaaattagaattgcctgattgatactccagagcttaacggttccatcatcgcttccgctagccagcaaagtcgggtctgctgatgaaatatcgatggaccatactcgcttcttgtgctccttcatctctgtaaccaactggcttcttgcaacatcccatatctgaaaacaaaaacatatgtatcccaaattggttttatgaaactggaagtttttaataacgctagagctgaatgtaaaactaacctgaacaacaccatcaaagttacttgatgcaatttggctctttatgtagctgttccaacataaactacttagctttgaccgaccagccaattccaccaccggatagtgaatatcccggttatcgtttactatggagttacattcgaatatcttgattttcttgttgactcccccagtgcgcgaataattc

SEQ ID NO: 30683 - DNA, 3292 bp, Arabidopsis thaliana landsberg
ggcgccggagttggtgagggcatgcatcgtttgagagagagtgtgaaaaaataatgaccgggacgtagtgtagttaaagcaggagagttgaccggcgtttaccggtcatcagttgacggaggaggttgggttgatgatgattaatgatgttggaatttgttggcagggggacacatgagcaacttttttacaggtagcatcagctttttaaggatcataattatcatatagatgcattaaagaaagagaaatgatagttttataatttctgtcctttggtttttttacaggtcctttaatatgactagcgtatatggtagaacaatggcttctctgtgctatcaaagaagatcacaaaatggtcttgatttttaccattaatatgtacagtgtacatgcttaggtaagtgatcaactgaatatgaatttgtaggcgtaacacaataagacttccattaacggaaaaagttttttattataattttggggacaaagtgagaatcaaacaaaggattgttttagcgtacaagaaaaaaaactctgctcacatataacaaagattgtacctttttgctatcatagtagagtttctaaatagctgagaagtactctttgctgagttttgggtcgggtttcattgacttctcacccggcttccatcctgctgggcagacttcatccgggttttcctggatgtactgtaatgcctgcaacattgaaaacgtattaagcataccggaaatcgagtgaaaggaaagagcggtttttggagttgtgtgtatttatttgtatctttacctggagggttctcattgtctcatcaacgcttcggccaataccaagattgttgatggtggaatgttggatcactccttccttgtcgattatgaaaagtcctctcagtgctattccctgttcttacacaaacaaagttcttgttttcatttatcccaaacacttcgaaagtttaaaggaaggtagccaagatttaaaggctaacaattacctgatcatggatgagcactccgaacgactttgagattgatttagtgacatctgaaataaggggatagttcagatcaccaagccctccagatttcctgtctgtttggacccatgcaaggtgagagaactacgaggacacacagaaataagaatgaatcaaaaatttgcaaacagataagaacatggtgatgtcaaccaaggatgaggaactgagtaaaatgagaacatagtaaatgtatagtgatacttaccacactatcgacagaaacacctaatacttcggtgttcaacttctcaaattctgaatgccggtcactgaaggcagtaatctctaaaagacgtaaggaaaaaatgagaaagattaggactcaaggatgagggaaccttggatattcaattttgatatacttctcgagcaatgctaacctgttgggcagacgaaagtaaagtccaatgggtagaaaaagagaatcacatacttctttccaatgtaatcagagagcttaacctgaaaccatacattcatcagttaccaattagtttccaatcacaataagacatatactcactaaataaaaaacactaaagactactcattcagcttcaaaactaaacttaatctcagattaactagaagcagcaactgtgattgataactgctgtaagtaccttgatgaactcttgatcaaacacagcctctgcctcaaaatcaggcgccttgtttccaaccagtggaagatcatcctataatcaccaaattaaaactcgttaacacatcaaatctaaggagaaagatcagtcaaattgacaatcagataaccatggtactataccaaaactacatagacctcatccgaacatactaatcagtcaatgagtatagctcatatgtcactcaatttcacttcaccagagaaattaacaaccctaaacgaaaatgtcactcaaatttctgaacttttcgagtaatctgcagaaacacggtcgcataacctataaatcgttaactatttccccaaaacctatagggctaacaagtaggaagagagtgaaatctataacaggctaatgaattcagatttcaatgacatcgaataagaaaagtatcgacatttagataaacttacggcctgggctttgacagcaaagctccgacgagaagtggagctgagggaagagcgtcgagcaaatccggagcggagagaagcagatgcggaaggagaagaaagggttcgaaggaaagaaacagatggagaggaaagtgaagactttgctggaaaaaccctagaagagggagaagagatgagagtagttgaagaagcaacagacgccattgctgctacacacactttgtgactctctgagtctgagctaccaaacactcttatctatctgtcaatcacctctctttgtagtggaagtatgaggtggagataagcctgacgacacccaaactcacaaaacgacgtcgcgttactcaaaacgaggtcgtattactattgctgcaaatatgcgtcttcttcttctaccttgggtaactccgtctctccgttactttcttcctccgatcggtggttcagttctccatagtatctaatctactcctgttgtttcaggtgcattgttgtgctctcttcacttggtttactttaaaaggcttcttcacttattttgcaaagttttgatttttagtggtttctctgttgtctcattaattctctcgatcttctcctttcaagtgttgacagttctgagagaagatataagttgaatcgcgtgaccggagacatggagactcaaaacaaattgatgaatgaaactaaaagacatgttaaatccagattgtgcagagtttctgggtattgttacattaatcttttacgaaattttctaatttctttgactatagttacactttttgttttgttttttgtatttgtgatcaaagttcgatgacggagatgatggaaattcaagctgagaatcccacattccatgtattgtttattccgggaaatccaggtttcattattatgctcaagactcttatgcatgcacgtgtatatactagtgtgcttcatacattggcttgtaatttttcaggagttgtgtcattttacaaggactttttggaatctttatacgagtttcttggtggaaatgcttctgtaattggtatggctgctctacttttcgagtttgatttctttgagtccttaagatggaagctgtttatttctgagtttgagtttgttcttctgatctctaatggtggagtggtttgttt

SEQ ID NO: 30684 - DNA, 1291 bp, Arabidopsis thaliana landsberg
  unsure (1)..(1291): unsure at all n locations
cataagctgagaatctagaatggtcagtattcagagcttattaaatatatgtataaacagtcaatgagacacatcgtcgttgaactacaggtttcttcattagaataggacaaggacaaatcagtgagaattcaggtaaacaaaaggatgctaagaaagaaaaataagactcagtgattaccctgacttgtcgggacaacgcactcaatccaaaatcagagactttcagatttccttgagcatctagaagcaagttttccggctgcagtgaaattgtaagtatcaattatctgcacattaaagaaacatactgcaaacttgggcataaaccaaaaaatatcatacctttaagtcccggtggtacactcccctgctatggcagtaatcaactgcattaataagctnnnnnnnnnnnnnnnnnnnnntctcttctttcaagcgcccatcatgtaccttcacaagtttacacataatgcaaaggttaaatctacaaaggttaaatctacatcagagataagagaacgtttcaattgtaagaaacaggaacatctatcaagattgaccagagcttagcatacatgttcaaacaacaatagatggatcaagtaacaattataaatccattgggagggattaaggaaaactcacaattttgtcaaaaagctctccaccagtgccgaactctagaacaatatatatcttagtcttgctcgccaaaacctggaacggtatcaatcatttccttaaaagttagcttcagcacattggcttcacatacaaagagctctaaagcaagccaaagaaaaatagagacacaaatagaaaaatggagatatacctcatacagccgcactacatttggatggtttatcagcttcatagtacaaatttctctccttatctgtaaaaacaatcaggaaagacacacatcatacttatggactgaagatgcatctagtatattatcttattaggaaagagagttacctgttcagccatcttatgcttaagaaccttctccttatcaagtattttgagagccacgcgttctcctgtctcagtattaacagcacaccgaactttcgcaaaagtgccttgtccaagcgtctttccaacctcatactttccaacacgacgctgaacctttggccgattcatcactccgaatgttcacctcttgatcttcaaaagctgtttttggaaaatgtaatctcgcatataagaatgattccatgataaagatccaacacaacaacaggcaagatagtgtttctttgctcaattcacggaa

SEQ ID NO: 30685 - DNA, 4608 bp, Arabidopsis thaliana landsberg
  unsure (1)..(4608): unsure at all n locations
tcgatcatagaattgagaaattgtgatgattggttatgctcaagatcaagaacagaggagggtatacctgaatatcagatgcaggtgcagggcaatgagtctgaatcatttcctttgatacaaatccaacaccaccatcccatacttccggaggctaatattgtcatagacgatatacaaaaacaacaagaacaaaaggtatcagaaagagttctttttttaggtatttacatttgagaaacgcaaaaaaagttggatgttgtggctaacctggttcaaaacatagaagattttaaattgttcagggtaattggtagtaagaccctccaattcttcctgaaaaaaaaaagtattgattcacttaacatttagtgtttgaaattagtctatgaaaacacaatacttgttctcgactcaaaagaaacagtaggtgaaaggctttttaccttcaagagaatgtcgtcgtatgtgacgttggcgtaaatgagatgcacctttgtcttgtctgttgggttttctagaattgctctggccaccttcacaattaagaaatataacgcgtttaaaacatatacattggcttcaaaaacgatatcaaacgcaaatgtatcagacatacttggaacatgggagtgatgcctgaacctccagcaagcattccaaatgccctaaactgacctggttgatacttgaacctaccctgacaagtaaagggtaataaaacaaaaaaaaatttgagattcaaaaaaagtatagaataacaatgttgcttgtgtaagatcaagtaagcaagacatctaactaaaaggtacctttggtccctttacggcaagatggtctccaacacgcatctccctgaaatgatgagacatccgtccttgcggatacatctatttggcagcatttttcgattgaattagggagaaggaacacccgaattcaaaaaccaagtcaagttgagaaaatgtatttaagcatataccttaatgacaagttcgaaacgtccaacgtcagagtctaacgtagtcggggtgtatggcttaataacatcctctccttgaccatcctttcccctattgagaaagtcacgatactcatcacaacacatccatggaaactcactaattgaatctcaacacaaaacctaacctaaactctctacaataatgcatgttcacagccattttggataggtttcagaatctagcaactggcaggagtggcgattggcgaacaaaacacagagaggataataagaagtacgaggaccaaacctgcaactgatgtgttgtccaatgggaagacccaacacagaagtagaagttgggagttcaaaaacgaacttggccacattgtgactaagctgatgtctcttaacaagcttgaactccttgaaattctctggatccaaacacactataaaaccaacaataaaaacacaagatttactcaaatcttcaagtagatcagctgaaacaaggttcaatttttcattgtctgttgactaatccaacctaccaaacagaaacttttgcctcaatctatccaaagttcatgatttggattgaattccagaaaagacaaattgaatgaaatagagatcgaacctctgcgtttcttggaggatgtaagaaaataagcagcaccagcaccaacggcgacgaaagcaacgaagacacccaaaagaatctgacgatctagggttcggagaaactcggtatccatggcttctcttaacccaaatgaaaggaagaagaaaagtataaaactagcttaagaattgtaaaagggaaaaaatggggattggtggaaaaaatcagagctttgaattggagttgtctctttcccttgtaatctccgccattaaaatgagggtatgggatctggtagacctaccactttcacgttgtatagtttgcctcttttgcaacacattattattccattaacatatttgttacatttttgaccaatttttttttcttagtataatttttctaaagaaaaaaatatcttcgttttttcaattacaatttgtgttacagccttttttcaatcactcacccaccagaaatgtcaaatcatatattcatttttttgtgaaaaaatttgcaactatgtacattcaaggatgatagtatggttggtggttggtgaatcatgtgaccggtagactcactttttagttctgactggtgcaatttgtagtcttaaaaagtggnnnnnnnnnnnnnnnnnnnnnnacataatttacttcaattttgtctttgattggtgataacaaaataggatatagagtaaaggttaattatgatgaggaaaaaaacaaactccaacttatactagcagtcaaaagtatatttcttacagtaaattacatagactctttcaaatccattggcttgttagactagtatgtgtggttattgaatgtgttttaaagtttgactatgaaatttatgctgatgtcagttggtggcacatggtttaaacttctaatatacaaggtttggttcgataattggactccatataggcgtccattagatggctcattaacaatagacttgatcttacaatcggactcaaacttgtagtcagtcgacatcgactacagtggctcctacctataaagtttgaaaaaactaaccagactctttaacatgaacaccaaatgctctccaatttctcagcaaactcttctcctcttccgcttatcatactatcatgatcagcaccagtaatgatatcaacttccaccgccggaaaagtcctcttcatgttgccagagcaatgtgaaggaacgatttggtcacagtcgccttgcatcaagtgaatcttaacgccagactttattagggtttcaagatgttcatcagcgactttggagccaccacatatcacattgtgcatactatgccatgcagagtgatgtgtgtgccttatgtccttgatcttccaatgaatctccctaaacaaaatcgaaaaacctttattgaaaaatatttgatagctttaaaaactgaaacaatcacccaaaccggttcaaatgtttttaccttttacctatacatagcttgattagccactcccatatcttatgatgcttgcagattatgaaacatacgcatctaccaatatgttcataccaagacatcaccgctgtcccaaacgcaagcggtggccacaaccgctttctagcgattcggttcaagaccgatccttctaccgatgaaggaaaataaggctgcattgataaagaaaaaaaacacaacaacataagttcataatcgaatctctttaaaattagattgatgattagaaagcaaactaatctctcaccggtgcaacaagagtaacggatttaacaatgttggaatgtttagcagccaaagcaagagcaattaagcaacccattgaatgtgcaaccacatgaaaagaatctaattggtatggcttaatgacagatctctctataataaccacatgatctttcaatgtatagagactatcccttggcttaggactctccccgaatcccaaaagatcgatcgcgaggagcctataatcatctttttgaatgtgttcaaatacagtttctgtccaaaaatgtgatgaccccataaaaccgtgtatgaatattacattctcggacggttcttgaacagagtactctgtttcttcaaaatgaaacatcaaaagcaattctaagtaaagaacattattaactaatcataatgcaaagatttaatagaatattaaaatgttataattaatctattaacctcgagaagtagaatctttgaccacgacgtgaagattcccatcttcgttcttagtccatgacttgcaagatttgcatccacaatctgaccatcgattcactgactcttgatgaatcttagattttctcagtttccgggaaagcttggatttgaattctctcgcgaatcccagaaaccacattccccggaaaatgtttctcctcccgaataaagtctccgacgacaactcattttcgtcggtggtttgactttgaggagccgccgccgtgcagtaacaacctgttgagttttcttccaaaatctcatcgacgaactcgtaaacgacacagagaatcgcgtcgaggaggtccaagaaaaagaagacgataaaagacagagcggcgtgaatcgctgtcccgaattccctccggaaagacatagaagcggagagaatctagaccgtgggagaaattgagatgagtggttaagccacgtcgcatgagagaagtttcgaatttattaccaaagtttagatgcatgcactacaattatgttatatgttttttttcttttggtcggaaaatcttacggatatgttactattaagtaaaaaggcccgaaggctttcccaggcccaaaataggggagcctgatttacccgcagatatcataaacgacgtcgttctaaatcttgcctctcgttctaaatcttgcctctaacgacgtgttttaggttttgcttataactctccttttggagcttgctgatatatcttcaatacaataatattttgcattactttctcaattctttactacctcaccaagtaacgatctcttttca

SEQ ID NO: 30686 - DNA, 9794 bp, Arabidopsis thaliana landsberg
ccctgttcgaaatgatatttagacaatcaaacaattaatcatgttaattttactctatgcgaatgatttacaggaacgtgttgaaggcgagcatagaggttcccgggagcggtgaagtggagtttcactgcactcatctggatcacttggacgagaagtggagaatgaagcaagtcgatgccattatccaatccaccaacgtaccgcacatactcgctggtgctctcaattctctcgacgaatccgattattctcctgagagatggaccgacatcgtcaaggtacattatccaaacaaattaatgcacatatatatatatatacaagttatcaatcgacagctagcttttctatatgtaattattaacgtacgctgctatatagtattacgaagagatgggtaagccaataccaaaagcacaagtgatgagattcttaaagagcaaagaatacactgacgctaaggactttgctggagaatgcgaatctgtggttgttgtcgccaaaggccaaagtgagcaccgtcaaacaaccgcatgcttgctagctgtttcctccctcaatagagttttgattgatagagttttaattttacaggtgtgcaggggacatgcaagtacgggacacgcgtggactacatacttgcttcctccgattcaccgtaccggttcgtgccagggtcgtattccgtgttgtcttccaaaggaacctcggaccatcacatagtcaaagtcgatgttgtaaaagctacatcgatcaacgtcaacgagcaggagcagcgaccgataagatcacataagctgcagagaattacagcgactacgtataataataactcgtctctcacaaaggcctcgtggaggacacactactataaagcatgaacaatcaacatatatattacaaaatgttacaggttttttttcgactgttggttgattaacacaatttgagatctgtgtatagttaataatcgtgctagtctctgtgttgaacgtgaagtctgatatacttttgcctagatttccattttttctacatcctaattttggtctgcttttaatgttaattagacatggtggcttctttaaccgaaacctgtagtattcatgagtgagtaagtactactgtactcttgtttttttcttctgtttgtagtttctcaaaatgagattaattagctttcttgaaaacgttagcacttactgtattaattaaaatagtcaatgttggataagctctgactttgaagatagtccttagcaataactatgactcgggtttctatacggcctcgagataagataacttcattcccaagttatacacttgtaacatgattttattgataaatgtctttattttcggaggcaaaatacaaatgaatatgatgaaattatactaatgaatatgatataataaagcaagaatgaatctgcgctctttctcagaggtagaggtaatgttttggtttgtatgagtgatctgctttctctcttttgttacataggaggatatatataggaggaaagaggctagctgaactatggaaaaacatcaaattgaagtccaaagttcattaagaagagattagaaatagagagagtgataacaattgaactcagtaaagaatcataaaagcaaagagatccaagattgcaatttatgtcccagctggctaatagaaacgaacatctaggaagtgtttgagctatggattgactacagcttggatctgctccaatgtcttcccttttgtctcaggcacgatggcaatgacgaagacaatggccagcgcgttgatggcagcgtaaatgaggaaagttccgtaagagctccaggacatgaggaagttgaaagtgtaagaaacagcccacgctccaaaccagttcaccagcgtcgccatgcctcctgctactccttttatgtttatgggaaatatctgcaaaacatttgaatttgtcaagtaacaacaacaacagcaagtaattgtccctcagggatggaatttacctcagacatgaccacccacggcattgctcccattcctgctgaaaacgatcctatgtacacctgctctctttcatctcagtttttttggtgctaacaaatcattcaattcaatttggttgcttaccattataccaacaacagccaggactgggactgcttcgtgcgccatgtcgtgaaccttgagatagaaagaaaccgctgctatcaaacagcctatcactaaccctgttgcagaaacctgccacaactccttggagttagtttgttccctgtcaaaatcttttcaaggctcattttgtttaccagttgcaatggttttcttccggctctgtcaactatcggtgcattgggcgcagtgattaccacctgatattttgtgaacataacaagagagagattaagaataatcttttgaatttggactgctgctattagtagatacctgaagaacagcatatattatcatcccaagtcttgtgggaaaacctgacacaaaataatatggctgattattagatacaagttaataaaggtgtatcattcaagaatctctctctatgtattacctgcttgctcaaatatcgagcttgtgtagaaacatattccgttgattcctccaaactgctgaaacaccatcaacccgaaagctatctgttccaacaaaatcatgcaattggtgatgaatttgaatctgcaacgttacgtgactaagaagaagattgatatttatggtgcaagggtgttgttacaagaacagagcgtatgtatctcctctgaaacaaatccagcatcttggctttcggtagcctttccagagtttcgatataatcctgtcaagaatgatagtgatatgttttcagatcatgagatggtttcatagattcagaagaagaaaatcgcaagagttcaaaacctggatctctgctgcctcctccgaaatatcagccttcttcccacggagcttcctcagtgcagcttcaaactccgtatcacgccccacttttgcctacaaacacatgtacgactaattattcacaagaaagtatacatgtcaaagcttttatggtgcttattgtggtcttaccagccatcttggagactcagggataaaaaagaggccaaggaaggaggcagcgcatgggatgattcctgaagccacattacacacataagtattctgacatggatggagactctccacgtaatttccttgattacctattaatgccgagactctccacgtcactagtgtgcctatgatgaaggaaaccgacactccagtgcagatcagaatctgtggcacaaaacggtagcttcttttcacaatcccctaacagagtagtaagggagacaaaagatcttcatgttgctctttagttacctggttcagtgtggttagagcccctctgaaagttttaggtgcaatttctgctataaagattggcacctacacaccaaacgtatcattaacactggataacgagatgttgaacagaaaatgtattaactcgatgggctcaccacataggaaaatgctcccattccatatcccgttgccagtcttccgaggtccagagccactactccctttgattgagacaaaaagagagatacattaggaaaaactttaagagcagcatatatagccactgttttggatcctgagtaataccttggcaaagatgattgctagccacccgactacacaaaatgcagaggaaactctcatcgcctggatacagatccaccacaagtaagtacgtgttgtcaacacaaagaaaactaatagatggaaagtttcaaacatttccttaccccctttcttccaactaaatcagctataggcccgcttgttatagcaccgatcattgcgccaaaagttagtaaagaaccaaagagtgaaaactgcagaatccaagctagaggtaagcaacattcaatgaataagtgatgaacaatctttcctagaaggattatgtacctcagctatagtcaatgaaaggtcattcctaattgcagcctgagcaggtgaagagtatcccgcctgcaacgaaaccaagttttagtataacgttcatttttagaccagaaacaaagttagtgactttccataaatctaaaatcacttacacaagaaccgaacgcaaaagaaccacagaccgcaacgaatgtgctgagataaaccatccacggctggtctggttttgatccagccatattcttgtccaccaatggttctctgacggcatcacttgccttggacatcttcaggtattatgtatctcccttgagcacttggctaactcaaaaattgcaaaagagacgaagcctgaagcaaaagttgagtaagaagacagaaacatacaagaagagtaaaatggaaaagcggaggacaagaattaaaggtgaaaactttttatgggtaagagtgaccctttaggcaagaaatcctttgtggggtttgttaccattcaagagatgaaagctgttttatgtcctttaccaagagcagccatggattacaatccaaaaatttgatttcagattttctgatgataaccattaaactagaatatagctaatgacaacgttgagcccactcgggggagttcaaacaaaaatgagtttataaactacttatccactatgtgtatactaaaagatacactaagcaaattcacatttaaaaaaaaaaaagaagaaagatgtacaagtaaaactgaatacgcacacacatgctagtggctggcgtggattggacagagacagacacgtgatgtctttggcctcttgtcaaaaccttgatctcagtttttttttctgaaattcttgtgaatcattcattaatcatccaagaaaaacagaaaactcacgcagatccatttgaatcagatctgtcttttttatctttcttgttaacatcaaaagacgtgactgttgatacagcgatcttgcttatgtaactcgatcgttccttcttctttcagaaagattttgtttataaaaatttgagtaaaaagaaaagaaaagaatgtaagataacccacccaccaaaatgtcattgcaaagttgattaatgacgttagcagagaaatcaccggagcggatcaatcaaagtgttgcacactcacacatggatatcttcatggacctccgcatctttcgtgtctttttccaacaaaagcttttgtcgtggtctgacatttgataccaatgtgaaatgtgtgtatatatatatttctaagcctgtataatattgcatccaaagctgttacaacaagatgagtttattggaaaaagcaagtgtacttacataagtgacagaagaagcatcaaagaatgaaatgaatgcacactaaattaatatctacaacatacatatctcatctaagtggtattcgtgttccctgaggggccatcacctccgaatgagaaggcctgatatcccgtggggctagtgagcttccctgagccactgctgctactaacagagcggtcaatctcttccctacaagccaccagagggattggccgttgaggtatggctataacagtgaactcattactctccagcattttcaccacttgatccattgttggccttgcgtggagctgagggtgagagcacagcactgctatcagcacatacttctccagaacctctgggggtcccttctctggcatcccgtcttccaccacatccaatgtctggccttctcttaccagcgaccacgcccagtctgccaccgacacaggctgcccctcctcgtctgtcacaatcgcctttctcctgctcagaagctctagaagcaccaccccaaagctgtacacgtcgcttttctcagtcagttgcccgtacagtgcgtactctggagcaacgtatcccatagtgcctgcgacccgcgtgctcatatgagtcattccttcggggttgaacttggccagcccgaaatccgcaaccttggcctcaaacctctcgtccaagagaatgttgctggccttgatatccctgtggatgatggagggttgtgcgccgtagtgtagataagccagtcctctggccatgccaagggcgatcctctgcctaagaggccaggcaagctgagcctccaagtcgccaaagagatggtcatgaaggctaccgttactgacaagatcacagacaatgatcctctggtgaccttcatagggcgtggttgcagtacagtagcctctgagggcaaggagattgacgtggcggatgctggcgatgacctcgacctcatgagcgaagttggcgtcccctccagcagaacagttcttgaacctcttgaaggcaacctgggtgccgtcgggcagggcgcccttgaagacgttcccgtaacctccccggccaatgatgttgtggcgtgagaaattgttggtggctttcttgatctcgtcgaagctgaatttgacaagagtggtgctctcgctcatggaatcaagtctagactgcgtgccagcttctaaactagtatcccgaggcttgagaagcttgcttttcttcctccggcagtaccagaaccaagcggtgataaccagaacagaggcgacgagcaaaacagagaaagaagaaactagaactttgactttgttagcaccggagctagtgggagaagccaaatcgagctgaaacaagcatttggcggtgcctttgtcggtggggcccaaggaattggcgaaagcagcggcgtagatagagggaaaagaagcacagtcggagacattaccgagggatggaccggagagatagggctgaaacgcggagaggctctgagtgcaggaggcgcaaggggtattgctctcgagagaggtgttacagcgcatggcggtggtggcgagggaggagttagggataagggattcgaattgagacctggtggtgatgtccatgcacccctgcgaaatccacggcgtctggaaaccgcaggtggatcggacgtcaaagcgagggaggaaaccggcgacggaagactggagagcagcccagcaagaagcagcagactcaggtggcgggagaaaggaacccgtctgacggagatggtgagagtagaggaggcgtagcccttggaggaggtactggcaggtggtggcgccatcgggtttcggacgccggaacggttcaaggacggaaaagtccagaggacacgtggagttctgagcggcggagaaagaggtgaagacaaagaagacgacggcgattcgacggagaaacaacatctaattcgaagaaaattactaattgacaataaagacataacataacactctctctctctctctctctttgtttcttacactcattgacccactagtaatattttggtcattagttaaatatatatatactcttaagtgtattattgattgtgttatttacttgatttacttgaaacggtcaaaacatgtcatgaacctaattgagtctcatccacgaagttgcacgagaactttcctttcactttttgtttcattttcatactattcaatcaatagtggtaatctggtgagagatgataatatttaaaattcttgattggatcctgaagaggtcttacctactcatgtttctgtttcgtatttaataacaagcctaattgcattatctaataaatccaaacgtgtcttagtcttatcatagctctgctgctcacaattactaatctacacgtgatggccgccggaacatgcgaagaaaagaatctgtgttaagtgtgtattctaagaaattctatattccaccgtttgacttcaaaccaacaaaaataaatggacatttcaaatgggccgagaaatgacgaaaaggcccaaatagaaccgaaagggccgaatcatcacccttgactttgagagagagcatctcaattgctcctcctagtctccatgaagaagcgcatgtggagaatctcactgatttcccagatatctgatctgctctgcctttcccgtggctcttcttcaaccttgaagactctgaccccattctgctttaccctctccaggtctcccttccaccaatccgggggcgatgatgatgcttcgggattgaaaaaccaattgttgcgcttccgtaatgattccggtaaagttgcctccgttttggagaggaacaaaatccaaggagctgcgtttgttgagctccttaggcagttacgtccatggcccgttttgtcccaactggtatacatacatcttttttgtcttcgaatttcacaaccacaaaagaaaaagccttttttccgtcatgtttgatgttgttgctttgcaggtgttcgactggagaagaaacaaggcactatgcgatgggttgcctatgactgctgatgaatacgctaagggcattaccatttctggtagactgaagaatgtcgatttggccctttccttgtttcacgagtctgcaaacaagaccacctccgtctacaatgctttgatgggtgcttacctctgcaacggtttgtctcatcccgcgagcagctcttccttgacttcaattctcaacaagacggaccctcctcttctactccatctgtctctacttacaacatcctcatttctctttatggccgtttgattatggttgagcggatggaatcagtattcctacagcttcaacaactcaatatccttcccgattccagcacctacaacaacttgattgctgggtacatctatgcttgggattgggataagatggaagcaactttccactccatgaagaacggccttgttaagcctacgcttgccacctatttgctgatgctcagagggtatgcaaactcgggaaatctgctacggatggaggacatgtatcaagccgtcaagcgtcacgttgacaggaatgagattaagttaatcgagtccatgatttgcgcatactacaggagttgtcacaaggataggatcagaaaaatcaagactttatccaaacttatccccaagaaaagttacaagccttggttgtatttgctcttgatgcaggtctatgctaaggatgataatctacatgccatggagaatttcatagaccaggctattacaaaaggactccagatagagacagatggtattatgagatcaatagtggctagttacttcaggtgcaatgcggttgataagcttgccaaattcgtgcagcgtgcaaactctgctggatggaaaatgagcaggtctatgttccatggcttaatgatcatgtatggatctcaaaagcgttttaaagagatggaaaacgtcctctctgaaatggaaagctttaaaataagccggtccaagaagacgctttgtattctgcttagagtatacgcagcaacgcatggacaggagcataaggttaatcaagtcgcaggaatgatgttaaagcatggacatgatttccaacgacctgaagcgagtaaaagagttatgggaaaataggatactagagagagagatgtgaataaatacaagcagcatattttgttgggaaggattgtatgcatccagggattcgatttgaaccctatagcatcaaggaatcaaaccattgaagcagaaatgtctccgttggcgtatagcatccatgtgtctttgattgtaacattgtaagttgctcttttgcgcattacttctggatatacatgatgaatagtttcgtactctgtggttctttcagtatacaaaacttcttccttacttgatcattctccaatttgcctgatataaatcaatccacatgcattatgtgttaagcacaagattgatgaatcacctttccttgt

SEQ ID NO: 30687 - DNA, 769 bp, Arabidopsis thaliana landsberg
gtcattatttcacgatacttgtatagattggaattaagcaagaatcttccgtaatcgattcagaataatagaaaaccaaatccttttactgacattatcgtttaacatagaaagtcactgaaacaagaaaaacaaaccctatcaaagggaagacaacaaaaagaagcaagcaagagatgggattcttgataagagtctctctacttgatcttcttcttaggcctcaactgcaaataaaaaaagtttgttcagatatcatttcagctgataaacaccaaaaagaaacaagtaacaaaaacaaacctggttgctgtgaccacacttcttcttcctgcagttgacagctcttgggtgaagacgagcatagcacctaccaaaagatgcgaaatttacattagaataatctcattgagacatcagatcagaccatagatgacaaactatccaacaaacaagatgtttcagcaatcaaaaatacaagcttcaacacattttcaaaaccatttgcaaaaatgtaccattcaagaaaatcatctggaaagatgagaaatttgaccagctgacaaagtttagagaatggaaatgtttgatattgggaacatttataacctcaacacgcattgtataaggcttgagaagctaagttaattcccattaaaacaactaaaaccctaacacactaataaacatttcgtactttgaactattaatcaacaaaactacatctaggtagaaaattgaactacttgggcatatcatctatcctgat

SEQ ID NO: 30688 - DNA, 1365 bp, Arabidopsis thaliana landsberg
tcaacctctctgtcctcctatcaatatcatcaccaacttcattctcatcatccatggcccatttctcatctatgtagattctcatctctctacctcctcctcattttctcctcttgattcactaattcttcttcttcttcttcttttcagacatgactcttccttatcgtttctcttccgttagaaaccactcacttctacttaagacttctcatctctgcacacccagatcagctcttggttgttgtttctctcccaaggaatcccctttcttcaggaagaacactgcccaattcctttctcctcagaaacacacttctcttcctctgaaacttgtctgccctttagctagtttctcttcttatgcggattctgagggagaagagcaacaccatgctgatcaaccgatacagaaccctcacgaatcttctaccgtttcaaacgaatcagatgggaaaggtaatgcagaagctactggagacttttctggaatggctcaagcctttcacatttcttccacaacagcaagggcaatctctatagtcatcgccttctctgctctcacccttccaatcttcatgaagtccctgggacaaggactggctctcaagaccaagcttctctcttacgcaacactactctttggtttctacatggcctggaacatcggagctaatgatgtcgcaaatgccatggggacttctgttggatctggagccttgacaatccggcaagctgtgatgacagctgcagttctcgaattctcaggtgctcttttgatgggaactcacgtgactagcacgatgcagaaaggaattctcatggctaatgtgttccaagggaaagatatgttgctctttgctggtctcctctcttccttagctgcagctggaacttggttacaggttccatcttatcttttgcttcttcatcactaggttcaagacaggatttagtaaagttaataccttttaaagatggcattcacaaatgatacaagtagagaacgtaattgtgaacttgtgaatataacaggtagcttcttactatggatggccagtatcaacaactcactgtatcgtcggatcaatggttgggtttgggcttgtatatggaggagctggtgccgttttctggaggtccctagctaaagtagcttcatcttgggtcatctctcctatactgggagctctagtcttcttcctagcctacaaatgcatcacgagagtcagtaaaacaaaccaagaaactaactttctaattctgaaagatcactaaagacatactcaagcttctgctacattctcacactcttctttcgatctgtgcaccttgttcacagggcaccaaacccaggacaagcag

SEQ ID NO: 30689 - DNA, 2940 bp, Arabidopsis thaliana landsberg
  unsure (1)..(2940): unsure at all n locations
ctattctcattaataaatagtcaaattgggataatgcttccaagatatatcaagtacaagtacctacatactgtgcatgtgaaagcaattaaattgaatttgagcccctaagaaaatttgaggccaccaaaacacccgtgacgagttatcacattggaacatagtaatgtcaatgtctcacgggtcttcttactctatagtatagaccattttcgacattcgatatttccactacatgtgctcatgaatatggatactgaataatatcaaaagcctgtgaacatgctttcatgttaaaattataatttcgttttatctaaatctcaccagttacgtgcctattctctcaatataaaccctatgaagcaggtagtatagcctatcctaagctaagagaagagcaaacccaacaaattgttgaaaagacatttaggtaaatactctctcaaagtatataaagccatggagccaaacactaagcttatcgttcttaccttggttcttgcctttacactcacggcagcaaccggacagatcttctgcggtatgacttctacttgtctgaactcttgcaagccctatgtgtaggctaggaacccaatgaccaccggaattgatcccttgggcccttgctgcaatgccctgtccaaggccgatttccagtgcctctgtaagcataaagacagtatcaatgtccgtgatatcgagctttgacctcgctgagaaactcccggagaagtgtggattagctgctgcaacttgctagtaggttttctttccgcgaaggtttcgctttgtggtttgggtttcatggttttcgtatactgatttatattgatgttgttgttgttggtctctgcctgatgctgtttctgttgttgttttcttcactttgtgctggtgctgcttgtttcttcccgcctacttcaacataataaacaaaacaaaaatgttgaccgttcaagcacaaaagacagagatcatcacacttcggtcatgtgagtgatatataatttatgtacagaaaattgatacctctctgtctattaaatcnnnnnnnnnnnnnnnnnngacaaatccttggtcacaaaatgtagcatcgcatatatagcttctgtttcataatgggaaatgtcagatgaagtaaacatatgaaattgtttatctatattagcccagctgcacccagaaaaaatttccagctccttccctctcatttgatgccgtatccgttgcatctcatcccatctaccagaggaggcataagcgttagctatttgaatatagcgagacccgttagatccttcaatgactaacaatttctcttcgacttccttcacaagctctgtattcttattccagctacaagcatttaaaaatgctccaagaataacggcatctttttcaacttgatcaataccttccataagctctatggctttgtctaacctataggcctttccatacaaatctatcatgcaggtatagtgaccagtctcgggagatatgttgtaagcctctatcatcgacttgaagtatttctcaccttctagaactaagccgcggtgacgacaagctgataggagggccataaacgtgatttcatctggcttgaatccaccctcagtcatgtcttcaaagtgctggaaagatttggcttcatgaccatgatgagcacaaccagctatcattgcgttgtacataactgtgtctctctcgaagctactgtcaaagatcctttcagcatactcaacattttcacattttgaatacatgtcaacaaatgcagtaacaagttttttatccattaaaatgcctgttctcaagctgtgaccgtgaatctccttccccggttccatataagcttgtaaagagcatgcaccaaggacgctgaccatgaccaaagaatcaggagtattagtctcattggctataaacgcacgagcaagctcaagcacagaatcaggttgacgtaaattaagatatcccaaaaacattgcagtccagaccactagattcttttcagataaagaatcaaataaccttttcgcttccaccatcttcccctgagacgagtagcccacgatcattgaagaagctgaatacaagtttccaaaaccatataacaaatgagcagactctgcatacttcatatttccacacttgcaataaacatcaacaattccactgctaacaaatttattagaatatgatccattcttcaataccctagcatgtacttccttcccaatcttcaggctctttaaactactcagaacatttagtacagcaccgaaactgtgttcgtcccatttcaacccattttcctccatactaacagccatcttcaaagcttcttcttcataaccattctgtgcataccctgcaatcaatgtattccaagaaattgtatcattcagttctggatttctccagaatacactcaaagctttatcaatgttaccttctctacaataagctgcaatcattgggttggtagccacactatcaacaaactcaacacacgatccgttaaatatattacagacttccttaaacttcccacatttcgaatacatgtgaatgagagaactaacggcaaacttagttccatcattccctgttttcaccaaaactccatgcaactgttcgccgtaaaacacattggttaactttgcagaaagtttaaccatagtagtgacagtgaaatcatctatccaaatatcatccttctccttcctatgcatctcaccaaacatctcaatagcttcactctcacacccatcagttttggcaaaccctgaaagcagagtgttgtacgtaattaaatctcgttcacaattatcactttcgaacaattcacgcgctttcttcacgttgttgaactttacgtaggctgcgatcactgcgttccatgagtaaacgtttctctcaagcatt

SEQ ID NO: 30690 - DNA, 3708 bp, Arabidopsis thaliana landsberg
gatatctaacctagaatatcaaagcaatctacttaagcgattccaagaaccaatttagcagaagagattgtgcaaaacaaggaaaccacaacaaagtaaaacacagtccagagagttaccttgagtgcgagtagaagtagaaatgtctcaaccgaataatatccacgatcaacaaaatctcccataaacaaatagttggtcttaggacaatcacccccaactttgaaaagctccatcatatcatagaactgcccatggatgtcaccacataactatcccaatggaaaaagaaagacgagtattagcaattcttgcaaatcataagaaacatcaatggtatctactctcacttcttaaccctgtaacttcactgcccgtgaaatcttttgacttgtaacaatagcaagaaacaaaaacaagtctttcactggatcctaggaatgatataccatttgatacaacattacgaatccaaattataaagacacaaaatctccgcgcctattttcttcagatttattgattaataagctcataattccgaaacccagatcgagaagtaaggtaaagtaagaacttacagtgacaggggcatcaactctctgaacattactctcttcaacaagaatttccatggctttgaagcaaagagccttcacctccgattcgctcaatggttcgcatcgcttaagctgccctatttgccgatctaggtctgacatttttacctctcctctcctcttcttcctccttctattactcttcagccaccggaaacgatccttaatctgatgaataagaaggaatcaaccaaccctcgccaaaaagaatctgatattctccactgtcgaatgtattaagctcgtcgtcttcttcccaaggagagagaattagctcctctccgcaggaatgttttttccccccaaggtttttctttccctccttatggtttagattattttcaaaatcgcctcacttcttttctgaaattacatattcgtccagaatgtgttaagttcacataatgggcccagaatataactttataaggcccggcccacatatatcaaagcggccattttcgtaatttctccacggcgagaagagaagataacggcatttcgatcggagttttgatcggcgacgatggagagaaacgttgagaagatgctgaacagagtttcagtcgtgttcttaagcatcggaacaatgttaatggtgattatgattctccagacgccaaaacttgtatttcaccagaagctccatcgaaacctcatacgcattttctgagatctacatgcgattcatcgcctcgtcagcatcttcctctcccaaagaagaacgctcgaatctggttctctggagcttggaaatcgcgtctatcctccttctctacctacttcccctgatttcgcgatctcggattcattcaaaatcacaccaaagctctctgtctttccgacggagcaggccatgctccgatggctctttctcagatcggattatccgacgttaccgcagttgaattggttgattcgattcctcttgtgaaaagagctgatcctcataaccttccgtttttcgaccgtgtctttgattttgtctttactgcacatctagttgaagttctgtttccgtggcggttcgtggaggagatggagaggacggtgcgacgcggtgggttttgtgtggttgcggttgatgaatgtagtggagatgatgttagagacattgctaagttttttcataattccaaggtcgttgatgttgctaatgtaaccttagaaagagtcaaaagaactagtatactattcaaacttcaagactctaaaaggactagtatactattcaaagttcaagactctctttcatgaaggtgttttaatcttttcttcttttcttttaagactctccttcatgaaggtgttttaatcttttcttcttttcttttgattgcgttgattcataggtcctggattctcagactgcttcaatgttcatggagtggagttaactttgagttaatgtgaccatatatttcgttacactactatagagtaagtcagtaataaatttagcaataataactaacagtgtaaaattggaaataacagaaaaaggggttggtacaaagagagaccaaggcaacaaaacatacagaagcttttctttagagctgcaacttatagtataaccatacagaactggaaaaacaaaaacaaacatagatctcttagaccaaaagtccatactactacccgaaccttcatttaccgtataggcacaagcttcacattgatcgattattagcttaaaatggctcgatcaattacttaacataaaggatacttttagtagtatgctgtcttgtcttcactgataccagcgtagattttggcacagtactcgaacaagcttccatcgaaacaccgcctaatagcttcttttgacaaaaacccttcttcatcccttgctagcaagtacaacagtccccactctattttgcctgcgatcctaatacatacatgtagatccaaacattataactacaacaacattgactaatactttagtttaacacatgcattcaataaactaatgaaagggtaagaaaaaggaaggctaatgctgtgattgtaccatccaaaaatgtcccaagcgtcacggtttccttctgtcatctcccatagttctccaagactcaacttgtctggcaaggttttcgcatatttgctaaatatcaactcaagattcaccggcataaacctgaaaagcatacggaagttataccatatgcatcagtcatcatattttctatcagtcaaccgtttttttcaagataatatggtcactcaccttccttcattgtcatatgtttttgaatcacttccatgctttgacttgtgtatgttgtgtatgtatatagggaagaaaggtgaaggtaaccacccctgcatataatcaagtagaacactaacaaaatggacaacggatttggatatgataatttccgagtctagagtagaatcaatcaaagttttgcgatatatgtcagcagaggaggagaggtgttaccggaagagtggcatagctaagggtcaggttgataacagcggctattataagcgacccaatgatattgaaaccaagcattcgcagtcctaatcaccggttgggatcaactttttgtacatataatactaacgaaaaatttgaagttgaaatatctatatatactatatagacataccagagtaggtctcccaagggtaaatgatgccattatcatcgatatcgaagaaggagacatgctgttgaagaacactaagtccgtaattcttatggcctggagttccgtacgggtgttctctgtctggtgcttgcaatgctcttggcatatctatgcataacacatataagatcaaaatctgtatcatttccacgtatgtgtaatgtgtgtatagaattattcatgcacgttcatgggtaatacattattaattaccatcatatacaggatatgtatcattttacaatttatagcttctataagatcatgaacatcattctatatgcatgatacaaaaaatctgacgatcggtatttgcatatatttaaaggggtttcttacatacacccatatattacttcttcttcggcatgctatttattaaacagacgtatgaatatagctaccgtgctaga

SEQ ID NO: 30691 - DNA, 5016 bp, Arabidopsis thaliana landsberg
  unsure (1)..(5016): unsure at all n locations
tttcccctatcttgttctgatatttttatttgattttatactgatttgttttctgattcctagattttggagattctatcaaccattttaaatgaagtcagtggacgagggctggcaagaaaaatcatcgcagttataaaagctgctaacatactgggccttacattcactgaggcatatcaaaagcagccgatagagttgttacgattactttctcttaaagcacaagattcttttgaggaagcatgtctccttgtccaaacgcattcaatgcccgctgctagtatcgctcaaatacttgcagaatcctttctaaaggtaacttagcaaaactatctctgttaacttgtacacgctttgtagattttatttttgaatgcacaaaaatctttatcttatggtccttatttgattagcttggcaaaaacctcctacatcttctttccgtcctgaatcttttctgtgggctctttcgtgttatgtctctaatctgttttctttctccagggtttattggctgctcatcgtggaggatatatagattctcaaaaggaggaagggcctgctccacttttgtggagattttcagactttttgaagtgggcggagctttgtccatctgaacaagaaattggtcatgcattaatgcgtcttgtaataaccgggcaggaaataccacacgcgtgtgaggtatgtgattttgtaaaagcttattaacaatagtttatgctgcatgagtttcaagatggatgagagaataagtattcaaccctaatttggtaatataatggaatgctgtttttaggttgagcttcttattctgtctcatcacttctacaagtcatccacgtgccttgatggagtagatgttcttgtggcacttgctgccacaagggttgaggcttatgttgctgagggagatttctcatgcctggctcgtctaataactggagttggaaactttcatgctcttaatttcattctcaatattctaatcgaaaacgggcagcttgatcttttactacaaaaattttctgctgctgctgatgcaaacactggcaccgctcaggctgtcagaagtttccggatggctgttctgacctcgttgaatctgtataacccaaatgaccatgatgcattcgcaatggtatgtatgtctttagtagctggaatcagccaagtaaaagagtttatttcatcatgttttgtctgcttaccacaagttcatcttagattaactttgactgcatctattacttgtgaacgtgaaggaacattttgggtagtttttttaaaggtttttctgttcatggcttttttcatgagacatgcattttctgcaggtatataaacactttgacatgaagcatgaaacggctactttgctagaggcacgtgcagatcaggctgcacagcagtggtttctacggtatgacaaggatcaaaatgaagatctccttgattctatgcgctattacattgaagctgccgaagttcacacttctattgatgctggaaacaaagcgcgaaaggcttgtggtcaggcttcccttgtctcccttcagataaggatgccagattccaagtggctctgtttatctgaaacaaacgcaagaagagcacttgtagatcaatcccgtttccaggaggctctgattgtagcagaagcttatggtcttaaccagccaagcgaatgggcgctggtgctttggaatctgatgctcaaacctgaactagcggaagattttgtggctgaatttgtagcggtgcttcccctacaggcttcaatgcttctggaactggctagattctacagagcggaaatggcagctaggggagaccagtctcagttctcagtctggctcacaggaggaggcttaccagctgagtgggccaaatatatgtggaggtcattcaggtgtttgttgaaaagaacacgggatttgaggttgcggttacagcttgctacaacagcaacgggatttgctgacatggtagatgtgtgtatgaatgcgttggataaggtcccggaaaatgctggaccacttgtactaaagaaaggacatggaggaggatacttaccactcatgtgagtgagtgaactcagagatcatctcaaggtatgcaatgttaagtatctctctctctgcttcatcgttgtanagaggtcgatggggctgtaaattagccaaagaaatcggaaaaggttttttttgattgctatctttttggtgttgtggaagagacacaaacttaagtcttttttttatagggtttagtatttatgtgtatgttttgttgctggctctcacaattcttcaatttttgtttttgaccttatattttttttgtcccggctattaaatggcagtcctgcgagatacatagagatagagagactacagtgtacagtgtaataactgtctttggtataagctcttaatagaattgcattgttgaataattttggaagctttattgtttgttgattggcttccaatgaatatttcatattaaatgaaatttaatgatttaatgaaatatttcatattcacagatttaatgaaatttggattaacagtgttttattttaagtttaaatgtcatttgtaatttaatcggggaggagtttttaatcgttcatctgtatttcttcaacaaaaatatacaaaacgaagaaagcacagtcggtctctcttcagtcgtcacattagctcctcacgcgctttctttctaaaaaaattgaaaaaaccccaaaaccgctgattatagtccagagattttgatgcggtggagttgacgcgccatgcttgcgagtggtttgttcacgaaacattatgcctacgacgtcgtttgaaggattcatattacgacatcgtgtgaacgattcatattagctcctcacgcgcttactttctaaaaaagttgaaaaaatcccaaaaccgctgattatatagtccagagtttttgatgcggtggagttcacgcgccatgattgcgagtggtttgttcacgaaacattatgccgacgacgtcgtttgaaggattcacattacgacatcgtaaaggattcataatacgacgtcgtttgaaggatttatattacgatgtcgtttggaggatggatggtgagtgtcagttgtaacaataacgagatatatactaaaggccttaacgaccaatagctcaagtttatgttaactattgcccaacagagatggaagtaaaataaagaggctacgatacaacagaaactgcagagcctaacagcaatcactcaccacattttagttttaaaacaaagaagaagcaatttttaaatgtcagatataaataatcaagaaattatataatctaaaatgaacactaatttttttatttttttttaatgaaagttgaattggtacttaaacaaactcacaccacatagaactcacaaaggggttacattgtcaccttacactcattttcttgtgcggccagaaacttattcttctttggtttctttaaccgtattgggacgtctctgtgcaagtgttctcttagtgctctcgaggacaccaaagaagattgatcctccaatacctatccacaacactcttggcccaataccctacaagtcaaatctcgtgtaagaactctactcttaatgccgctcaatagactttctcaagatttctactttcaactttacattaatctagtgtgtgtgtgtgtgtctacctttaagagagcaggagctccttcctctcttacaattgtttgaacacagtcaacgattccttgatattgtttggctgatccctgaaaaagaggtcaaagaaaacaataagatgattggattttagagacacacttgtgagaatattattattacctgaaccattaatcttgtcttaataacatcaagcggagtggtgactgctccggtcagagcacctgcataaacaacaacaatatcattagaccgctccttaactaatgccagatacatcacttgcacactatgattaactcggttttagatgaaatggatccatcgtactgtgtacttttaaggtaaatgcagaccagagccttttttttttaagttcagcggcttaattctcattcaggtttgattaaatggatccgaagaatatatattaaagcatataaggtatgtcaccaaccagcaaatgcaccgattagagcgttctcaggatcactaagctctctacgcgcctgccaaagagttgaccaaagtaaatctcatgcaaaatatcagtacatcagaagttatcatgcgtttttttttccgataccttatccaaagatattacatatagaagaaatgccacttattttacaaagaaacttacggcttttttataccccaagcaaagctgctcatatatgcagaactgtatagcatcaaatggcaaatctcgcaaaaggaaggaccggtatccctagaagcaaatgaaataagtcaccacatgaaaattcaacaaaagaatgcagacttaaagaaaaagctataaaagtgttactaactgcatagagacccctaaatccctcttttgatgcaatcattcgaacagcactgggagctgatgtaaactgtccggtctgcattctttgcttcacaacctaaacaatacacacacagaaatgttgactgagggattctatgtagaacatggtctggattgtgatatacaagagagagagtttttttttttttacctctgtaggcactcgaatcagagatgcagcaagtccaccgatggcccctgcagtctgcaatttgaaataaaggtaacaaattgttccttttcactctcaatacaaggcatatgcgagagtaatagcagaggctaataaagaagcaaattaacagttcaacgataagaaaaattattattgctaactgtatactattcatttactgatataatcatgtccagatcatttggtaacagcagagactaataagggtcttttttaatggcaaaactaaaggtgaagaaaccc

SEQ ID NO: 30692 - DNA, 7179 bp, Arabidopsis thaliana landsberg
  unsure (1)..(7179): unsure at all n locations
cgtctacaagagcccgcccgcatcgagcaagttcaggaagatgaacaacttccaggccctcccaagcgaagccgcaatgatgaagcacctgttccccgatgaacgattcacatgataatgggcggtctgacgtcttgtcgagattctgtccgttccattagaaattatcgtcgcaggcggaagtacaacgcggcttgatcgccagtagcacacctgcggttgacaatactaaaccaatcaccttcacagaggctgatgcagctggcctaacaggaccgcataatgatccactcgtcgtcgaactcataatcgatgaaagcaatgtcaccaaggttttgattgacattgacagctctgtaaatgtcatctttaaagatgtcctcatacagatggaggtcgatctgcgtgcaaccgaacacaatgttcagccgttgactggatttgatggagacacggtgatgacagtcggtacgatcctgctcccggtttacgttggaggcacaatgcattgttttaactttgtcgtcgtcgataagcctatcgtttacaatgtcattctgggcacaccatggctacataaaatgaaggctgtcgcatcaacttaccatcaatgcctaaaaattcacgaccacacgtggaatctacactttgcgtggcgatcctttaaccgcgcgcacatgtttcatcgttgaaaagcagcttcgcaacgcaagagcttttgttgttaccggacccacctagccacgagatgctagactggctccacgcaccgaatccgtcattcaggtcaatattgacacgactgatcccactcgttgtgtcggtgttggcgtggacctcccactttccctcaaagaggaactagtcaagttcctttgtgataatgcagcaatgttcgcatggacgatcgatgatatgcctggaattgatcctgacgtcacttgccacgagcttaacgtcgacccaactttcaaaccgattaaacagaaatgaagaaagcttgatcacgaccgtacaaccgcgataaatgaggaagtagcaaagttacttaacgctggttctattgtcgaagttcgatatcccgattggctgagcattcccgttgtcatagaaaagaagaacggcaagtggcgagtgtgcgttgattttactgatctcaacaaagcttgtcccaaagatagtttcccactctcacacatagatcgtcttgtggactcaaccgccgcgaatgaattgttatccttcatggatgccttttcgggatataaccaaatcatgatgaatccggaagatcaagagaaaacttcatttatcacggataggggtatctattgttacagagttatgccatgcgggttgaagaatgcaggaccaacttatcaacggttggttaacaagatgttcaacgagcatctcggaaaaacaataaaagtctacatcgatgatatgctggttaagtcgttgaaaaaggaagaccacgtaaagcatctggaagagtgtttcgcgattcttaaccaatatcaaatgaagttgaatccggcggagtgcacgtttggagtcccatccaaggaatttctcggctacattgtcacgaaaagaggaattgaggcaaacccaaaccaaatcaacgcttttctcaacataccgtctccgaagaatttcaaggaagtacaacgattaaccggtcggattgtagcattgaatcgttttatttcaaggtcgaccgataaatctttactctcttatcaaatcttaaagggtaacaaagtatttctttgggatgaaaagtgtgaggaagcattcggacagctaaaagcgtatctgacttcgccgcccgtactgttcaaaccagaggtagacgaaaaactttatctatacgtctcagtttctaatcatgcagtcagcggagtcttaatccgggaagaccggggggaacaaaaaccaatttattacgtaagtaagtttatgacggaccctgaaaccagatacacaatgatggagaagcttgcacttgcagtagtaatctcagcttgaaaacttcgtccatattttcaatcccatccaatcgaagtataatcaaatcagccacttcggactattctgcatagcccgaaccagtccggtaggttagcaaaatgggcggtggagttgagtgaatacgacatagagtacaagaaccgagtcgccatgaaagctcaggtcctagccgattttttaacagaattaccggtacccggagagaaggaacaacctcaaaattagacttgaagctacatgttgatggatcatcatcaaaaaacggatccggagtgggaatcaaattaggaagtccttgaacagtcatttcgcttcttattcaacgcattcaataatgaagcagagtacgaagcattaattgttggacttaggttggcacagggagttggggctgatgaagtggtcgcctactgtgattcgcagctagttgttaaccagttcaatggagattgtgaagccaaagattcaagaatggaagcatatctcgaagtagttaaagatctggctaagaacttcaagaaattcgaactcattcgcatacctcgaggagaaaatacaactgcggatgcgcttgcagcgctggcgtccatgtcagattctgaggtaaaaagagtcattccagtagaatgcatttcggaacgaagcattaaggaggagaaagagaacctcgtcataacaaggtctcgacctgcggcacgtgatcgtggtgagcttgatatagagttaccacctgtcaagcggaggaagtcaaaatgttcaaccgtttctgatctcggcgcacctaaagaaagcataagcgaggagccctttgacctgacagaggatgtagttccagagacaattatagagactgagccaccaatcgaggaggatatcctcgagccaaatgagcatcccgaaccggaaccacgagtatttcacgaagttgaccaaatttcggttaaagattggggggctgattggagggagccaataaagcattacattatgacaggcgagctcccaaagaacagatggcaagctaggaaaatgagaatcgttagcgcgaaattttgtctatcaaagaattctttgtataaacgaggtgtaagtgatccctacttactttgcatttttgggcccgaagtcgagatcgttatgagcgaagtacatgaaggtttgtgtggaagtcattcctcgggaagggctatggctttcaagatcaagagaatgggatactactggcctactatgatcacggactgcgttaagtatgctcgacgatgcaaacgttgccaactccatgcaccactcattcatcaaccttcggagttattctctttgatctccgccccataccctttcatgagatgatcaatggatatcattggaccattacataggtagacccggggtgtacaatatttactggttctaactgattattttttgaagtggattgaagctgaagcgtatgtaaatattaaagattcggcggtaaagactttcaattnnnnnnnnnnnnnnnnnnnnnnnnnnnnnnnnnnnnnnnnnnnnnntgacaacggaccacaatttatctcacacgagtttgaagcattttgctcggactgggggattaaggttagttattctactccgcggtatccacaagggaacagtcaggccaaagccgcaaacaagacaattctaagtaatcttaagaaacgtctaagtcatttgaaagggggctggtatgatgaacttcagccagtcttatgggcatatcgcacaactcctaggcgctcgaccggagaaaccccgttttcattggtgtacgggatggaggcagttgtaccagccgagctcaatgtaccaggacttcgtcgaatggaagctcctttaaatgaaaaagagaattctgcaatgctcgacgattcgctggataccatcaacgagaggcgagatcaggccttgatccgaattcagaattatcaacatgcagcagcacggtattacaattcaaaagtcaaaagcagacctttctttgtgggcgattatgttttgaaacctgtgttcgatgacaggaaagaggaaggagcacgcaaactaggaaatcctcctcgtcttgtaaaacacctcgaccccttgactggcgatgtcaagaatgggcatcatacaatccgggatgcaggcaaattctgcgattccgagttcgatccagtctccggggtgagagttgagggtgtgtaactcccttaatatcacggtgactctccgcagcatttggttgatcttctttcgaagtttcttcttttccgttgatcgtttttttgttgagccgcgagagctttgataaaggacatcgcgatgtcctgatctctgcccccaagccccttgattaacgcacacggagctcggataagggataagaagttgcgaagtggggagcgtcctctgtctggtacgttcggatgtcctcatcgatcatcccgaggctcgaaaagtctggcatggattccgagcatcggaggttgaaggccataactgcgaaagaaaagagcggtattgttagtaaggaatgaaaagaaccctagagaggaaatttatagggaggtctcttagctttcagagatgcgactccatttaaagccggagtgattcgcggaagcattcacgtcgctttggtcgccctgcattcaaagagtatctccaaaacgaatatttgatgaatcaaggaaaattaggtaggtccatgcgaaaataaaaaaagagggtttttagtctcagaaaacatttagggaaggggctcaggaacaagctccttcatcgccggttcggggttcgaagtggacgcctcgtttttgtcgtccacgtcgggttcattcttcacgcgcttccaggggttactgtcctcctcctcgtcgtcaccgtcctcactgtcagacgggatcacttgaaccggaacgtttacaggaccggagacttggcctcgagcacgaaggtacatccggagcatgtgcgggatcttcgccacgcagtcgaagttcctccactcccattgaaaagggtcgctctccatagcccttatcttcctctcgatacgggcaattcgggcctctagcgtttgcctcttgaggcccaaacgctgcctttcatcgcacaggcggcgatgcttgtcgacgacctagaatatgaactggttaaaaaacgagtaaaacttgttccgaaaaagagaacgagagaggatttaccttgtccataaagtcgtacgcctcctttttatctttcgaagggaagtggaaacaagcgtttggaaagaggacaccggcgggctcgaagccatcgccggacagaaacaagggactcccggggtcgagggggcagacggtgcaggctcctccgcgttccattctataggtgttgttcaagtaaatttctgcgatcatgtttttcgagagttgagaaagtttatgctcttatttatagtgatttagggttttactcgaaaccacaaagttaataattgtggcgtgtccgaatgagtttatccatttttggaaatcgaggaaaaggcaattattgccttagaagcgtgacaattttccagatttccaaggccaaaaaggcaactgtcacatttaagataactgggccattaaatgcagagtaaatagtaaaggctcaaagcccgcaaaaataatcgaactgactaaacccgagttggggagttcgcggattaaagtccgcatttttagggataggtctgatcaacctacaagtcccgtaacttgaccacatggttaaacaaaaactctatttaaagaaatggactttgcaaatccatactcaagattagcacaaagaaaaccctcttgggatcgtagtcttaaaggaaaggtttaaaagcctcctcaggcaaagtatttgtttaaagcctacttaggcaagtaaagtaatttaaaaaaaaacaatagtaaatttcgagtttaagggacaagccgagaagtggacacagccactacgagttctcgggtatctcgggttcggttcaaactgaatcaggatctacggcagctgtctcagtctcacccggctcatcagtagaagctgctcgccaggaaccacggagtctgagccatcatcatcctcgataaccactatctccgagttcgtggatggaagaattttaggcggagtgattaccgtctccagaactgacgccggcgcgataggcacttcgggttccacggaaccgctaacacctgaggcaattacttcgggttaacataagagtaattcgctgtggatcgattttttttttttttaagaaaaagggagaagagttggaatttaccagcctagtctaaaccggattcgctcaaaggaggcgattcggtgaagaactcctcgaactgctaagggttaaacgacgaggaaggaaggaaagctaaacgattttgcttctcttcgaggacggccttcaactcgtccctctttggttataaagtttggggactatggttttgggtttagggttaagggtttaggggtaatagtttagggtttagggttttaggttttgggtttaggttttagggttttggatttttagtttagggtgtaggatttatgtttagggtttaagtttttaggtttagtgttgaggagcaaatatacttttaaaagtaagcacaatctttgtaagcgttttggaatcaaatatctcaagatgataggtggatgattgagttttagggctaaaaccacaaccagggctatgaacctaaattcatctttccctgttagaagatccaaaaccaaaaatcatacggacttaagctacaccatcaaagctttgaggagcaagaagaatctgggttagcatttcggagtgaaatatgagttgatgtcatgtgtatgagagatagaccctctggagactgaccccgaacagttatagtcaagtgtgttgcgttccctttgagtttttattctttttccttcttcctttttttaacatcactcgagggtttattttattttcgttttgtcaacagttttttattcacgttgtaaaacaaaaaattaattttattaattgcttcttgtttgtacagcttattttattaattcaattggtataaaatatggatacacataacanacattctgccgtatttt

SEQ ID NO: 30693 - DNA, 3020 bp, Arabidopsis thaliana landsberg
caaaatgaaacactggttgaaagaatgagtaagatatctttgttaatagcaaagcaataatttagtaaggttttctaactttccggtaaaacccccgaagcaagtgaaaaggttcccacatttgtctgtgtaggtaaacaagaacacttgaccaagaaagacaataagaacacatgaaaacaaacacatatttgacatataatatgataacttctatttgcttgtttgtgaaatgtagataaaacaaagtaaacacaaagaaaaaatagtgatattcaaaaaggaaataggatggtcaaaattgtgtggtgagataagaaagggcactcacatgttcacacgatggaacactaacgtgtgaggttaatgattgcttttgccacactacccataaacttcagaaggaattttttaaaaaattagaagtttttctatagtttcttttgagttgaatacaaatataactttaacaataatatatagtgcaaaagctaaaaatatttctataagatatactttttggtcgagaggttgagtatagaggggacaccagctgccccaaaaccatcacgctccatggacaaactttctccacctttttttttccttcttcttcttctcttagttttcttcaatattattttattaaattcgccataaaattatagtttatagaaaacaattattaaaaaagagagaaagggaaaagggagagtgatgagaagagtcggtcctttttgtctcatagagccaatggcccatcaattttatttccttttgtcagtctccttttctcacgcttcctcttcctttaatcccacattcaccttcttcttcatatatattccaatttactaatggtctaattggctatattattgagtcatttggttcatatacccccagcctcccatagaggcaagttggtgagccattttctataaacaaaacggatacctattgaagaaaccagaatagagatacatagcaaacatagtatctctacaatatttcaaaacactttcattataaatataacagatatgtacaaacctcactagacacggatacacatcattatacattctaacatattcttcttattcacacaaaactttagagccaaaattcgattagtaaaataaactaaaagaaagtaaattaaagtaagttttcagtatttttggttaatcctctcaagtctcatcacactttcattgtacatgtagccgtacataatatgaaatttggcgtcctaaatatacaacgtatataaagtgttactttttcgaatatacgtttaagcatttttgtgtcatgcataaatgcacgtcttttccatatgatcaacaaaaacagtagactagacatttcgctaacacttaattaatctcaactaaaagtaaaacagttcgtcataatcacatggatatatacgaatatataagaaagaaagaaaaccaggcactgcttatattctttggtctgaaaaatgtggtcaaatgtacacatttagaaagacatgaacaaagaaagagataggagagtttggattcatttggggacaaaggtgacataagggtcgctttgaaactcacagcatacaaacatagaccttctcttcactatatatacatatatattcacatgtatagtgtgtatatgtaaatcgaagtaccctagtttcttttggacttcaccaatcacatctgttacttagattcttctacgtcgacaaatattcccacaatctcaaaaccctagtcatcacaccaacaaccaaaaagatatatataaatagaggaaaataacatgacaaatattctttatatataatatagatctttttctttttcttgaaaaagaaaaaaaaaagaaaagaaaaagaacacaccaaacctacttacaacatttgcttacactcccaagacttagtaactaaaaccatataacatatatattattaaagaggaataaaaaagttttggtaattataaccaagttaattatgatcataccctatatatattaatcaattatagactttttagtgtgctcaattctcatcatttcacaccattatgatgtgatccagcgcacgacgccgctttgaccgttctcctcctccaccaccagaactacgttccatcaacgacttgcttgaccgctcaagcagcgacttgagagcattttgcaaaaaatgcacagactcgacgccgtgcatctctttgtcagcagctacgacaagaacacttcttgtccgaccaccaatggttaccatctcagctcggagagtcttcatgttaagagacttgagaatctccataaggtccggcaagagatctgatctatcttcacaacatagagaggctttgaagattatatgaccgtcgtttgaatagtctccaaagtgtagaacactaatttcgtcggtctctgatggtaataatgtttggtcggagtcggaggtctctagggtttgctgtttaagttctctgactcgttgaactactttggcgagcagtgtggctttatcggtctgaaaatagaaacatgaaattacaatgaaaagtttggatcaagaagttgaaatttgatgtttgtatcaaatcaaatcaactgaaaaagcttgagaactttcccaaaaagtgatatactatcccaacgagcttcacaaaaaggccatgaagcttttcgtttttctcatctgatcactactcgccagttttgaatattcaaatcaaaatatagggccatcgttagaattatacatgtaggacattagggttcatttttgatacatatgcgcttgttaataagtaagaatagtgagtcaaaaaagcctcaattgaatccaaatgtttataaaatgttatcatgaaaaagtacagtattcatgagctgacaccaaatggagtaaaacatgagaccatttagaagatgtaatctgtgggttagagtggatgctaaaccctaatcatataccccattcagaacatcttttcccaaaatttcaaagc

SEQ ID NO: 30694 - DNA, 1851 bp, Arabidopsis thaliana landsberg
gattttgcggattctcatcgaaacgatccaaatccaaacatcatatgaatcaatcaatcgataaccttttttttttgtaatgtttaatttattttgtgcccttaataatgagggcaatgatccatcatcttcatttctgtcgatgctctgtttctaatgtacagtaggagaggaaaagaaacctcatgaagaatcttgagccatttcttttagattcatctgatgagaaggataataatatacatcccattgttaacatttcactctcatttatttattttgaatctatgaggcaaaccaataaacggcacgcagtttgaaggcgtcttggtaatgtagactacagccagttccacttttcacgtaattgggccttttgagttaagataaagcccattagctcgctttccatgtggtttgccacgtgagtatcacgtgattgggttgggagttagaatttggggaaaaccctaggccagtcaattctgggaggagagaggccgccggaggagagagaaaaagaggtacgagcttacgttttgcttgctcgatttcaatctctctgcataatggattcaatctgttcatcgtaatcgtttattcaaaagtttcgatctttacttcacttgaaaccaaaattcgtagtgttgtgtccgaaattcacgctgttcaaagtactcatttttgaaacttgattttgttcttcttgtgtagttgggggattgctttttgatttctccttctccatcttcgacctcgagagaagctaaaaatggcagaagaagcggatacgaacatcgagatctggaagattaagaaactaatcaagggacttgaatcagctagaggtaatggaacgagtatgatctctcttattatgcctcctcgtgatcaagtatctcgtgtcacaaagatgcttggtgatgaatatggaactgcttcaaacattaagagtcgagtcaatcgtcaatctgttttgtctgccattacttctgctcaacaaaggttgaagctttacaacaaggttcctactaatggtcttgttctctataccggcaccattgttaatgatgacggtaaagagaagaaggtgacgtttgatttcgagccctttaggccgattaatgcttccttgtacctttgtgacaacaagttccatactgaggcattgaacgagcttcttgagtctgatgacaagtttggtttcattgttatggatggtaatgggacactgtttggaactttgagtgggaatactagagaggttcttcataagtttactgttgatctcccgaagaagcacggaagaggaggacagtctgcacttcgttttgcccgtcttaggatggagaagagacacaattatgttaggaaaaccgctgagcttgctacacagttttacatcaatccagctacgagtcagcctaatgtctctggtctgatccttgctggttcagctgatttcaaaactgagctcagtcaatcagagttgtttgatcctcgtcttcaagctaagatattgaatgttgttgatgtttcttacggaggtgaaaacggtttcaaccaagcgattgagctgtctgctgagattctatccaatgtgaagttcatacaggagaagaaactgattgggaagtactttgaggagataagtcaagataccgggaaatacgttttcggtgtggaggatactctaaaggctctagaaatgggtgctatcgaaacccttatcgtgtgggagaatctggacataaacaggtatgagctaaagaacagaacgacaggagaaatggtggtgaaacactttggaaagatcaagagtctgatacaagcaacttccatgattcagag

SEQ ID NO: 30695 - DNA, 2744 bp, Arabidopsis thaliana landsberg
ggaacctcccagacccatcaatgcttctctctacctttgtgactatcaagttttacacggaagctttgaatgaattggtggagtgggatgacaagtttggtttcattgtaatggatggaaacgggactctctttggaactcttagtggtaacacccgtgaggtacttcacaagttctctgttgatcttccgaagaaacacggaagaggaggacagtctgctcttcgttttgcccgtctccgtatggagaagcgtcacaattatgttaggaagactgctgagctcgccacacagtactacatcaatcctgctacaagtcagcctaatgtgtctgggctgatacttgctggttcagcagatttcaagactgagttgagtcagtctgatatgtttgatccccgactggctgcgaagatactgaatgtggtggatgtatcatatggaggagaaaatggttttaatcaagctattgagctgtcagctgaaatcctggcgaatgtgaagtttatccaagagaagcgtctgattgggaagtactttgaggagataagccaggacacggggaagtatgtgtttggtgtggaagatacgttgaacgctttggagtctggtgctattgagacactgattgtatgggaaaatctagatatcaacagatatgtgatgaagaacagtgcgactggtgaaactgtgatcaaacacctgaacaaggaacaagaagccaacactgagaacttcaaagtagccgacagtgacttggctttggacgtggaggagaagctgtcgttactgaagtggcttgacacaatgagtacaggcgttttggttgtgcgctagagtttgtgaccaacaagtcacaggaaggttctcagttttgcagagggtttggaggaatcggaggaatacttcgttaccagcttgacatgactgcctttgattccgaggatggagaagctcttgataatgattcggaatgacaatcaatcaaatcctcaccatcgctggttggggaagatggcgctccggcatgcctgaaccagcttgcgcgggctgtcggggtcgcgctgaagaatttgaaaataaattgaagaagcatcttttgtgaaggtaaaagatcgatctctttaaacttaggtttcttctttgaaaaccctaccttaatctcgatactggtgttaaaacaggtgatgaatgaaggaaaatgtggagagtgaaaaagccttggctttggtagcgttgttggtgcctagatatttatggagttttattttgagttggtgtttctttaataatttactttggtcagtttttatttcagaatttgattactcttgtctgagagaatcgctttaatgatttgggtttttattacatggatgtctttaaaaccttaattaaatcctaaattctataaattcaaagaattaatctaaaattcggcattggaattccttctgttaaaaaaagagaaaatttatagttaacatttggcatgaaccacactgggtttataaaacaagttgccttgaataatatcccaaacaaaatcgtttcgtaataaaaacttgttaataaattcaaagaccaaaaaaggggttggtttggtttagagcttccacctacctcacctagtcacctactactaaatgtaacatcatgtctctcacaatttaccactctcttctcctgttttcctcttccccaactctcaattttgctcagacaaaaaatcaatggctttgcaaatgcagcaaacttcagcagccttcacaatctcctcaccatccaccgccgctgcacgcatcaaactctcccctttcagaaccgtggcggttaaccgcggagttagatgcagcggcggtggagtcggagtaggaggcggagatgccgggaagaaaaaagcagttcctaattctaattatgtagttcctattgataaattctcatcttcttcgtcgattactaggcctttgattgagatacttcgtgaccttaataagaagattcctgataacattgttaagagtcatgatcctccttctacttctgctgctacttctggttttatcccttggtattaattatccttttttttttatatctttttgttgttaagaagattcttgttggttcttgatctggtttttttatttataggtaccatgcaaatcggatgcttagcttctatgctcctggttggtgtggtgaagttagagatgttattttctctgagaatggaaatgttactgttgtttatcgtctcactattcgtggttctgatggtgatgtaaaagttcttcaacattcctcaatttctttctttctttctttccttgggtgtagttgtgtgtgattgagtaggtaagcaaagaaacttatgtctgatttgactaattttgtgaaaaattaaacctttgcattgcatacattgtgtctctcttattgtatctttgtagaggaagaaactttgatggtagttttcaagagtttattaatgattaaggaatagattctagttcatgtattgatgcttgtttgtcttgtttttgtgcaaaatcaaacctttctagaggttcattttgctaatggtatatttcacgagtataacaacgattataagcatatgctttggtagattgaaaccaaaggtaatgtgatcgtggaagtcctcgagccttatgaccttggtcatctatggcaatgcctaaaccagcaaaatcccatttttatgactttgatatgata

SEQ ID NO: 30696 - DNA, 3101 bp, Arabidopsis thaliana landsberg
cttggcatcctaatatgtgtgtgtgtggttatgaagaactctatatgcttttggtgatttggtacctttgatggtggttgatatgtgcttgattggtatacccaattcatatctctaaatcaagtgaatattttatttttgttttaacgcatctccaagtaaatgtctttttattcctaaagttttctctaaagaaaaaataaatatatatagaaatctgtattaacgagtaattttgggtttaataatactttttaatgttaggttttagttggtaactccataaattaatccaaatttttgagattttctttgaatgttattatcacaatactctcttactttctttggtcaaaattatctcttttaaatgatttttttatcctgtcacaaaaaaaaacatatccttgttttatttagctttggaaaaaaaaacaagaaacttgatatatcttttcagacatcacatactctgcttcaatggctacatctcttcaaaccaaatacactctaaatcccatcacaaacaacatcccaagaagccaccgtccatcgtttctccgtgtcacttccaccaccaactctcagcctaaccatgagatgaagcttgttgttgagcaacgacttgtgaatcctcctctctccaacgacccaactctacaatctacatggactcaccggttatgggttgcagctggctgcaccaccgtgtttgtctctttttccaaatcaatcattggagcatttggttctcatctctggctcgaaccatctttagccggtttcgccgggtatatcttagcagatctaggttctggtgtgtaccactgggccaccgataactacggtgatgagtctatgcctctagtaggaatccatatcgaagactctcaagatcatcacaagtgtccatggacaatcaccaaacggcaatttgcaaacaatctacattttatggctcgaggcacaaccttgatagttctcccactagaccttgcttttgatgaccatgtggatcatggctttgtaagcatgtttgcattctgtgtattgctttgccagttggtccatgcttgggcacatggaaccaagagcaagcttccacctctcgtggtcgcgttgcaggacatggggttacttgtttcacggagacagcatgcggaacatcatcgagcaccgtataacaacaattactgcatcgtgagtggagcatggaacaatgttctggatgagagtaaggtctttgaggcattggagatggtgttttatttccagcttggggtgagacctaggtcatggagtgagccaaactctgactggatagaagaaaccgaaatctccaacaaccaagcataaatattttttttacagagtgatacatgtacaagaaaatttcagtaatatactgaaaagatttcttcgtaatttatatgtaacgagtgtgactgtatttaatactgtataaaacaagcaaaacaactgagcatgtaccatttaagtatcagatccgatggatgagtaaaccgaagaaacacagggaaaccagtaccgacactttccgtctttatggccattgtcgatcatggcaaggccctcctgaaaatgaataatagaattgcaaggtttcaggactcgcataggttgcattgcatctatcagtataatagaagtattgaagcacataatccaattgaagcaatgaattgcaaatgcatacctctaacaaagtttcgagagcatctataacgcgaccagatgtccatgagaggcgtctttgtacctcttccacaatcacaaagccttggccctgtgcggaaagcaacagaaatccttgagttacttcaagtagaactactaagatataatgtaacacatgtaatagttgttttcttttgtggaaatatgtatctcatatgattataacctgagccaactccaaaatctggttatggtctttgttcagctctgtgggtactgaacggacaagctttttcttgccaatagtgataacctcaaatccgctacccaatacctgaggagaaaatcccaagataccagcaagaacagttcaaaattttcccattgattaaaaatctgaaagaaaaaagaaaaacacaagttagatagaaacctttagcttgctaatagctcgaagacaatcatcttcagtcacagcttcacggtctttcttccttctctgacgaagatggttgcagagctcttgcaagctgatcaaacctccattatgtgatcttgtaagcatgcaaacttcaataatctgaactcctatttaatgaattcacgaaaattgttacatccctgctttctaatatcacagagggcatgtccaattcaaaacaagagaaaaaagtacacaagagattttatatcccttaagactcatagctaaccaaaaatcagaagcatcttcttcagtggcactagaaagagagagcaaacataccaagttcatagtagaagtcaccaataccaaggagctcagcccagaaacccttgttagaagcaagaggatccacaccaatgttagcacacatttcatggaactgagccctgaaggcaggattcttacgaatgtcattctgcaaccaaagaaaaaattatgcctcttttcaccacaattttatcaaattcaggaaaatgttattaaactacatgttcttattacgaaatcaagacgatgacaaaacaacagcaaacacaacaacaacaaaatataaaaaagaatcaacaaataacgaccttgtgtttacgagcgaactcttcaagctgggaacggaacgtggagagctgttctttcatcatatcagtccgtaacttggctacattttctcctagtaaccggtactgatcctgtttttgatgtatagagaattaaaagcccaaattcaatcaaatctgattcgagagaaaacaatgaaattgggtttaggatcaataccctagcagctgcggccttttgtaatcctccaattcctggtcgtcgtcgcatctttcaccgttttctgatctttgaatttctcttccggttgggggaacttataatatgatgaagaattggattttgagaagacgaaatattt

SEQ ID NO: 30697 - DNA, 3227 bp, Arabidopsis thaliana landsberg
taaacatacacatagtcacaaactagtcttttaagacaaaaaaaaaaaggttataaccaatattttacatattattaatttattttcttgcttcaaacataatctataaaaagttaatttaaaaaccacccttagtcaaagtatatagactacataatgataagttgtcgttaactaaaagttagttaaaactgatgtgagaaaaagttaaagcaaaaatttcttaatacataaagcacaactatattctagactctactagatgtgaatgattagtcacataacttatataaagcctaaattttagcacatatataagacaaaaaaataacacattattcaactaatgacaaccttcacttcattgcacacgacatcgttttccttctgtaaatcaatcttatcatcaccactgtttttctcctctctgcttttcccccacagcacacagtaaagtcctatgatcaataataatccacctacaatactacaaaagtgtacacatgtataagtttaattttttgaatagataagaaaaacgaaatattaaagaagatttgtttagaaccttccaagactgatgatctcgcacaagagaatcgctgaagagaggagagtgaagaggagagacaaaggagtaaacattgataagaagacaggtcctctcttttctataacccatgattgcaaataatatgctacgcctgttacaatgaatccctgcatatatatgtcacgtttctactattaatatgagattatttatattatatatggaaataatattatgaaatggattagagctaattatttacgcagtaaatgactgcaacgagtcttaggttccaaccaagcttccatgctgaaatatctctctctaaagcaatcgcgatgacgaatgattgaatggaactcaatagacaatgaagagttgtgaaatatagcttcgaaggataaaccttcaacacacgaccctggttgttaaatatgaaacaaaactcgttaataacaataggtttatcacaattactcaaattagcataattaagatagtgaatactcaataatgtgtggagcaatttgaatacctgtaaaacgagccagagaccccatagaatgttggaggttatcatgaggacacatcctttgagccacgaggtggaaccgccggagacgtggccgggattattccggtgaggatgttcttggccgtggtaaaaatgagggcataaaggtaatttcagtaatggacctttgtaaatagctaagataattacccctcccatgcacacagtaatccccacaagctttgctgttccttgtatgctcttaaccttaagcctctccattctttgatttaataaacaataaataaatattagaacgagtaattaggtattagttaaaacttgtcatacaaatatataaacttgtcatattagtaagttatacccaaataaaagagccaagaagaatgtgatggccggaagggaagctgttgtggcggcggctaaagttgccgacgtgtatgataatgcgataccgtttaagtccaagctcaatgtcacactgaaatcccaatatatatagataaagctttattgattattattagttcaacatagataaaatttaactgattatagtatactagtataagtatagcatacatacccaaataaagagagcatgaagatcttgatgaaggtcacaaatgaaagaggtggagcacttttcctaaagaaaaaaggagagaatacaattaacataaataaaaattaacgtttacaatattaatatatttgcatatatgtaccgctcaaagaagaaagccagaggagccaagaagatggtagcgaaagcttgacgatagaaaacaaagacgaaagtgttcattccaccattgaagacggctttggagatcaagaacatgattgtatatatgacttgtattatagtaaccatcagatatggtttcttcgactccatgtccatctaccgatttgatgatgtttggttttggttttgttttgaattcacggagatatataaattgtagggttgttctttctctctctgataatctaatgttcttcttttgagttagaataagaaattctaagtgggttatttatataagtacagacacaagcacgcaaaaattggatattttactacggtggtattacaaagtaatggactaaatattttaaaagtacgtaactaagagtggaggatgaaaaaaagacattacttttgtgtcacaatctcactataccaaccaaattacattatttttgatgttgacctcaagaaaatttctcgttccgtccatttatccccacgcctactagatttactttactgtatggtgtgatttatagttacattttgaactcatagatttgaagaaaataaacatcatttaacgaaagtaactttcgtaaagagaaacatgtggacacagtggttttgattggacaaaataacgttcattgctctgttggaattactaattcagttgaatcacaaattaagtgcaatagttagacagttatggaagtttaacgattaactaagaccatcgttagtgaaatttttacaccatttgcaaaaaaactaaaaccaaaattagattgttattataattcttgttgttaattgtataataataaactaaacataaatcagggttttcatagttttacaaaacaattattttcgcaaacctatataagcttggttgtttataacttatcgagtctctcttgttccactcacactctcaaactaaacatgttccaaacacatgtaatctatatatatgtcactccgaattgctcatagcaaaataaaaatgtttctccgatataaaatatataactagatagagtgttgtcacacacccttttttctggacggttcgtggaaaccatgaccgtgtctaacgtaacgtccacaattgatttttcaaaaaaggttcaaaattgatacgtaatttgattggtttgttatacaattcaagcacttgactagttgatatgtatataatgtaacagttaaagttttatgatgctttttattttgtgcctgttggttgaatattttggctttctagactctatcatgatccatattccataacaatagaagcttaaaaaataagttgtcccttcggagatatctgataaaattaaagaagcctacaaataaattaataattatcg

SEQ ID NO: 30698 - DNA, 4775 bp, Arabidopsis thaliana landsberg
  unsure (1)..(4775): unsure at all n locations
cgaatgaaaccgagggccgactgaatcgctaaccacaggtagcttcgccgcacttttacatattttctcgaagcctacacctaacaatacctctgaggtttatatgactgactctactgtcaaacacaaaagggatacacactaactagacaaggcaaaagcatgggtaaaatgggatggagacaagtggaagagaaagcacaagggccgaagatggtatcaacaaggacaatggagacagagtcaggagtcgtctcatcagacaatgacacatctgctcatgcaggaaaagatagccgtgtattcaaaagagaggtatatccgataatgatgtatcactatcgagtctgctctgacttacttatgaattcatgaaagcgtgtaccttcttactctttctgaggttagataacggcaagcatcagtgaagaagggagtgattctcattacctaaaagaaggatttgtaagcatagctcccatatttgtctatttatatcatctccactcatccaaacttcaaaaagaaacaaaaattcttttaaactactgcagattacggtgacgccgcttggagctctatctcagactgatgtggattgccaaaactactacaaagaatggcttcccaagattaccaaccagtcatgctcctcctcatccctctgatgctacaacatgagagaaaataaaaactctattaggaaattacccattgtggaccacaatttgtggtagacctattattatatcagtaccagttctttagttttcttaagtcttgacttactattgttatgagcagcaaaatcgttgttgttacaagtccattaatcatcgtcatttaaatctttgatattgagaccgcgacatatgttgaaatatcaaggatttgtttacaacataattcttaacaaaagcgatcaatctatttgtatataatttgtgcattagagaattgagttaacgtaaacaaagttcaagcgctggcggcaggacctggtattgcaataacatcatcatgtgtgcaagtgggtgattagtaatcttcttcttgcataatccttgttttatacttcaagctatgacctatatatttattatttatacatccgattcgaatattaagtttgctcccgtgaattagaaggaagagtatatgatatatatgtcacgtgataattatttttcatctttacgtttctcatatgggtctcattcgacgactttccaagtcggactatatgtgtttttaattattaatcatatatagagacgctcctacaaacacacataaacatataggtgcatgcatataaatgtaaatgtattgttgtcgtctacttcaataacaactccatcaatgaacacatcaatacttgccatactttttctcatacaatgtgttttcactcttggtcttcatttccacccacttgatcccttaactccccaagaaatcaacaaaacaagctttatcgtcaagaaatctcatctaggcaacctcaaagatctcacatttcattatctcgacctcgaagaaccaaacaagagccacgtcctccaatggctatcaccaaatccctccaagaaaccaccacccccacgtcgtcgctcattcgtcgtggttcgagccggtggtcaaacctacgagctcatcatcgacctaatcactagcaagatcgcatcctcccgcatctacacaggccatggcttcccttcattcacattcatagagcttttcaaagcaagcaagcttcctctaacttacccacctttcaagaaatcgattctcgatcgatccctaaacatctccgaggtttcttgcatccctttcaccgttggttggtacggagaaaccaccacgagacgcgaactcaaagcctcttgcttttatagagacggatcagtcaacgtcttcacaagacccatcgaaggaatcaccataactatagatgttgactcaatgcaagtcgtgaagtactccgacagatttcgaaagcctctccctgaaaaagaaggtaacgactttagaacaaaacacaaacccttcccgttctcttgcaacgtctccgacacaggcttcaagatactcggcaatagagtcaagtgggcaaactggaaattccacgtcggatttaccgcaagagcgggagtaactatatcgacggcttcggttcttgacccgagaaccaaaaggtttcgacgagtgatgtatagagggcacgtgtcagagacttttgttccgtacatggacccaacctacgaatggtactaccgtacgttcatggacattggagagttcggtttcgggagatccgccgtgaatctgcagccactcatcgactgcccgnnnnnnnnnnnnnnnnnnnnnnnacacgtggccggaccagatgggacagctcagaagatgaccaatgtcatgtgtgtattcgagaaaaacggttacggtgcttcttttagacacaccgagattaatgttccaggacaagtggtaaacttacaaaatacagattactaaatgatttgtttacgtttctaggaactttgattagttactttaattaatttttgcagataactagtggggaagctgaaataagtttagtggttagaatggtggccacacttggaaactatgattacatagtggattgggaatttaaaaagaatggagccatcagagttggggtactgtttacttcatgttctctttaatatagtatttaactttttggattgatacaattgttttgaaatccagaccaacctggccagttttgacctgtaaagattctttaatatatgttatagttttttcaagtaaactcagtttgattttcgtttgagagttggggtatagtttatatatttgcatgtatttaattttctatacataataaagtattcaagtatatcaatcttattatatatgtaggtggatttgactggagttttagaagtaaaagcgacatcatacacttccaacgagcaaataacagagaacgtttacggtaccctggtggcgaagaacaccatcgccgtaaaccacgaccattacctaacgtactacttggacctcgacgttgacggtaacggcaattccttggtgaaagccaaactcaaaacggtaagagtaacggacgttaacaaaacgtcttctcggaggaagagttactggacggtcgttaaagagacggcgaaaacggaagctgacggtagagttcgactcggctcggagccggttgagctgttaatagtaaacccgaacaagaagacgaaaataggaaatacagttggttaccggctgataccggaacatttaccagccacttcgcttttaaccgatgatgattaccccgagataagagccggttacacgaaatatccggtttgggtgaccgcctatgaccggtccgagagatgggccggtgggttttatagtgataggagccgtggcgatgacggtttagctgtatggagtagtaggtaattaagtcaaattaattaatctaaagttttcaattatttatcatagtaaataatttttttttttttggtttataaaggaataaatttgtggtttgttttatgggaacaggaacagagagatagagaacaaagacatagtgatgtggtacaacgttgggtttcatcacattccataccaagaggattttccggttatgccaactcttcacggtggttttactcttcggccttcaaatttcttcgataacgatcctttgattgggtaaatacggtcttagacaaacaaactgatggcttatgtattgattgacttatgttacgtcaaacatatgatcattgaaaaaacaatttttagccttgtgactaagttattaatttgattttgattattatgtcttaaatgtatcaatttcttatgttttgaatggtttagttaattagctttgatgctttttttggttcaatacttgtgattcacttatttctcaattttcaagttggtcgtgccatcggcaaaatcctctcattctaataccaaaatgtcgataaatttaatgaaatttggttaaattagaatcgacccacacggttgtatgagtttgttggtatcttttattattctaattattatgatttcttttttttttttaaatgaataagaagatgatttaattaaactatagtttaaaattttatctataacaatactatataatatatgagttgacccggctaaatgtgatattagtttttgtaatagtaaaaaacaataaaaatgtgaaaaatgataataatggcgataatattatataattaactaaaaatattttctattatttgttcctaaaataactttttaaataacatttaactgtaacaaatttttaaatttactcaattttatcgtaaaaatagaaaaatagcacattgtacggatcctaatcaaactatactttgttttttttgtgtgtatgtgaaaatcatggttttaagttcgttaaattcgcatactttccagatgtccggttcaaccgatctaaccgaaaccatgcaagaccgaaatgggctttaaagcccagtgcactaatcaatgaaagtagaggaacgagagtttttctgaactctgttaaatttcgtttgcgtcttctttccattctctgaattccttccatatctctctctgtgtgtcttctacaaagaccagatctctcatctgtgttttgttggtttatctcgaccaaagcccacacgtcacgttacgttaggttacaaaactagtttttt

SEQ ID NO: 30699 - DNA, 1730 bp, Arabidopsis thaliana landsberg
taaaatttttaaaagaaaacgggataactcaaaggttgtcaacgtgtattgtagggtttcccttacttcaaatgtttattagaacatagaatataagcaatcctatccactgtggctaccaaaaatattggatacggacatcggatattgcacatacagcaaataggccgagaagcagaattgttgtgttgcaaactaatatcaacctcaccaattttgtaagtttgaccagccttataatattgatctgggccaagtaagcaattaatatgaagcgtggtgcagcaatctttgcaattatagaacccttcttttcctccaattgataactttccctcacataattcacaccaatctgagtcactcacctcatctccatgacaaaatgtgaggtaatgttcgtcatgcttgtaccttaccatgtatggtaaggttgcgcattcaaaacatataataaagtcacattcaatgcagttaagtaccttcttatctttcgttgacttgcaaatgtggcacattggcgtatcttttgggtctaacgataggaataagggatgtcgatggccttgataattgaacggctcagcagtcgaggcacacactgcatctagtatgtagtaacaagttcggctagtacaatcatatccgaaaccattactcttacgcatacaagcactgcattggaataaagcgtctccatgatcaacctttagtgtaaggggatggggatgtaatggatggacttttttacgtggagcatatgcacatgtttcgtgtaggatgaaatcacattccacacaaacataaacatttccttcgttgattggaaggacacacgcttgacaaaatttgtttccaacgtaaactccatttctgtcaaatttcagatgatggtcatgagaatagtggaatattactccattagctatcttcctgaaggactcaacgtcttctaattcttctggtacttccgcgagttctttaccatcccatatatccttacgtaatgcacatcttacgtgaacgacatagtcactacacacattgcaagtgtatgcaccataatcactatcaatactttgacgacatattgtacaagaacaatctctagattgaagagacgaaatgtaggagagacgatgggggtgacgtgatatcttgattatgcgtggagaatacatacaatctttatgggctacaaagttgcatatggcacatatgtatgtggaataaagttttcttaacaaaccacaaacgttgcaggttaaagaattttgtctaggaaagaaaatgagaggatgatcatacctttttggttggtttataaccataggtatcgtcttcatcgcacatattggatgcatgagaactctacatatggaacaataatatacctgacctgatgctattcttccacaacataaacactcaatattgtgagcaaaaggaggatgaatgtaacattcgagagagtgctcagggtggaaagggtgttttattttaagtggagactcgacacattctttgtgaaacatttgattacagttacagaaataataatcagtgccaaaatatgagccattgcatgcactgcatccaccattgacatcaaattctttattgttgcaccaaaacaaagggagtacaaaatgatcatcatgaacatatttaattctaacgataatttatgatagaaccgaatgggacattggtaattgaagagaatgtta

SEQ ID NO: 30700 - DNA, 2415 bp, Arabidopsis thaliana landsberg
agttttaaaaggtttctgatcatctaattaggacagaatgagcaatggttgtatagcttagttgctttatggtatctttcaacaagttctatgtgggagtgacaaattgtgcttaccttgttctttaggaatgcgtggcaaaaactttggaaacatgagtcaagaagaggcaatggagcagtatcttgcacttgtctcaaaggtcatcccaggtttgacgaaagctggtcatactgtgagttgtttgatcttgagggtttgaatatcacctggatgttttaatggcttttgaggtctgagaaacttttgactttgctctctcaacaggtagggaagatgtcagaaatggaaacctctgttggcttgcctccgaattcaggatcattagaagatccgaccaacttagtcacaactggtgttgatgaatccagcaaaaatgatattccctaagagtatgatgtctttttgtcagagatttcttgtatgtttccttccagcacccagttatatggttctttttctaactgcaagctaacttgtcttagaaatagtttcaggggagaggtgaatccagtgcttaagcaggcaaggcttgaaggaggacttagggataacaaaggcaaatctattcttttgcatataagtatttttttaggtgcatctggaaaccaaaacacttaaatatatgtatacatatgtgcgcgaggactggttgatttctagtgcattgattatgcaaagacctatgatttatgaatcaagcaagggtagttatatgaatatgctcttagtagttgtctttggtttgtttccacgtaccagcctacctttggaaataagcaagctttcttacttgcaagaaagagagttgagataagtccatgtgaagccttctcccagcttatggaaccatatggagtacaaatacactccaactgcaaaacacagaatctggtatttccattagcctgtaaagctctttgtccttatgacactgcaccattgtccaatatctttccattacaacttgtaacgatatttaaaaattgaaaactattcccaaaagagtagagtttacaagactaaagatggaattaaaaaaaagaacagaaaaagatggtaccgcttttatttcatttagacaacaaagaactgagattttgggagaaacataaacatgaaaccagagtaaacaaacatccaagtatgttttggaatcaaggtacgatcttgaacgccttgtacttgtcaatccaagagataaaagagttgttggagttcctgaaaccaaggaagccatattccttactcttgttcatactatcaatcattccttcaactccaagtataacatcagcaaaccaccacacaccaacttcctcaagcttcttctcttgcaattgattctccttaaccatctcctcccacactctctctttccctttcatcatctccaccaaccccaaattcttcccttcctcaaatccatactcctcaatcccaaactgctcagctagaatcttccacagatgcttccacttgaagatatcagcattgttgcagttaaacgcctcgttcttcgcatacggatcaaccgccgcccaaatctgctgctccgcaatcaaatccgcgtcagaagccgtcatgaacccttcccaagctttcttgctcccaggaaacaacaacggagacccttcatgcttacatatcgctgcatagacacagagagtcccaacaatgttcatcaaactataaggagagaacccaaagatcatgtttggtctgtggatagaccacgtcacggtttctatcttcttgatctcttcaaacagaatatcctcttgggtataatagaaattctggatctgcaatctcggcatatcctcagtgaacggtggatcgtgacgaggtccgtcaacgttggtgaaagggccaaggtagtgctttgtccctgtctggagacaaacatgtcggagatttggcgcgtatgggataatcgcttggagaacgttacggagcattgagccatttgcttcacagttttcactttccgattcacgattggtccaggtgacgtagaagacatgtgtgacatcggttaaaggggaaagcttggatcttgtgtcttcggcgtcggagacatcgcactggatgtaatcgatcggatgatcggcgttccaggtaggacgaggacgacgagcgacgccgtagactttccatggaccaccgggtgtgtcggaaagagggagaatctccgccaagctgtttccgacgattccagtaacgccgatgatgagagcgacgctctcgaagctttgtgatggttcatcttcgtcgagtttcttctgcgagtacacaaattaaagagatgattttcaatcagttgaagatgaagatcggaggatatgatttgaa

SEQ ID NO: 30701 - DNA, 3273 bp, Arabidopsis thaliana landsberg
tgacgaagaggaacaaataaaagcaagtaccagtttttcagctgcgaagatgtaataacctccgaaccctgcaaaatcatgtaatcaacgagggcatcgttcgtaatacgtggttggaaattaaaaagagtagaattcttgaactcaccttttgacttattttatcagcccataactgtctcgaagctgaattccgctgcaaatcaggttcttcagcaagcgccttctcaatcatccccatttgatcagcattcataatactacgcttccgtttcttcttctgcttctcaaagacaaggaaggtttcagatttctcatcctccttcacctctcctgatgcactgcctttaaatcgcttgctcatattctgaaccaactctccctcttcaaccagacccttccctctgttagagcttgtatctgaaccactggtttcaagattgctagcatctgcatcgctctctttcaaccgttcaactgtgtctatctcctcgttcacgccttgctttgtcatcacaccttcaactcggacatcacaatcctctgaagcttcctcattgttaaggttcagaagctcttttagcttaccagataaattcccgcccctaccttcaatatcctagtacaacataacatttgaagcttagcaaaagatctgtcttttgtagaaaatcaacatacgatggacatgagtaaaaccttgttacacctacttgtatcagtgtaactaaacagataagccagagaattgtaaaaccaatgtataagagagcaaaaagctttttcaccttcatctgtacttgactttcctcaaactcggaatggattaacggctgtaactggtcacaaaacaccctgcagaagacaatataccggaaaaaagtaatatcaacggctacataaaatagtacagctcgagaactacaaaactttaatgtagtcataggtgaaaagtagaataactgaagaggctttatgttacctcaaaagcagaaaatcttcctcattgagggaactagggatcaaggattctgcatggcgcaacagagaacctacatatacaaatatccattaaaacgaaatcagcaaaacatgtgtatataagaaataatatatgtgtctcgggatagagatacatacctaggtttctgcaaacaccagtgcctctctgtgccacaggagtatatgaagagcctggtaacatcttaatcaatatgcttgaaggatcttttcgcaatccactcataacattctgaatgaaacggttcctatcctgttctgcagatattaacagcgaatacacttagtaactaacaaacgaaggcaaactaccaatatgatacaggaaaatgcagaagatagtggcaggcaaaaaagtcaccttggcagacgttgggaacgaaacagtgaagattcgcaatcattttaataaataaggatgttcgttgatgtgcatatgaagacatggtaaggttattttgtaaactgagcttgaattgaggtgtgactgattgcccagaaggtgaaaatacacttagaatccatccggctgacttaaacagatcgtaatcaacattcgcatcatcctcccttgaagaaagatcagaagagcacaacattgacaagaaatctccatgagagagacaccataccgcgctgagaaccatgctctggagaaaaattaaacatccgtcacacaacaaattacagaatttcagtaacgcaattaatttataaccataccgacgacagctcataaattgtatgaatcatatgtgccaaaacaataaataaaacaagagactttggcagaggcaggaataatttgatacttacaaaatgttcagtgaaaaaagatcgaaaatttgagtcatcagtgagcacgtcagccaagcgcatagcgttaagtagcacaaaacccattgggtagtcaggagaagcagtagccatggaagctttagaaaggccaagcctcaataatttaagaacctatattacagatatatcatcactgaataggtcaacactaacttcacatggataaactatcctggagagaaatgaggaacagaaaagtacaaaatgtcaatttaacaacatatgccatttaggaaactgtaggtttagactctagagcagagctgattatcacttagccaacacgagctttttgcagtgaggtttgttctatgactagttacaacgtatcaaaacaaataagattgtcaatttgtatggaatctttataaatagaagcgtcactcagtggtaaacctttcgaatcaagaaggaaaaagtcctatcgattttagagcagagaccctaattagaactaacctctgaggcaacagttttggctaaatgcaagtttcctgcatttgcaacctcgtcaaggaatgagacactttccgcttcaaacagatgctgcaactgcaggcacatgaactttggtatgagttgcagatagtaagtagagaaaatttttgctaaatttcaatagacttacaattgaaagaacttttgctttcattctagatgtggaagctatagttacggttgcaccaacaaattcaggtgtaatagctagtgatagtatggattgagctagcctaagaacgccaccttttccacatagctcctgagagaaaataccagaaaacataattctgagagtcgtcctccataaaatcatgaattaagcaaaacgaattattaacaactcgtgattaatgtacaaacaccaagcaatagagaaaccttgtttttagcgacacgttctctaaagggtttgtgttggcatagagaatgaaggaactgcaaagcagcttcagcttgttggcagtggaagttaacctcctctacagaacttgcgcctaacttttttggggagtcagtttgtctatacagcaacttcgctttcaaagatatcacaacattgagaacagctccaaaagcactgtctataaacacatcaacctagatgaaaaaaaaaacaagaatcagatcaaactaatcccaaggcagcagaaacccagatcccaaagcataagcgtaattttcttaatatattttcctcacattggcatttcaaacacattatgataaggtcatagtttcatacccttgggtgtgcaagcaagacgagaacaagatcttgggagttaggagagataaacccgtgaaacaggtggagacaagaagccaccaatgtagcctctaataacgattctttattcgaattacagctttcctggaaacaagcaacagacataa

SEQ ID NO: 30702 - DNA, 4258 bp, Arabidopsis thaliana landsberg
  unsure (1)..(4258): unsure at all n locations
cttgcatgcctgcaggtcagactctagaggatccccgtattgtttgtcaaacacactaaccatgtggccaacattttaaactaggaggtctccatcttgatatatgtctaagagattattatccattctcttaaaatgggtgtctagtagatttgggcaagtataaaggcctgccggtcgttttctctatattaagttgttaatcgtttactataccataaattgagttttattaattatattgattattgaatttgattgtttagtactttagttatatcgagtgagtttttcttttatttttaaagaaaacaaaaaacatggaaagttatattaattatatcgagtgagaactctggctactctatttcaactaatattatatatgaaaaatagaaagaaataatttaaaaccaataaaatatgaattccatatatacatatagtagttttaagtaaatatatctacagcacattccttatattttttggtccatttgtaatgtaactattgatctttacacatatagtagtccaataatagacagtaagggagatgatatgtcgaatctgcaactttaataaagacgaaactttttgtatatttttggctggggaaaaaaaatgtgaaaacaactcattcgatttattcggctattttttttttgaaaaatatgtgttcgctagcattatcggtcgacaattttaaaaatttaaggttacatgggatttgagtttcttacccaaaaatatattctatacatgtatgaacttgcttcattatgatgaattggtatagcctaatgtattcaacatttattattgtaattttttcttcttgaaataaaatgaatttaaataataattacattattaattactatgttttaagttttctgatctgtgatgaaaggatgatatagtatatttgcttgtaatcggggctttgtttgtgttcaagcgaagatcgtttcccatgaaacgaggaaatcaagttttgaaatttagattaacaaaaaatcagaatgccaaaagaaagcgagaaaaaaatattaaaaaacacatagtattaacttttctttgtgacattaatgttttcatcatatatacaacacgtatcaagatgttagtttaatataaaagcttcattaccattcttattagtattttttgtatgattctttttttttgtttcctttactttctttgttctttattttattcttttgctttaaattcacactaattttccttcgctttagttaccactgtatctgtgtatagccttacccttatcatacactaaaactgcgcctggggcgtaatttagcagcaagaggattagccatctcacacgagagcctcagtttctcggacaagtcaacggtcttctcatcggacggcgtcacgattcaaactcatgcaaaagcgtcgcagtccaaaacgtcacggtggtcaaaccaagattcttcccggggcaaacccgacgaccggacccgaacggtgcaagcctcaaatcagacccaagaaccgagaactcaacctcaccttccttggctacaaaacgttcgggtttaaactccatctgattctcttacacgtgtggatcgtgtgcaatagcccacatgttcaccattgcggtggtccccgccggaacacgacgaccgtcgatgatcgtgtctgtgattgctaaacgggcccatgagagtagtgggcctggcgggtgaagcctcaagacttctttcaccacagccgttagatatactagagacaccacgtcagactcttcgacagcccttgatcgtcccacnnnnnnnnnnnnnnnnnnnnnnnnnnnnnnnngaatatctggatgaaggaccatcctagcaagaatccactcgatcaaaacagccaccgtgtcagttcctctgaatatcatttcctgttgttattaaaacccaaaattgccaatactttagttacttaaaatggcatatttaattatccaaaaatcatagtataaatgtaattaaacgcatacagtacaataaatatgaatttttgtaagttttttcttcagtacaaaagtaaaaatacaagccacgtgtacatacccatagaacggcgatgatatcagggtcggataatttatcaggaccatcgagagagagcaatacgtcaacgaagtcactcggtgagtcacgagtttgttcacggtggtcagagataatccggttcacaaaccggtttacttttgggacgagattagagcatctagaccggattctttgaggatcaaattcagagagccatgggagatgatcggtccaattcagtgtaccgagtaaatcataaccttcttccaccaattcacgtagctcactcacttcttcatgctcttcctcaagctcgtattcttttccgaaaacagagcacatcatgttattaagcgatgccgttttgatcaagtcacgtgcgaaacagagacctttggtgttactctgttttgtgagacacttcacgatttgattcgcgatcacgcttctctgcgtttcggaacgtttaatctgtttcgggctgaaaagatgattagacgcgatttttctcaaggttcgccagtaaacgccgtaaggagcgaaaccgatagcacggttaaacatgagggaataagctgattccttaaccgggcggtcagcgaaaaccggactgtttagaatctctttagctacatcaggattgcacgtgacgatcacgcgagtttctcccaaactaaacgccattaaccgttcggctctaaatttctctgcggttgcggctatgcaacggtgagccagagtgtttgacatgagagacatgcttccgacaaaaggtaagcctcttggcccgggtatcacggtggtttgacggcggcggtggaggaagtactttccccatgcgggtcctccgggatgagaccagaagaagagagaaagagcgagagaagctagggaggctacgaggagagagagagcaagattggtttgagtaaggaggctacatttggacaagagggccaaaagtaagctactggtgtcgagcttggtggccatggatgcagaggaacaagagagagagagaaaggagagtggctttttgctgtggggtttaagacgaaaggcttcaggtatttatatagaaaaaaacattagaagcccctcttgttagtttttgtaattagttcaaaaactatattatatttcatttataataggtattattattatataactgagagagtgaaggaaatgttgttttttatattaaacactatattttttgtgtgtatttcattcttcttaccttaatattgtacttttaacttgatacacttgggcaagtttgaatttgcttgcttccttgttgtaacataaaatttgaacttgtagtttttctccgaaaaaaagtttttaaaacctttatttatttgaagtttaccgaaaatcttgtattattatgtgggttctgataattattttatttgattaaacataaaccaaatttatttcaggatattttttaaaaaaagcaaggccttgcagccacaagaaaaaaagttgattaaatgcaatgaattaatatgctctttattcaccaatctagtagacaaatacacatcaaatataaaagtgcaaaaattaaaagtgattaagatttcggaccacttacaaaacatatctttttataaaacgaaacgtaagctccgggaattttttttttcataccatgagatggatttgaatgtaaaattaatcttcatttcgaaaaattattgacaaagtcagttacaaagttaaaaacgtaagatcaagaggtgtaaatgcaatggcagtaatgcatatagcaattaacataacttctcgtggccgttaaataaaactgatgaaacttgatagacccactattgtgaattcattgaatttgttaattgtaatcgtagttagctgatttaactggtaaactatatatctatattcgtaaatttttgtaaaaatgtcttttattatagatttaacgtcatagctttgttatggaattaattccaactgagagtactgttaaaacttaaaaacaacggttacttttacttgcagtgcatatgcgttagtctcggtgcagttaagtacatattcgatcacagcatacgacatcaagttctaatattttaaaacttgatgattattttataagaaaaaataattgatttaatctgtatgctgcacggttgcaggcttgcagc

SEQ ID NO: 30703 - DNA, 1701 bp, Arabidopsis thaliana landsberg
  unsure (1)..(1701): unsure at all n locations
tggctgaagcgcctcaatatattacgaagaactcgaaagatatccgacaccgtgtgttcttttagcgttttccagcttacatttaagaacatcagaacctaaaaaacattgatctagacttccaaatccagtttcagaagctacagcaggaattgggcaactgtagataactgctaaccgcaaacattcacaaagcaaacgaatgaactcatcccattgacttccctaggaaaaacaaatgagtgagtatgagagctggaagaatacaacattctaaaatcccgagtgaggcagatgtaacatacagattcaacaagacaaccggatacatccacaagaatgttgccagccaaatgtttaacatgcacattctccatacccaacaaaccaacctgacagagaaaccagatcaagctaaggatcatagacaactctacctaacagcagaatgagaaacttacaagatcagccacaactctttctaaacataaatactctatagagtctggaccatataaagcatcagcagtttcatcatgatcaacaacagtctcctctcccgattcctgttgaaaattttagctaatcaaatagctccaatactcatcaaccaacttatacaatcttaaaatattaggaactcttaaagcaatgaactcaccaccgccttatcacatgaaatttcgctcctccaagattgaatttctctcaacacctaatcaaagtaaaaataaaaaaatccaatttaagaggaccggagcttcgaggattaacacacaggaagcaaacaattcatcgacaatgatgaacctgagatagagaaagaagcagatctttttccgtttccttcgtcagcaaagttacttcttctcttgcctacatgactccgagaaccaattgcgtttatacaattacacatagttacaataactcataacgaaacgtagaacaagagctgaagaataatacttacagggaattggcgaacacaaggatcgatcaagagatgaagacgagaagccaagtttccggtagccattttacaacgacgacagttcactctcgccggggatcaataaactcttattaaaacgtagcgtttttgttatgacgagagnnnnnnnnnnnnnnnnngtattgtttgtagagacaggttagattaaactttaaagtcaaacacggcgtttaaaaggtgagttcaaatgaaacgcatcgtttcgaaacttcgctttatagagagaatgtgaattgccgccctgcgaacaagctgaaacgaagtagcttcttccgttgtacaacttttggcactaaaactggcgcgttagctccacgctctcctcctcaccgtagacgccgctgccgagtatccgtacgcaaataacaacctcatatcgatgtacgtgaggagtaggtcgatggaacaagcacggtaagcgtatgacaaaatgcctgacagaaacattgccactcgatacggaatattcccggaccccacagcatacaagtgtatgcgtctaggccaaaaacccatgtggcgcatgaggacgtgaagaccattagaggaactcaaagtagctaagtgctggactggagaaagttgtcatgggagcaaaactggattactggattctaaagcttggatactggaatatgatggagaggtactcctaggtgaggggacttacaaactacgaggacaat

SEQ ID NO: 30704 - DNA, 2371 bp, Arabidopsis thaliana landsberg
tagccgtcacgtggggtcaccaagactcctcatcctgcctttcggctctaatatcgggctcttgcgccgctgaccacggcagccgctgtttcctggccgcctgctcagagcaccatctactcgggggcgaaggaatcgctggaagagcttttgctaccaagaaacagtgtttcgcaacagatgttgccatcttcagcaagtggagctaccctctctcccactacgccaggatgttcgacctccacgctgctcttgccgtccctatcctgacaagaggcaaccgcaccgtccaatttgttctcgagctcttcttcccgagagactgtcttgacatccaaactcatagtctgaccctcgcctcccaactcaagctacgcttccagagctcaccacatctgatggtagacgacaaccaaattgcagaggaagtgagagacgcagccacaccacccctgacacaagaggatcccaagggcaaacaagtgtcgttttccttttcttctgcttcctctctcgagaaccgaaaacgcaagacaaaggctgaaaaggatatcactttggacactctccgacaacactttgctggcagcctaaaggacgccgctaaaaacattggtggtgcgtcagagtttttataaaatttgaattgatatttacatattatgatgatgatgatgatcatgatggcattacatattgcagtatgtccgacgaccttgaagaggatatgcagacaaaacggaatctcaaggtggccatcgaggaagatcaagaaagttggacattctcttcgaaaactgcaggtggtgatggactctgttgaaggagttcaaggctctctccatctcgcctccttctactcaagtttccctcaactacaatcttcttcttcttcttcttttcctttcattaacccaacccaaactgtccatgtgcctccaaagtcaccaccttcgtcatctggcagccagagctcgtcaggttcaagcacttgttgctcctccgaagagcaacaacttggtggcttccaaaaaccagctctcagtcatccacaactgcttactctaagcagcatgcacgaggaccaaaggcctgttcgtgtgacctcatccctacccccactgccatccgcaactactccaaggaaagcaaaggacgggatgaaagtgaaggctatgtttggagattcgatgctgagaatgagcctgcttccacactctcgtctcacagacctcagaagagagatcgcaaagcggtttgggatggatgatgttttgagaagtaacttcagtctcaagtatctagacgatgatcaagaatgggttctcttgacgtgcgatgctgatcttgaggagtgcatacaagtctacaagtcctcctctcttaaagaaactatcagaatattggttcaccatcctctttctcgtccttcctttggttcttaactatatcctaaaaccttttggctaattccaccatcgtcaccacatctatttattttggcttggtttgtatatctttttaacatatgcaacatacttgtttgatctaaatgtattcgttagttgttgacttcttgtgatcccatcttttcccccttcaaaaactatataagatactagctttcattgaggctattatgattttgtaagaaacattatctataataatctacagttgcattgcatcttcagtttcttttctgtttttgttctttagctataaactctttaatttttcatgtttttcctaaaccttttttactcgagttaagaaagtgtaccaacatgccatactttgggccatgggcctatcacttaactttcatacaaaggacatccagtgatcactatttgagtttttgacattgtgtgatacatttgaaggaaaggagtaatgtttaaggttgagttaacatgtaagagagtctgtggagttactcagttcagtagggaagaggaagcttcgtctgtctgctgctgctcgatgtccaagttcagctgcggcgggccagctaaactcagtatgacctgaaattcacaacaagtgcctaatcaatcacccatcttactgtcatataagtagatgctagcagataaatccagcttaacttccaggtaagaaaccgagcccatgcaagaagccgattataaccaaagccaagtacatttggcagtaatacacctgtttgcaccaatacatatccatttgaatcaactcaaacaagaggaccaagatctgctcatggcatcggatttgggtatccttaccacacatatctcagatcttgcaaagccaagcacgatcactccaacaagttttgtgagagtaatcccactgtccccaacaacatattttcattatcaagtcc

SEQ ID NO: 30705 - DNA, 2974 bp, Arabidopsis thaliana landsberg
ttatgccacatgataggaaaatccatcagagaaggatatgatttatggaactcttgtgatttttaatgtggacgcgacagtatcgaatgatgagctccttcagctgtttggtgcctatggtgaaataagagaggtaatttaacttgtgcgttcaaatgtgcatatgctatgtctaagagattcttctctttgtttggtacataatgtaacatatcacctgcttattgattcttgacttgtaaatgcagattagagaaaccccaaacaggcgattccacaggttcattgagtactatgatgttagagatgcagagacagccttgaaagcactgaatagaagcgagataggtggaaaatgtataaagctcgaacttagtcgtcctggaggggctcgtcgactgtgagttttctgcactttgtatatgtcaaagaattgagttatcttgcatacactgtgaacggaaactttttgtatgcaggtcggtcccgtcacaaagtcaagatttggagagaaccgaagttacaaatttctacaatcaagtaggttcacatgttgctaattctccaccaggtaatctcatattgatcatttcttttatcaactttttctctcgattggttagcatgccttttccgtaattcattcaatctacttaataggtaactggccaattggtagcccagtgaagggctctccttcgcatgcctttacgaggccacatggtctaggaatggtcaggccagttaactcagacaatatgccaggactggcttcaattcttcctgctcatccttctagctttcatggattttcaccagtcagtaatgaccaagggctattgaatcattcaaaccaaactattctgaataagggattgatgcacaacatttcctatgggcaacctcattctttgccagagcatataacagggggaatttccaactccatgaggtttatagctccacactcctcaggattcgggacttcatctgatcaccgctatcgctggggaagccctcctcagcatatgaattatcctggttacactggagtgtcgtcgtcatcgtcatctactgaacgtcctttcactgtcaggcatggttttccatttgctgagaggcaggcttcattgcttggaaaataccagcatcatgtgggctctgctccctcaagcattcattttaatacacaaatgaattgctacacgggatcaccagagataccccttggatttagtgatatgggaatcaacagaaactataacagtgctcatggaaaagcaaaccttggtgttagtctaccggggaacagtagtgaacaggatttcactggctttggcatgtcttcaatgcctacagttcctttcggtgggagtagaggattacaatcagtaaggcctgaaccttttgctgagcagggtaggatacataaccacgagagtcacaatcagaatcagttcatagatggtgggagatatcatatcgacttggataggattgctagtggagatgaaatccgaactacattaatcatcaaaaacatcccaaacaagtaagcgttttattgatctcaatctaagatattcgagcaatgtttaaatttcaaatgctttgttttgtaaggtacacttacaagatgctggtggctgaaatcgacgaaaagcacaagggagactatgactttctatgcttgccgacagactttaaggtattatactataagagagagtgaactcatgatgcacttgtatgacctgagaacttactaacaatctagcttttttctggatacagaataaatgcaacatgggtcacgcttttatcaacatggtctctccattgcacatcgttcccttccaacaggtttctttaccttttctcttcagtattgtctttaaaacttctcttcactagtcatgaagttgactatgtattgtggatatggtaattatccgattcaatggcttgagattgttatagctaaaagatattcataatgtgtgtttctgcagactttcaatggtaaaatatgggagaaattcaacagtgggaaagttgcttcattggcatatgcagagatccaaggaaagtctgcccttgcgtcatacatgcagactccaagttctatgaaggaacaaaagcaattgtttccagaagtctcctaccatgatgatggtcaagacgccaatgatcacgtatgtttatccgatacaaaatctcatttttgtttttgtttttgatacatgatttcaaaatgcatatgcagtatcttcagatttttccaccgatttcaccttgtatctatgaatcatacaggagcaactgttttcaagcatttggaacataaccgcgcctgattcagattggtcttacacaatggatcttatcgaaaatccgagggagaacggtaactccaagaatgctgcagaagagtcctcttgaatccccactaaaactagtagttgggaactctaactcaccatcaaaggtaaactaagtgtacaggtctggcgcggttatggaagaaacagaatgtacagtattaaggcttgttttctccacggaacaaagtaaccagtttttagggattacttcactcgaagcaaccgattaaagaaacatccctattagtacattacgttgtatactttatattcggaaacttctctctatatcagtcatgtgtatataacatcctcttgcgtgtacattatcctttccatgtgaaagacatgatcagtatttagttgtacaacaggttcgttataagtttctgtctcaattagttatcattacaaaaccgttacacgtctctctctatgtagacatctatccatggtttcaatgacggatcagactcttcttcaacctttcctagccaaacccaccaccaaaggcttagcaacgaaatcggattcaggtattattctgcggcttttctctatacttctcgtcggagcaatctctttgtggc

SEQ ID NO: 30706 - DNA, 4532 bp, Arabidopsis thaliana landsberg
tgtgtaaatcagggtttaagcatactttccttaatatcaaagtctctttcatctgatatttatgatcataagaccggaaccggacccattcaagacgatcgtctagctaggtttggaggactaatagaaggttatgattagcttatcatcaaaaggtttaagtgcaaacatcagtataaagacacataatcatcaagcagaccaatcaatagatctttaggagatctcatataacactccgtctactttcctttagtcttacctcattctttaagaaagtctccatatagatgtttgtttgccttgtatcttttttattctagataatatcttgtacttctttccacctttgtttctgttatcttatagtcctctatttttatttttgtttccctttcttttacactccaagtttttgcatttctcgtcatctctccatcaatgtaattcttatcggacacatcatccatcatcaaagcaaaacaaaaactaatactatatatctataaatacacgagtccttttcacttggtagtattttattatgttgcttactaatttgcgactataacacttatcgtacttctaccctaaagtcagtggcatctcatatactttgcatttggatacggttttgcatggactttaggctattttccgccaaaatttaaatcaacccccaaataaatttggttaaattaaatgttcatcaatgtgcataatcataatcatgaaacataaaaatgttataggatagaaaatatacacccggaaatgagaaacaaaaatatcaaaaatgcagaagaagaaaaatagtaaagatgagtaaatattgggaagactgaacatttgaggaatcagaggtgaagacatcggacatccacgtcgataatggtgacggtgaggtttgtactgatccaccgccatctctccacccattcgctgccgatttttggctgtaacatattccaactttaatcagattatcagaataatagtgtataggactatatctttgttcttttataaaacataggactaaagcctaataattgatctgtgcttccccgtttcataatggtaggcctatggtacgtgttgtaataacctttttgttttccttttctttgatggaatgactattataaactcctttattacgtgtaaaaaaaaaaaaagtatcaacctctttttcttagcctggctcaagccaatcaccttactttgctagctaagctcgtcgtgtgcatttaccaaaaagcaagtgggaacaaataaaatgaaaacaaaaataaaataagttaacctacctaggcaaggaagggcaaaaagtgatggtgtaatcagcatcagtgcatgtgaacgtacttgtagcatcgtcgaacgcgtagctatatgatcttggacacgcagatttgaatatctccgagtacatcgatggtttacactcggtgggtgaggcgtacgcgccactacaacaatattctggactaccaaaagcctcacacgcgcttttgcatgctgacccggacccgaaccggagctccgttggacatttttggtttagatccgttacgcatcccgtggttaagcaagtaccttctgacccgccacttgcttccaccaacatgggaacgttgtaaccgtccacgaggcttacgtcgtagaagtcttgtttacgggccgggtctgctggacctgacccgattgtgaattcggcgagtgtagcgggcggttttgctcctgcaccgttacattcgacctggttagagccgcagtccccggttaggcaggtgccttgtcctgtgtctgagttgaagttgcaaccggttcgtgcccaaaaccgacctgaccagctagctggagcttggaacgaacgtgaaccaccgggaacgagctcgaagccggtggtgcctatatcgccgcttccggagttggacaaaattcccggccacacggtgaagctgcatcgatttacgatggttattgtagcaccatcacttcctaccaaatgcaatgctttagctatatgttaatatttacattttatatagaaatattcatactgatatgaaagtatgatagatatgaatattacgtaccatggaagaagaggaagctaaggatgatgaaatagaatgagacatgagaatgaaggactgttatgatcatcactgtttatttttgtctctctattaaaaaaaaaaagtatttttggtggagaaattaagtttggaatattcacaaaacgaaagaccaagagagaaaagaggaaaaagaaagaccaagagtagagtttaaagcacctctatatatacgttgtctcaagggtcaagctcaagatatgtgatgatctcacaaaagtattgaccaatttcttttatgttttaaagtgatacaagataaaacaacatcttgaaaagccatgttatcacgaatatattgattaaagtctttttccatataaaatctatagctttacagattatctgtttgaaatttttgcaaaagtcataagttttcgaaaataaattttgtggaaaataacaccgagtaatatatgcatgataggtggccaaattagctaaagagagtgcatattatggtaccatatctagataaactcggacaatctagataaactcggacagcaggaccattaatcttgaaagataaaaaactcatacattgaaaagaagaagtttaggttccttgatctctagaatgcaagtagtgcgtttacataatccatcaaaaactgcttaattaaactaatcttgatattcgagtaaaacgatgttctgctttaaactaaagaggtaaacacaaaggagaaacatcagaagtgaaatctacagttcgtccttggtgttctcttcttgttgctcaacgggttcggcttcaatgtttagaccaccagccaagtcatctgatttcgtctcagttgcctcactggtctctggttcctctgctgcctcgacttcctcgtcggctactgcatcagggctgatgttcagaccgctcttgactgagttataaatacgggcagcaaagtcttttgggtcggtgagtaagaatccactctcgatcaaactgtctgtacatgagctgtgctgtttccttcacactctcatcctgagagaatttggtatgttagtttatttctctaatagacagtaagtaaaaaaaagaattgatgggtcttatgtttgttttacctctgggtcacttgcaattctatccttgagttctttgatgatagggtgtcgtgggttgatctcgaggactctctttccgtgcatgtaagcttgcttattagcatccgagagagtttgggactgcatgatcctctccatattagcactccatccaaacttggatgttacgactacacatggagtgtcagccaaacggttgctgattttgacatcgtctacgttttcgctagcgagatttcctttccaccactttgttagctccttgaatgcttccttcagctccttgtcttttgaatctttcccaaccttcagtccttccttggacacattctggaactttttgtcttcgtaatccatcaggtattgcatcaagtattcatcaactgggtctgtgaagaagatgacctgggaacacaagtatgagaacgtgttatgcgagttggagatcatttaaagaagaattattcgtgtgcaatgcaaacctcatagcccttcttgatgagcctctccaggaatggagatttctctagctgttccttgctgcttcctgtgatgtaaaatatgtccttttggctctttttcattctcttaatgtactgatccagggaagtcaattttccatcggactttgttctgaaatagcaaaatacaaatctttagcctgctggtgctaatgaatggacagacgtgtattaaaaaaaaagtaacagagcttacgtctcaaaacgaagaagttttgccaagcggttcctgttagcagcatcctcaatgatacctagtttgacagacttgccaaactcgttccagaattttgtgtattgacccttcttctcatcgttctcaccagacttctccacatctgcgtgccaacaagtcaataagcttagaccatgtttcagaaagatgaagctaccaaatggtaaaaaaaagtggaacggtcaaagtggattgataccaagaaacttgttttatggaataccttttttctcatcatcatggatttcatcaggatcttcttcagcaagcttgcggatcatatcaagcgcctttcggataagcttcttcttaattgtctttaagctgctgtgttgttgaagcatttctcttgatacatttagaggcaatgtgtcagagtcaacaagaccctgcaaaagcaactcacgttagggatttagcccataaatttgtattgaaagaaccccttagtttgtctttcaagtagtttaccttcaagaaactcaaatacttaggcagaagctcatcaaattcatctgagatgaacaccctcctgacatatagcttcaagttcgcctt

SEQ ID NO: 30707 - DNA, 3091 bp, Arabidopsis thaliana landsberg
  unsure (1)..(3091): unsure at all n locations
aacaagcaacatggactgcacgaaactgaagagttgcttgttcgacttcacatgcgctttgcttgacgccggtattgggagattggccgtggatgagattgagacgaaaagtctggaaattatcaatctccctaagggcgccccaagaagaagggtgccctaatctacaaggtgacgattgtttctttgtaattatgtccctaatctccttagttgattttaactaactcggaaccaccgcttcagatgatgttacaggagctctctagtaagctagatccgggaaaatctgcactcattcggggaaagcttgaacctagcatagtcacgttcatcggattacgaggtcggttagtcattctctgttttttgtttttcttagtaaacatgtttgagaaaacgtatttatgaaatatgagtgtaggtgttgacaagaccaaaacgtgtgccaagtatgctcgttaccaccggaagaagggattcagaccagctttagtgtgtgctgatactttcaagttcgatgcttttgtccgtctcaacaaggctgccaaagatgaggttccagtttacgcaaggtatatatatattgagtatttcaagctgaagcttttgtcaggagtctcttgagtaagcaaaattccttcatgtcttagccttgtttgctttggtttctcattattgatgagtatggacactcatgattggtccacttttgtgcaggaaacccatgggataagccatatgcatatactttgagaataatgtatcgttattataagcgacgattaggattggagaaacatgtatagtatcatctctcaataaactcttgtttacttactatagcgaatacaagacatcgtaactcgtaagtttctaccaaattcattgtagttgctttcccgccttggtccttgtacttcttcaaagctagaccacgagaagattaggctgcacacgacaataatggagtccatgacagatgaaggtaataataagttatggcatgtttatgcatggtttattgatcaaaacttgtttttcactcgattgaataatattcttggtctatttatttggcagagcttgataacccaaaagtaacgcaaatgagcgaggaacggatgatggagatagctgaagcatcaaaagtagatgtgaaacaagttgtgcaaatgatgaaagcgttcaagacgaaggtcaagagggatacggagatggagcttaaggagaggattcgcaatgattatcatataccgtacagattgcgcttttccaacgtctgaggttacaaattatgcctcatatgccttccaacgtatttatatcatatacttatgtttaaaacaaataattttgtataactatgtgttaatttggcttgtatggatatgatcggaagacaagtactgcatgcactatacgtctagtttttggtactgtcgaatgtttttcaatgttcatgctaaatctaaatagttttttgtatccaaatttatataaaatgatctgaattttctttgttttttgtataatacagaatgatctgaatttttgtgtaagacaaaagcctctctttgattcagaagggtccgattttgtaagcttaatgacaaaaatttcctgagacgcagaaaccctgtaaacccccaaataaccaaccggaggcaatgttgagcaatctctctcggaccttttcccgtcataatttccgtttccggcgacaacaatgtcgctgttacaagcctccgaagtctccaccgcctcctccaccaccaccagcattaccaaaaccgccgaagaagccnnnnnnnnnnnnnnnnnnnnnnnnnnnnngggaggatccatacagttggatgtctaagctggaagataaagtggcgatgaggcatatggatatctatatggagcaagaggagaagtataccgaagccgttttggctgatactgatcggattcagaccaagcttcagtctgaaatggcttctcgtttgtcctttgagctctccacacctcctcttcgttggggaccttggtgggtcaattgaattatactgattctcttgtttagcatcgttttatgatataaaaagcttggatttttctatctgtaaactcgtcgattagtttgaaagtttcgtcctttttgctgcaattggacattgatttggttgagaattggtggaattaggttgtattatagaagggttgaagaagggaagcagtattcagggctgtgtaggaggctagcgagcttgcacgaggagttcatttctcataagtctcctgctgcagggtttgattacacatctgggaagaggattgagcagaagctgcttgattacaatcaggaagctgagagatttggaggtaaataagcatatttgaggctcttatacttggggtggattaagagggataagcaattttggtgtctcttttgtaggttatgcttatgaggaaatgtcagagatatctcctgaccataaatttctagcatatactatgtatgataaggataacgattactttaagttgtgtgtgagaaacttgaattctggagctttatgtagtaagcctcacgcagatcgtgtctctaacatagcgtgggcaaagaatgggcaggctttgctctatgtcgttactgatcagaaaaaacggccatgcaggtttcgtatgataagttttggttgttaggttcttccaaaaatggcctgtatgaatctttttcttttgttctgttatcaggatatattgtagcacgatcgggtcaacggatgaagatgttttgcttcacgaagaattcgagggcaatgttcacgttaacataagacatacaaaagatttccactttgtaactgtaaatacattctctaccacgttttcaaaggtgaaagctccaaattgatctgctaaaagctttagtttttattgtttttgaatgacttgaaatcataacaagtactatgtcttaggtctttctgataaatgcagctgacccattttctggtttggcattggtttgggaacacaatgctccagcccactgcataatcgagcatcatcagggattcctgtatttatttacaaa

SEQ ID NO: 30708 - DNA, 4658 bp, Arabidopsis thaliana landsberg
tcatctaagcccttcttccgagatgtacgactgtcttcctcaagtcgttgtctgaattctcttttttcccaaaacagacaccacctgagtctgctgtctgaagcctcgccggagggagatgatgaagaatcttccggaggttggtaatggcggtggctcgggttttccgacggtctctgtcggaaataagaagaataagtatcagagaatggactcccacgcggaggaatcgcagaatcatcgtgaagcagaggctagaaacagtagaaccagaaaatacgttatggcttgtgccttttttgcatccttgaacaatgttcttctcggctacggtcggttttacttatataatcggattcttcttcttcttctttactttgttgacttacaaaaaggtgtgtgtgctctgtttttggtatttgtcagatgttggggtaatgagcggtgcggtgttgttcatacagcaggatctcaaaataacggaggtgcagacggaagtgctcattggtagccttagcatcatctcactctttggcagcttagccggcggcagaacctctgactctatcggtagaaaatggaccatggccttggctgctctcgtcttccagactggtgctgccgtgatggctgtcgctccgtctttcgaggttttgatgatagggagaactttagccggcattgggattgggcttggtgtcatgatcgctcctgtctacatcgccgagatatcccccaccgtagctagaggatttttcacttcgttccctgagatcttcataaatctagggatcttgctgggctatgtttcgaactacgctttctcggggctttccgtgcatatcagctggaggatcatgcttgcagttgggattcttccttcggtgttcataggatttgcgctgtgtgtgatccctgagtcgccgaggtggctggtgatgaaaggccgagtggacagtgcacgagaggtgctcatgaaaacgaatgagcgagatgacgaagcggaagagcggcttgcagagatacaactggcggctgcacatacagaaggcagcgaggacaggcccgtgtggcgtgagttcttagcccatctcctgttgtacggaaaatgctgattgttggatttggaatccagtgtttccagcagatcacaggaattgacgccacagtctactatagtccagagatcctgaaagaggctgggatacaagacgagaccaaactgctcgctgcaactgtcgctgttggtgtcacgaaaactgtgttcatactatttgccaccttcctgattgatagcgttggccggaaaccgctgctttatgtgagcacaataggaatgactctgtgtctcttttgtctaagcttcacgctcacattcctcggccaaggaacgcttgggataaccttggcgcttctctttgtttgtggaaacgttgccttcttctccataggaatgggacctgtttgctgggtcttgacatcagagatctttccattacgattaagagcccaggcatctgcgcttggggcggttgggaacagggtgtgcagcggtctggtggccatgtccttcctctctgtgtcacgtgccatcactgttggaggaaccttcttcgttttctccctcgtgtctgcactctcagttatcttcgtgtatgtgctagtccccgagacaagcgggaagtcactggagcagatagagttgatgtttcagggtgggctggaaagaaaagacggtgaagttgagcttggagatgctgagcgtcttgtgcgcaaggaacaggagttttgaattgatcatgttaaagtagaagaggcagaagtgaaaagatactcttatggtgttctgttcttgcattagatccaaagaacgtaagatagattttgtaagtgcgtttgatgatcgtatagacccagtgcatattccaaagaaaccaactgctctgtttttttgttccttgtttcaagaagaaaccatgtgatactcaactcaaaagacaatatatacagaaatgacagaacctttgtgttcacttcatgtttcacactctccttctaacactcataaagttacaggctctccggacagttcggctatatatcaactcaaacttattcaccatcaaacaacaacaagattttgctagtactaaacacacatacactcacaccctctcttaccttgtgcatcctccataacaagagagaaggatttgatggacggagattgttatcgatcaagatgtttaaagctcgtaacctgggaacctggcttgagatgggtcgaccatgtcaaggaagagataggccatgcctgcaacgccttcaaacaaggaataaggactatcacctccatgcatttctccttttgacagtaacttggggcctctatcaagcaggaaactggcaaaggcttttgcacggtacagatactcactccttcctgtagctctgtaaagcgcgagaaaaacatatgcgttcccacttattccatgacagatccccacccgcttgagcaatccacggttccaaaccacctctgctgcagctgcaccggcttccagaaactctctctccccaaaaacctgtgtgttttgttttcatttcccagagatcaactctatctcaatgatgtatggaaagtaattaaacacacacacacacacatattccgacaaaaaaggcattatcacctcagccgccttcacaagtgtgagggcaatccctggagctccatgacaccaatgcacaagaacatctttcttcctatcctcttcactagcagggtaatttccacttggaaaccgattcttgatcatatacttaagggttcccttcacatcttctgcctcgtcaggcttcagctgaacatccatcaatacgtgcataataccagcaagcccatgtgctgcaccccagtaccttttgccataccattcaaacataagcggtgagcttcctttcttagccattgatcttccttccttgataatctcctgagctacttggcgctgcacactgagtctaatcattaagaaacaaaaggagactcatcaatagatctatcatcctaaagaattgcacttacaatggtatctgaagacgaagtttctttgccgatgtacttgttaataaacagacaagcccatagataaccaactcttccgtacaaaagctcgttaggaagatcactagatagtcttatctgtaaaaaatcctcaattcaatcacacaaccaacaaaaacaaaaactggaccaagaacaaagctgacaagaagcacaccagacgaaattgtcccaaatagtaattgagcaaatcttcctcaccagaaagcttagctgaaacggcgccaagaccacaaacaccagctcggccacagagaaaagtaacatccctaccaaaaaagtctcatagttaaccaacaattcaaatcaacttgtttcttctatagaactaagctattagacaagggagaagaagaaggagataccctgaggaagcagaagcagtatcacaagctttaacgatttccaagcagagggaaagatcattggagttcccagtaacctgataagctctaaagagtaaaaacgcagctccaagagttccagagtaaagagtgaagtcttcaacagtctgtccactaaaaccccaagtttcaatcaccacctgagagataccaacaaaaacaacttagtgaccatttcagagtaacctaaccaatcacaaggaagaagagtagatttgcgcttacggtttctttgagatccaaagcggaccgcttgagctgctgcgagagagacgaatacggcatagcaagcagattcctaagcgtatctcctccagatacactttccttctccttcacgaaatcaggcatcacgttatcgaagaaccgacccgccattgtcgtctctttccgttaaagctcaaaatcgattttgttttctagaagaaagactaaacgacagcgtttttagacgaccggttcggtgagttggttacacgtttttggtcaacgtggcatttttttttaatgaaatcatcagatctacgcaaaactttgaaagacgacagcgtttaataatctccctctcttggcttgcttccttgtgaatcaaaaaccagcgatcaaaagtcttcttcttgtgaatctgtgatctcaaaagctcctttaaccatggcgacttttgatgatggagatttcccagctcaaacccattctccgtctgaacacgacgactatggtggctacgataatttctccgaagcccagcaacctccgactcaacatcaatccggtggattctcttctttcaatggagatcctgcttccccaaatggatatggatttggtgcttcttcacctaaccatgacttttcctcgccttttgaatcttccgttaacgatgctaacggaaacggcggcggcagcggtggtgatgcgatcttcgcttccgatggtccgattcttccagatccaaatgagatgagagaggagggtttccaacgccgtgagtggcgccggtcagtgttctaattctcgctttttcatttcaattcatcggttgttatggaatagggctagatctcaagcttgtgactatggtagattactagatcttaggtggaatttcaatcattttagctttgatt

SEQ ID NO: 30709 - DNA, 1725 bp, Arabidopsis thaliana landsberg
  unsure (1)..(1725): unsure at all n locations
ttttaacggtatacatgtttccctggagagaaaaccatcgtaagcgagtttatagttgctatccgcatgatcccaagcacaaaccctctcgtcgacccaaaagatgtgccacttagaccactcaattgaatcaatataaggagcttctaacaatttcctataaaacaaaaatgaaaattataaattttagaagaatcaaacgaattatagattggtattgattattgataagagagttatgtatataaatcttgaaacagaccagagccaggctatgaggtcgccgccggagagaacaacggtgaaaactcctctttctttgcaaaatttggaggaaagatcagccgtgtatttggccagctccactgccatttcattatttgtcttgaacaccctcctcttcaccggtgccatctaattcgatgaagatgataatgatactttttgtgatgctgatgatgttggtatcgtacatggggtagatccggtgaccccagacactagcgaaaatgtagtaaagctcgatgtagatggcactgaaaggaagaaaaccagccatggccatctgaggaatagcacttctgtaccaagggagtggtggaatctcacgaggatatttggttgtacggcatggtgcttggaactctgctttgctgtttttacccgcgataccacccaaaacgagtaaaggtgaggtaactagagtccatataaggacgatcaccacaatggttccaaagggtaatgcagcggttgcagtgtaagtgatggctacggtgttaaggaagcaaaaggttaggaataatgggccacagaagagacatccagtgagtaacaagttcctcacctgcaataatgtcaaaaaagggagaagttgtttatttcagttgaagatgattttttgagagacagggatgattctcatcatgtgtaaatatttacccagctttttccttcaagttgacagtagaaagaggcagatgtgtatccggcaattccagaagtgagagcgtaaatgaccaccaaagcggtaaagagtgctcctcggttgtatgggtagaacactccaacaagagcaagcatgaaaataaatatggtgctgatgacatggaataaaaggaaaagctacagttagttacagtaagaagaaatgcggatatggatgaaagtgtatccagatggaaagtattcgagttatgagagacttacagcgtgaacaattgagtgccactaccgagcgatgcagcaaataaagaattgtgagtagggaaccgaaacacatcgccatgaatgtacttccatccagtttcctcttgatcatcagcagcttcctcatcttgagcataccttttaagcattggaataaggttagatgagatagacaagtgtaaaacagtcgacagtgaggaaacttgaaacttacttcatgaaatcgttcttgaggactcgcatcaagatagttgcaaggaatccagtcaaaagaaggacagtgacacaggagttaataatggagaaccagtggatttccaaatgatgtggaagagaagaagacatagagtacttctccattcttttctcaaaaggagtctcagtttccttccacttcacagtgtacataaactctgcatcaacttccttatcctcagtgagatccacaagcgaatgaggatccattctagcactgatctcgatcacacggtccttatngtatagaatctcaaactg

SEQ ID NO: 30710 - DNA, 2508 bp, Arabidopsis thaliana landsberg
tccccttatagccaagccacggccactgttccaaatgtttctccagagctactgcatcttgttgttttcagccatcatggggaagcctgaaagcttagacaaactaaagaatgttgtatgtggtattgagaattttggctgtggagaggagtcagaggccactgctttccttgttgttgattcacttattgccaccatgggtggagttgagagttttgaagaggatgaagatagcaaccctcctagtgtcatgttaaattcccgtgctgctattgtttctggggagcttattccttggcttcctggtttaggtgataacgtaaattttatgtcccccaggactcgcatggttcggggtttgcttgttattttacggtcatgcacgagaaatagagctatgtgttccacggcagggttattaggagttttgttgcgatcagtggaagcgataatttccaaggacgttgatatgaaatggaatgctgctgctattttgctactatgtattcaacatttagccgggcactcccttagtgtcgatgatttacacaggtggcttcaagttataaaagccgcaattacaacagcctggtcaagtccgttgatgcttgctttggagaaggcaatgagtggaaaggaatcaagggggcctgcttgtacttttgaatttgatggtgaaagctctggcttacttggtcccggagaaagtcgttggccctttaccaatggctatgcatttgcaacatggatctatattgaatcatttgctgacacattaaatgctgcaactgcggcagctgcaattgctgctgccgcagcagccaagtcagggaaaacatccgcaatgtcagctgcagcggctgcgagtgcgcttgctggtgaaggcactgctcatatgccacgtttgttcagctttttgtccgctgataatcagggaatagaagcatatttccacgctcaatttctggtggttgagagtggtagtgggaaaggaagaaagtcttcgctgcattttactcatgcatttaagcctcaatgttggtattttattggtcttgagcatagctgcaagcaaggacttctggggaaagcagagagtgaactacgattatatattgatggatccttgtatgaaagtcgtccttttgattttcctcgtatatccaagcccctttctttctgttgcattggcacaaatcctcctcctactatggctggtctacaacgtcgccgtcgtcaatgtcctttgtttgcagagatgggaccagtttatatatttaaggaaccgattggtcctgagagaatggcgcgtttggcgtctagaggtggagatgttttgccttgttttggcaatggggcaggccttccttggctagctacaaatgactatgtacgtaataaggcagaagaaagtagtattttggatgcagatattggaggatatacccacctgctttaccacccttgtctgctaagtgggagattttgtccagatgcttcactttctggagcagcaggtgcgtatatttatactccttttttcttatcaaatgctctttaaaagtgaaaacgtgcaattcccatgaatgttgatatgctatcagattgtcatggttgatttgttatgtactttgatttgcttattctctctatctgtggtcttcttttcccttcatgatttccttccgtcattttgtttctggtcgagaatcggaatcaatcatttccagttttgatatagtttgaactaatctttttgttttacttttttttttcttcgtcaaggcactctaaggcgaccagctgaggtccttggacaagtccatgttgcaacgagaatgaagccagtggagtctttctgggccttagcttatggaggacccatgtccctgcttcctttgaccgtaagcagtgtgcataaagatagcttggagccatgtcttggaaatcttccactgtctttgtccacagttacacttgctgcacctgtatttagaattatgtcagtcgctattcaacatcctgggaacaatgaagagttgtgtcgtactcagggacccgagattcttgctagaattctgagttatcttctacactcacttgcatcccttgacaggaagcatgatggagtaggagaagaggagctagttgctgccattgtttcgctttgccaatctcagaagatcaatcatgttctcaaagtgcagctctttcgtacgcttttattagatttgaaaatatggagcctgtgcaattatggactccaaaagaagctattgtcatcccttcaagatatggttttcactgaagcaacagctatgagggatgccgaagctattcagctgcttctagatggctgtcgaagatgctattggatgatttctgagaaggattctgagaccacttttcctcttgatgggaatacgcgtcaaatgggggaactcaatgctctgattgatgaacttctggtgattattgaacttctaatgggagcagcatcttcttctt

SEQ ID NO: 30711 - DNA, 2768 bp, Arabidopsis thaliana landsberg
cttaatatgtgataaggtcatcgggtcagatctcggcgcatatcaagcgctgctgaccgccgaatgatgcttttagtatgaagtgatcttcgatcagagtatggtgagttcgctggtaatgatagtcggtgagccacagataggtgttcgacacgccagcaagattagccaggatggaatgaatcaagcattgcaggctgaatctaaactagtgaagttgaagactgcaatgcagaggtatcctttgcaatagtctatccttccaaagcattgccgagagcccttgcggtgattccttacttgtcttgttgatgtttcatctccaggcttgaagagaaaatattagatatggaagctgagaagaaaattatgcatcagcaaacaataagcactcctgtgaggacaaatctaggacatcctccaactgcacctgttaaggtagaaagtttctctgcaactctgaaatatgttgatctgccttttaaccaggccattagatgttaacttcgtcctcattctgtttgtagaatttggaaaatggccaccaaacgaacttggaaaaggagttcaatgtatatatcctccaaccagctatctcgatcacttggttctcatgacgttctttttgtttgcatttttccattagtttattaatctgtaaagtctatttttccaggaagccgagtttacaacaccagttgatggcaaggctgggaaatctgctgcagaacgtcaaattgtatgtagtccaactacgtcatagtacttcacactgctgttagttgataattctgctaacttgatttgtattgtcactgcagatgaatgttgatgctctcattgactgtgtaaaagacaacatcggtttcagtaatggaaaacctgtggctgcatttacaatttacaagtgtctacttcactggaagtgtttcgaatctgagaagactaatgtgtttgatcgtctgattcagatgattggttccgcgattgaggtaattgggaatcttcacactgtttcaatgtaggatttacacgcatgatggaattatcctcattttgtgtgtagtggctgtgccatctgcttatctgaaatatggattatgaaagatttattttttgcatgatcaaaattacttaaactaagaattttcaccgttctgctgatattttcagaatgaggatgacaatagtcacttggcgtattggttgacaagcacatcggcactactatttttgcttcaaaaaagtcttaaaaccaatggcagcggagcaacacaaagcaagaagccacctgcttcaacttctttatttggaaggatggccatggtttgtatcacaattttattgtgttaatatgacttttttggttcaactttttgtttatgatatcagaatcttaactatcctctctccctatcttgtttaccagagcttccgctcttcacccgcttcaggcaaccttgctgctgcagctgaagctgctgctcttgcagtggtccgcccagtggaggcaaagtacccggctctgcttttcaagcaacagcttgcagcctatgttgagaaaatgtttgggatggttagggataacttgaagagagagttatcaactttactttctctatgcattcaggttccttgctggattctttctatcctaatgctgtgatgaatgtttctttttgcactttgatgatagattttggtttttcaaaatgaaaacttcaggcacccagatcttctaaaggagggatgctaagatctggcaggtcctttggaaaagattctcctgcagttcactggcaaagcattatcgacggtcttaattcgcttcttgtcacactgaaagaaaatcatgtaaggataattgttccattggcattgtacttaatgtgtcctcacttcaatacaccaattctcatatgttacatgaaatgtccaggttcctttagtactcatccagaagatatactctcaaactttctcatacattaacgtacaacttttcaacaggtaagtttaattctaattcgcctactacaaaactatgaactctgttctcacttacacggcttctttggtatcttacagtctccttctgcgtaaagagtgctgtacatttagcaatggtgaatttgtaaaatccgggcttgcggagctagagctatggtgttgtcaagccaaagaagtaaaaatttctgagagatgattttcttacaagaatacttaaatttccttcaggtcgttctatcaaaatttattttcttttctgtgacttggcagtattctgggccgtcttgggaagaactgaaacatattagacaagccgttgggttcttggtatgttacacttactacattcttgttaataatccattctagttagactatctaacaacagttttcgattgaaactcatgtcggtccatatggagttgtttcttgataatcattcttactttgaactacaataacattactttcttcctcttttttcacctgcaggttatccaccagaaatacagaatctcatacgatgaaatagcaaacgatctttgcccggtaaggctctgttcttaagtttctagaaacacacttgatggtcattctcattacctaacattctcttcattttttttcattttttacaggtcctcagtgtccagcagctttaccgtatttgcaccttatactgggacgatagctataacacccgaagcgtctcacaagaagtacctaaaacttttctacttccaacatgaaataagaat

SEQ ID NO: 30712 - DNA, 1599 bp, Arabidopsis thaliana landsberg
tataagggcccatcaaagataaacttgggccaacaaataataagcagcaaaactgatacataaaaaacgtggtggtttcaaactgcaaagagataagtctcttccttacatagtaaaccgctctgttcctcaactgaagttaactgtctccctgttcctccataacttctttcccacgtaacctctccttcttcttctacttaagcaaccctttctctaacttctactcttttttttcccacttttcttccatcacttcctctacgtgctcacaatgaacaacaatcattcctatgatgatcgcagttttcacattccacttcatccttctaacacaagcaaccctaatccaaatctccagtttgctttatcttcaagctacgatcacagtcctaagaagaaacgcaccaaaaccgttgcttcatcctctagttcttcaccaaaatccgcgtcaaacccaaaatacaccaaaaaaccagacccaaatgcccccaaaatcacacgtccatgtactgaatgtggcagaaagttttggtcttggaaggctctctttggtcacatgagatgtcaccctgagcgtcaatggcgtggcattaatcctcctcctaactaccgtgtgcccaccgcggcttcttcaaaacagttaaaccagatattaccaaattgggtctcatttatgtccgaggaagaccatgaagtcgcttcttgtctcttaatgctgtctaatggtacaccatcatcatcgagtattgaacggttcgagtgtggaggatgtaagaaagtgtttggatcacatcaggctttaagaggacacagagcgagtcataaaaacgttaaaggctgtttcgctatcacaaacgtaaccgatgatcctatgacggtttctacttctagtgggcatgatcatcagggaaaaatccttacgttttcagggcatcataagtgtaatatctgctttagagtgttctcgagtggtcaagctttaggaggtcacatgagatgtcattgggaaaaggaggaggagccgatgatcagtggtgctttggatttgaatgttcctccaacaatacaggatctttctacttcggacacatcagggtgttgtttagatcttaggttaggactctaattagtatctatatatatatataatgtctgtaggtatattggatgtttccttctaattaataggtcaatgtacatgttgtgatttgatgataagtataacgtatgtaggatattctgctatatatatgcttaataaagaaaaatatttagttttgtgctttcgaaatgcactgattttctggtatattaattaattttgaatcagatcagaaaagaaaagaaaaaaacacttgaatcaagaaagaaaacaaaacttgtgttgtaccaaaatgtaaaagaaagtttcaaacgtatatccaaccaaatactagagaacagaattgatctcttaaaacatgaaattcataagcagatattgagccgttttgtaaaatttaagccaactaagaaaagggaaaacattttaatttcacggaagcttaattagtattattcttgccaaatttcgttgtttgacttgatctcaaactc

SEQ ID NO: 30713 - DNA, 3389 bp, Arabidopsis thaliana landsberg
ttcttttgtatgtaactaaaactaggcttgataatagaagaaaagcatattgggccgttaaaaagtccaagttaatacggttttgggccttactaaaacacgggggctttaacggagttttgttactgctccttggtggatctgcgagttttcaataaaccaccggagtgaggaagaagcagacgacgacgacgaagatgagttcatcgactgttcgtgatttgcagaaagacctaaaaaaccaggcttattgatctcggccaaattcaaaaaagccaagtttggtagattcttcgtaacctttctcgattttgattcttttcttgtttctggaggcgggaaaccctacttttctgtgttcatattttcagatatcgggaagaatcatcagctgagaaagaagtatacgatccaactcggtgagaatgagctcgtgcttaaggtatatgttcatgtctcactgtttaatctgagttttgtggctacttcaactgaaaagagaagtttatttcgattgttgattggctttaatctttttatgtgtctgtcttgtatctacaggagttagatttgctggaagaagatgctaacgtctacaaattgattggtccggtgttagtgaagcaggatttggctgaagctaatgcaaatgttcgtaaacgaattgagtacatctctgctgaattgtgagtttcttttcttttaatgtgattgaagcaaatgcagttcgttgagaaacctattttgggattgttattgtaaataaagaacctttctttctttctaggctaatagtgagtgattgctgttcataagtagctaaaatgttttcacttctagctatgtaacaactatgagagatgttgataaagtgtttgagctatagtgttgtgacctcaagaatattgttgtatcctttgcaggaaacggcttgatgcaattcttcaagatatggaagaaaaacaaaacaacaagagagaaacggtaagacatctgcctctcatgcatttatatacttaattgagtgcattgaattagtgatactaggactgctacaccaataatagtccaaacattgatgctcagtatactaagctctaaaaagatactttggtagctattgttgtcagtttaagcctgcccggaaagtaaatacttgaactttgttatctcctctgtctcgttgagtggcctactggccttggcgcaatatgaggatttgctgtttctgcactttcttggcttttaaatggtgataatgatcctatggtttcaatttatggaatcaaaatatttgcagataatgaagttacaacaaaggctacaaactatccaggcaggaaaagcaaaggcttgattgagctattcagttgcaaccacacttgttgaaccctttccactgtgctcggccttgtctcaatggtgtcatattcagttactgagggttcttgtggtttcagtttattgggtgattgatgtctctttgtgtcactaatctttttttgttgacaactagacttaagtgtgtaacttatacatgatcttgtcgccctttatgaagttatgagtttggagatttacaaaaaaatattgtgtgtgcgcctaatttggtcttcatacatatttcaagtcgattatgttctatgcaacaccttgcagattacaaagagctaagatgaccaaatgatctcaaatttaaaggtttattagtcatatcagaatgatcttatcttgcagtgtaaatggtatgtataaaaaactaaaaccataattcatctccatgtcaattgtgtctgattacattttgccaagtgagagcttaacgaaaagagagaatattagtctcaagaaacctactactacaagcaaaaacttttacgagttaagttataatttggatgcagaagcttatcttacattgaaagttatgactttttttcctcaacgaactaacttcttctccaattggcagtgtactatacatcactttctccataccctctcttaagtttgtgtatgtgtgtgtgtgtgtgtattgtctggagcagtcttgaaagctaagccttcaggtgtttcttcttattggtaatggatgagcttcagtgttgaaaacaaacttatccaatggtatcactgagtcatctccaaagagcaagtataagtacttcaatgtttcaccaaggaaaaatgtctccatcttatctcttctatgaggaggcacttctgttacatcatccaatgatgtgtatccacctgatttcacctttgtgtacttttcaaaagcttcaaaaatttgccaaccttgatctcggtatctgcaattttagaaatgtgttagctttaagagtagaatagtccccaagaacttagattagtgagggaaaatcggatgaatagttttcatactttgtatcttttgtgatacgatagaggacaaagagtgattcaacagtttcagggcgcagtagattatgtcgatcagcgggcttaatgattatgtcatttgcatacatagaactcttattcccaccatcaagaccatcctcagtgtaatcctgctttattaaaatccaagacttaacaaaaaacaagaagagcaaggatgacaataacgttttggaaaaaagtacacacaaaacttacctttgtgtgaaagtaagcaatttctggagcaaggccagtggcagttacttcatacatctcaaagcatgttttcgctaaatctttctgcaagtttcagattttctaggtcctcaaaggacaaaagattttccttcagggcttgttcctttgtgaggcccttggtagcaccgagagcaagagtaccaggcaagaagcatacctagcaacaaaaagcaattgaatgaatcacaagtcaagaacaacaaaactcgtgaaatctctcagcgaatgacaatagcgtaatactatgaaatgattgctattttcagtaccaagtagctagtgacacttaccaaatgatccatttttggactgaattctcccttagacccgtaaggtaactcccctacaaagaccagaccttttggaattgaattttgcacaagcaaatgcctgactcctttcattgcctcaatgtacatatcatgcaaatatgtgaaattactattcaacttagctccttgctgaagccacaccttaattaaatactcatagtagctatcaccacgagatcccaacctgatattctcaccaacaaagtcacctgtttgagggctgcaccaggtagaaacaacaagtcagatcaaaagagcccgggaaagcaagggaaagcaaattactagcatggtatttacagttgaaagagcaaacacgaattacctgatatagattggaacaagaccttctgtctttggaagtgtttttat

SEQ ID NO: 30714 - DNA, 3879 bp, Arabidopsis thaliana landsberg
tgaaaggtctgtccttttttcatccccaccaaggaagaaatccagatacgcaagcatcaaatcggaggttgcagcgacctatattaaaataaatatatatatatatatatatactaaaccttacaccaacaaatccttgtaaacggaattagatattctcaaaatgtgtagtcctgttaccttcagaccctcgtataaagctcgggagcgacaggagcgtaaacaggagtgatcatattctgaacgtacaaactcacgcaatttttgcaacttcatcttccgccgccattgctgccatgaccatgcgagcggatacgcaactactgaaagaatactatatatggcaccttcccaccattgatatgcagctatagagttgatttcgtcgacaaatgtgttaaatgcagcctcatatctaaaaaacccaaaaccaatataaaaatagttcagaaccaaggccacttattaagtatctatagacaaaacaatgagaaacattcctaaatcagcttgaaataaaataacaaacaacttacactatctctttaatctcctccgggggaatgtgtgagagatgccacggttcactgaatgtattaggacccataaaatacattctatgcacatgactctgagattgctcagctctatttgtttccaacacctgacaaagaataacattataaacagcagcacaacactgtaatataaggagtgtttggcggattatttcgctgaattatgtcttttgaacaaacattacttgcatctgtagtgaaatatcagcaaatacaaaaaagcattctacatttgcttatacatatgaacgcagaaagtaagatgaccatgcactttttctatataatgtttcaacacaaagtaaatcatctaacctcattaagtgattccaggaaagggaacgaatgatctatttgagagccatgctgtgtgggagctgggccaggtaaatcatcaactccaacaaatttcattcgtgcaacactaagtacaagtgctaagaggatgaggagacccatcagaagaagaccaaacaaccaaggcccaccaaatgtgtaaattaactcctcgagtgcggtgtaacagtgtggcatgtgatacctttccgatatgcatcgatatggacatggtgtctcagaaacaccacctgtattccaaggtttatagttgagacataagcattttcagcatcagtttataggtcctatatattaccatagccaaacttaaatcttcaaccacacttaaaatctacagactttgtagttgaacggtttggtttattcataaatcgttacaaaataaatagaataaaaattcaggcttagtagttgaacggaaaacaaaacttgtcactgaaagttaggaaaatttatagcgcatatgtaatacacaagagttcaagatataagtgaatgctatttatacctcgaactgtgacatagacagcacgagttggaagctcatcaaccggacaaggacgacaaagagaagggtcggatccagtaacattcttgaatgtaccagatgggcattcctggagaaaaatatagaattgtgaatacagtgagcttcgaaacgtaaaataaaattcaatcgtggtaagggaacaaaaggcaaatagaaatttcgcctcagtgatatgatagagcaggaaaatgttgtactaagttttcctaaccttgcaaaatataccgtggagtcccttcggacaagccgtcccagttattgtaccatttttgccataaaaaccatcatccgctgctgctccccctctacgattacaattaaaaacaatagtaaatgtgataggctggaatacgatatccaataacaaaatagacattggaaatgcagttaatgacagaaaacacattaacgatcatgggaacagcacatgtatatagaggacataccgtgcatgaattattccttttacactagcaattggctggtatatgtccccagtaggaatgtttgaccaatgaaaatgaatcctcccacctccgccaccaccaccaccaccaggactgccagacccaccaccacttgagagaagagatgactctcctaaaataagataacgcaggaacaaaaggactgttcccccagaaccacccccaggagctacaatagaaccgttttcatctctactcaaacgtttgacactttctccatcaaccctaattgagccttcaagcgataaaccagatagaggctgctccattgaaccaatcactgaccagattgaaaggaaaacaaagaacaggttaaaaggtatcatctttaaagtagtaagctctcatgggaacagcatgtacgagtgtatggcctaaatcatgacaagcttctacactgttaatgggatattaaataaacttgtgacgaaataacaaaatataatttgccaaatatttgacacatggaatacgaatctagtcaatagtctacatcaaacatttgcatcaattacacaacctaatctctcaagtttactagaacagaatcatcaaaatatctgacgtttcatacctacaataccaccaccagcagatgaataaccagggctaaaatcgccacttccactgccaagctcacaagggagatttgcatttccatatgtaattccaccttcaacacagctgttattgtaacaaacacgcccccctttaccaccatgtccaccaccactgccaaagccatttccaagcaatttaccttcacctacgccacctctacaacctgtgaaacatatgtgtgttgctacgtaaacatcttaaaaagaccgtaagattatatcttctttctccctatatggaggtagcaccttaaatcttatattggaggagtaagccaaggacatgcccatacgaaatgtagaagtatgatgcgcgatcaaaacaaaatccaaataaaaagtagttattgttacccattccactggcactaatctctccagagggttcaagggttacagtttttgcccggtggaaatgaactactgatcctttaatgaaaccttcgacgagaatatcctcaactcggcatatctagaaagaaagaaattatcagagttttcaagttagagcatacaatacaagttaaagaatggttgaaatacctgtagagtaaaggacagagatgcattcacattgcaatcctctggaggattcagtagttcataagggcaatcttgtcgttcacaatagagctttggtgtactgcaacggatatgagttcaaatattgttagcttttatatccgaagaatattgcacacaaactaaccataaatatgacatttttcttcaaactcacacagcatctctggacgcattcagtagaggagcacgcaagatagacccaggcccaaccttcaattgccaggaaaaaaaatcattaactcctacatggccaaatcaagtacctttctatatttgttatacaacagccaatatggcctttaaaggagaccaatagtcacattagtgcctatattcattacattttcagagctataaacacaaactatttttgattcacaaaatataagatgtcaactaatgcaggattgtcaccaaactaacaaaaggaaaccccttacataaatccggtaaaacagagacaaaacaagccgttgtgcttcaattgaatcccctggtccagttagattcaagaaaccttgtccatggactccaagatttgcatttgaccgaatgacagatgatccctatatttggatagagaggtcacacacaaaaattagatgcgacgctgtgtcacaagttacttttcaggagaaaaactatgacatgagtgtgtgaggaccctaaaaacgaaataattgctagcctcaagcatg

SEQ ID NO: 30715 - DNA, 1590 bp, Arabidopsis thaliana landsberg
ctcaaatttcaatgtcttcaaagtaccccaaaaatgtgaaacaaagaactgaacaaacccgatcgctttgcagggtttggtgtcttcatatctcgggggtttgggtaagtatgtgttccagtattgtccttgcattagatctaaaaccttcatgattgaatctaaagtctactttcttcttcttttccgtgatccagtattggttggtttctctgcaactgactcggtttccatagtttgtttgctacttccagcaacagatgtctcacattcaccttccttgcctgtttttaacttctcgacattttcctctgaaactaaacgtttgctgtttatcgaccaacgcctatgcttaaaccagttattaacctacagaacataatcagttcttagcagagatgaaactaggtcgactaaaagggagaactaaacaaacaatttactaggagaaacttcttacttgcttaactgtcatttgtagctctttggctaagctctccttcgtggctttgtctggatattgattctcttgaaaagatatgtacagtctctgcataaaagagggatcctttcaatccattgctccctccctcataataatgtaagattggcacctttaagcctcaagacagctatatctttttacctgagttttgggatctgtctgtttacatgctgaagagctgcttttttcaatttcaccagaaccaccattttctccaggaccttcttgtggcatttccaaggtatcctttttatctgcccttttcgacttccgtataagtttcttagaagtatgatcttctgcatttgaagactgtttcagaggtacagtgtccccttcatcttccgactcggaatcttcttttcccattcttgcagttttatcccaatcgtcatcatcacttgacgaagtcggaacattgtcatattcctcctgcacatagaagaaaaataccattcagaggtttttccaaagccagatagaaatcgattatcaagaaaaagagagatcactcacatcatacaactttttgtaatccagcctttcaacattcctccttctggatacaccggcaggaccatcatcaagcccaacatctgactctaaaattgcatcaccttggagctgagacgtctgtctgccaggatcctcaagtggtgtatcttcagcttgctgattagtctcatctcctttgaaggaagtttcaagatcttcagtgtctgatgtacaatcagaatttgaactttctttatcatcatcacaagttgggccatcaggatcatagtcatcatcctcagaatcatcagatggaagggccattacagcttgcatgatatcgttcccttctctaaatgactcaatcatttcgacagatgcagatgtgaattcagactcatcagaactaccagcttcgctctcagatgcttcattgtcatcactgccatctacatcattttcatcatcactcaaacaagctggatcatgctctccatcatcagaatcatctgaaggaagatcacagccgagattgtgacctccaccagccagcgctgctgctgcctcaggaaatattttctacacaaaag

SEQ ID NO: 30716 - DNA, 2379 bp, Arabidopsis thaliana landsberg
  unsure (1)..(2379): unsure at all n locations
atttttgcatacggtcaccggtagcaagtcgatcatgagctgccaaccaaaccgagaaggagtgtttcggcgtttcatgtgtaaaccatacacctctatgccaagccactgtgttcgaggtagtgcgaatatgattccaagtatctttagtagagaacttttctttgttcgagttttttttttttaatcttctactgtatttgtgaagagcataaaggaacagaagcaatcatgacttctacggaactcgaagagttttatcgagtggaacaaaagattgaaagaacgtcgaatcgataataatgactaacgtaaattattattattttatttaacacaaaattgaatttaaaattaaatagtgattacgtcaccgttgtggcgactcatcaccgtcggttcgaatcagttgaactaatcttagaagtgagaacaccgttgcttccataattcccggtgaatcatttgttgttcgatttctccggcggagatggtgagtccgacgagagacgctatccaatcttacatgagcatcactggcgcgtccgagtcactcgcgattcagagacttgaggttctttcttttctttatctctctctctctatccggttctccgagaggacgtgactggcaatttcgtgaaatgccttatgccaagattgacggtagttacctagagaagatgtggttagttctgcgatcaaatgtgtaattgctgatgatagatttgaaatgtcattgaattgggagagttagggttttagttagtctatcactgtagatctatgattcgttgcgttattgcacactactagaagttgaaattctgtgaaatttgatcaggaacatggcaataatctcccnnnnnnnnnnnnnnnnnnnnnnngagatgtcgaaagaagcatgtatgtttctcaatctttctaagagtttttgagtttcgcttctttgtttttttgtttttttgtttttcatggtgtataagctctttgttttgttgcctttctcttttggattgccttccagttattatgactcaagcttagacactcgggtgagactacaatgttgaggaagataacaatcacgttcgtggtagcgagactaggccagttaacgagtctaggccagtccctggcgcacttccatctatactctcggctgctcgggcttttagaccgtctttgcttctagatcccaattacagacggaatatccttaggcagctcagtggctctgctctctctggaagtccttctccatcatctcacactggagaagtcactgggttccctgctcactctacctggggaaatgatcacactcgtcctcctggacttggagcggttggagacggttatgctaggcattcaccaagctatggatcccaggtccatggtgggacacatagggatgctgactcacccgtccatagtaatgatgcagaggaagaaatgatcagagctgccattgaggcctcgaagaaggattttcaagagggtcgtcttaacacaagatatagtttggacaatgtatagtattctagcttcaccctatctagctcctagtttgcatgagcttcacatagttttactttttctttttttgttaatgcagaatccatctagcgttttatctccaagagaggttattaaccgggaagatgaagacattgcccgtgcaatttcgatgtccttagaggtaggcattgatagatatttcatctgctatgtacgatgtaggcaatgtcttaccttatcatcaatggctctcagatggaagagcatgagagtgtgttgcgagaccaactagctgaatttatgcctcagtccgtggagcatcatgacccatgtcagtctaatacaaatgaaagtactagatatcaggtgtgaaactaaattatcttcacctctaataagcttctttcttttttttgtgcgccacctctaataagcttcaatcttccagccttctggttcataagctatctaataatatatatgcatgctcattagtatagttttccctttacagttttcaccaatttaggtggtcgatatccatgttacggactaagttagcccacagttttgttaatttcttcttaatatagtgtagaaactctttaagctatctcgcttactaaaacttttttacttgaagcctggtagctcttcagtgcaagacaaccgtgaagacatgaaccaaaagcagccaattaattccagctctcagcacagacatgatctccagaatagtgaaggttcttatcctgaagaggtaaatcattcaaaacgagttcgattattctaaacagtgaaagtagccagtcaagaacaaattaacatcttcttagtgactagcttctagttgatcat

SEQ ID NO: 30717 - DNA, 937 bp, Arabidopsis thaliana landsberg
tgactcgttgatgattgaagcctttggtatataaatattgtcgttatttcctccatttaactttttctttttccaaacaaaaaaagttactcagagggcacgatttgagcagaatacgcggtgaggacaccgacgacgattctacttcttgtcggagctatcctcttctccggcgccggctatgtcagatccgacgcctacgaccaccgttacaaggaaggagacaccgttcctctctacgccaacaaggttggcccatttcacaatccaaggtaaacggaaacatctattctagatctgagctccatacctgaggttgtttcccattcttaagcctgaggatgataaattgatcgtttattgttgaatctgttgctattgaattgagtaacgacattgataactgagtacactgcaaaatgcgtaatgttaaaaccaaagagtgaaagaagaaactacatttggaatgtttttcgtttatgtgatggatctgtcttagatttgaatactattatatgactgattttggttttgttcaatgatgattgcagtgagacgtatcgatattttgatcttcccttctgtatcccaggtatgcttatatctttactagcttaatcacacgatttgtgtttaagccgcaactgatttgtgtgacatctcctgattcgatcatcccattattgaatatggtttatagagggtgtgaaagagaagaaggaagctcttggcgaggttctaaacggggatcggctagttagcgctccatacaagctcaacttcagagatgaaaaagagtctgaggtatactgcaacaagaagttgagtaaagaagaggtcaaacagttcagaaaagctgttgagaaggactactacttccagatgtactatgatgatctacctatctggggattcattgcaaacgcttgacaaggat

SEQ ID NO: 30718 - DNA, 4351 bp, Arabidopsis thaliana landsberg
  unsure (1)..(4351): unsure at all n locations
ttgtgagttgtctcaggtaaaaagaacacaccgtggtgaaggttgtgctttgagttggccagattgatactgcttagtcgcctcgagcatggactctgccatcactgctctcttctccatttcagccagtgcagcaacagcttcctcgtatttttcctagaccagttatcatattcgttacagaaacgatctaagatagaacaggagaatacaaaaaaaggaagaagatataaagttgcattcaaaacacgcagctctgaaaacatacagacaagggttaatacaggatttacagagaattatgttcctaaactaatgtgtaactctactccatggaaggcgagtaatgacctataactagaggcaattaaagctcttttaaacttgatagcctaggcacatctgtgttagtaggagtcagatcaaacttttttacctgcaagacttgagcagcatatctctgcgcttctgcatcctgctcagcaaatcttcgtgcatcttctgttaccttctgttcttgctccacccgcatcaagaccttcatacatatcaattaatctcagaatctctctcagccacaaacgaaaacagaagaagaacagattgatcatgcatatgcaaacctgtagcattgcaccttcttgttcctgcttatcagagaggagtctctgaacttcggccatttcttgctctaactgttcgacctgaagttcacattcatgacaagtagcatttcacatctcaagactatctcaaaactaacttagcaccaatgagccttcaaattggatcaccacagagatgcgtgacaatgaaccagcaggagaagaaaagagagagaaaggaaagtaatggtggtaaaagtgacagaaaaaatagtcttcgtattcagaacatggacaaagagacaagtaacataatgcgagcatatatgcttaattggaaaattaactgtcaagtggcaagcttcattggaataccttggcactcaattgacgccgattgtcttcctttactatctccatgagagcaatctccaattcttcagctctaccacaaaatcagaagtttgggagacattacatattgaggaatgataaggaaagatataaaacttctaccatttagtgccagttttaggttgagaaaagaaactaacctaagtagagctgatcgtttctcctcaagcaacttgcagagttcagccttcaaccacagaacctgaaaaagttgtcagacaactttcagagggggtttcatgactgtaggtatcaagtgtttttttctaccgtttcaacagacatattcatccaccattcaagtgtactaagggcctagaggagtatcttcaagccaacaggaaggacaaaaaattacctgcgcttgaagatcttgaacagaatctacctccccatccccagttaggctaaccaacacttcatcagcattacttgatcctgactcagatcgagacaaactcccatttgacaatgaggctttgctatccaccaatacagattttgggtcttgcttaaaattatataatttggaggcaagctccttagaatctctccaagcttgaagccccttcgacctttcctgaagtgcagcgatcacagctggtctatgcttgcttcgcaattcttgcaatctaatttcatgtacattttggtaacccatgcaagcagttaaaactagctggctgctatcaaatgttgatccagtcagtgattgtagcaaagtaacagcgtctccagcatccttcgtagtaactaatgcaggacctgaagtgaattaacccataagttagagcagtctcgatgatgacgccactgcgttcagaaggtccacaaaccatatcacttaaattgaaagaccagcagtttcaatcaagtaccatatagttccatcaatgcgagtgctgttctgaaaagcataacacgagttccttcaaagagaagcacatcccagactctaagaactgtgatcaagaagacgaacatttagaaagaaaatgggttctcagtcccaaatctcaaagagaaagatgatcaaattttaacagattgccagcataatttactagttactcaattctctttcaaacaagacagctttaattccaatgtttaaaacctgaccactttcccatggaagcatattcatgaagatggaaagaaaccatggccctgtaacccaagccacttgcactccaagataatccagatgatgaactgtagacatacaaaagttgcagagcttagtactaactgtgaacattctacaagatgaaacaaaaaatctttgagggaactcacccaatttaggaaatctttctcgaactaactcctccagaactagttgatcaacctaaaatatgaaggtacatgttgtcatgatgctatcaccagtcagccccgaaatttttgcaaatgtatagaaaggcaactaatattatcacctgagactctatcatttcttctgagtaataaccattgaagtagtcatcaatgagtcctgtcagtgccctaaaaatcacaagtatttaattagaaggggcatcggtttagaaagaaaataggagaagatataaggatgcctaataacagtttgatcaaccatgagaatatgaaagtgatagatattaaaactaaacacagagcacggagttcgtgtttagacagaaaaaataagattaggaatgaaaatagtagaaaatcaaacaacattggtttaggtagaaataaggatacagagaatgacccaagaacagttactgtttggaagaaggaaggcgatataacacaaactaaacagtaaacacagatccaaagagtttaattttcacaggaaacaatattaggacttggagatgataaattcatcaaatttgtgaacataccaaaaggcattttcttctggcatcaaaagcaataaaagcgcagcaaagaaattcatagcctgcagaaagtatattgacaaaagatattaacttgatattaatgttaatttactatgtctcggtactaaactagaggtactataataaagatcatgatattggttaagaaccaatacctgacagtatcctacagaaggattatgcctagcataagcagtaagcaaacgccgtagagcatttctaccatcatcatctagagcaggatgaccaggaaatgtccgaggtaagtcctgtacttgaaacaagcaacggcataagaatcctgatcaacttcagcataagccacactgcaccactacatagagagggtcaaggctgaataaattttgagtactaccttttctatctgtcctttccatttttccacaacagcaatagattctgtacttgaacctttatcatcaacatgctgcatatcctcttgctctatggtgtttacagaaccatctgctgcaagaaggttttgataataatccttgcatcgtcgtttcctcacacccacaaatgcttgccataactgaaatgttattgataaatgtgacgattataattgagcaagagctaagactaacgaactatagtatggagagctagagcatgatatcacataggaatgtaaacattaaaagatttattacctctcccctcagagccataggtacaccgccgcgaataagcacttcaagttcttccttccaaggacatgtagacagtggacttgcatcagcagcaacagggataccagagacacttgtaccatctgaagaagaaccatcctgaacatccgacctctcaacatcatagaactcgtcttcagaatcaatatcagatgctcccttggaagatttggcatcatcaaatgaaggtgaaaccttcaccttcggagcatcttgctcgctttttgataaatcccccttcttcttgacacggatgctcatcaagtcttcaattgatcgtaaagacggtctgatctcagtccataattgcactctgtgaacattcttctctgcatcggggtgtccttcttcttcactggcattatcaggagttacatcagaacctaacttgtcagtatgcagatcttcaccagtccccttgtttaattctttttctttttccttctcactttcactaaacggtgtgtgactatttnnnnnnnnnnnnnnnnnnnnnaactcagtcgattcaacatgatcttccaagaaactgctccacctgtccgacctttcttcttcttcttcctgattgtaagcaaagagtgacatcataagtttaggggacttatttaggaaataatgataggatgaaataatcataggatctgcttctaccattcgaagaaccaaaaagaacctattacaagcatttgatatctaaggtgtagttgtc

SEQ ID NO: 30719 - DNA, 396 bp, Arabidopsis thaliana landsberg
ctctgtgatgcgcatttggcgatttggttctctaggtaacacttctcgcgtgaatccttgtcattcttcgtgcagaggcttttttcttactccaatgcaactggttcttattcccctattccatggcttaaatcatttgcagggtaggttctcatgctcatcgttacaacttttgccaacctttcttgagagctgcccaaatctgaaaaacctaatcatggtaagaatctgcttgtatctgggatttggctaaagaacattgttgaaacatattgtaaactcagcttgttcctttttctcgcaggagtttccctttgagcctaagaatatcgactttcacaaagtgcctctcagtgtttaatatcgactctggagtatgttcccattgacttgagt

SEQ ID NO: 30720 - DNA, 4335 bp, Arabidopsis thaliana landsberg
  unsure (1)..(4335): unsure at all n locations
gccttcgaaagaagtcaggcaagattatcttgtttcttttatgccatctttctaaatttgactcatattttgctgcaatatttaggataaaatcttatatccaaagcagcaatgatttgcaaaatgtatttgagtgaaattttccgtctaagtgtgttctattggtagtacttttctttttctttaggatttattttatacttgaactttctaatctaacaatacaatattatgggttttaagatgatcaatgttgctctgaagctcaaggtagtcatataggtcttctagtgtctgatacttattatttcttttgacttgctctaaattcaaccatgtgcatgcatgcatagaacacttatttatttttcattttccctaatgcaatggacaggaccatgtaagttctgaagatatgacacgacgggccaactcctatcattcttactcccaaagccctccttacgattatcagtatgaagagcgccgttatgggaaaatacccttgggatttaccggcaagtctgcttcagtgaaaggtcttcatgcaaaagcctctagttttgtatacagccccggacgttttagtgatcatatgtttgaagaccaattctcaaatgaggactcagctccaagggcttcagattattctgtttcgagtgcaggagatccgttcaggtctgatatacagtcaccaaattttcagcaggaagctgaatttcgtagtccccagtttcagcattcaaatgcccctccaagtgaaaacttatttccaggcaggcaacatcaggtaataatacccacatcctctaggaatcttgtttgtatctgggctaagagtttttttgttacaattgtaaatcacctcctggtggaaaaagtgagtttaccgatgttccaatttcttcgttcagagaactacatcttctgggagtgtcagatcagttgacagtaatttcatgtctatcaagtcatatacttcgggtggtttaggggaagccgtatctgaaagtcgtcaaaatacaggaagccagcaaggtaaaacatctaatcatgttcctttagtagcagagtcgacaaaggctcctatagatttgtttcagttgccaggaacgccagtggctcaatctgtcgatacatttcaaccttcaatagcaccccgatctccacctgtgaatcttcaacaagctccacagacatactcatttaccccggcaaattcgtttgctggaaatttgggtcagcaacccacttcaagaccatcagaattgtctgcgcctaagaacgaaggttgggcttcttttgacaatcccatgcctgctgcaaaatctacaaacgttattacctcccctggagatttccagttggaactgaaaattgaagagattctacagcctagcacaagcatgcaattgccaccctatccatcaactgtggacnnnnnnnnnnnnnnnnnnnnnnnnnnnnggcaggaagatctctcgaatgttctaaaagatgttgtcgataacccggtgagtcttaagtctttgctctgtcttttcaattatattatcgcgggtgcagcatgagtaaataaaaaggaaaatgtttcatgtgccaccatctcatccttgcattgactatgatacttctttcattcatgaaaattgtgatgatcctgtacatgttgggctcggcaaacaggctggtctcatgttttatggaatttattggccaagctgtaatctgacaaactaaatactgtagttacttatgtctgaaataacggcatgattccacaatcaagattagcattcatacttgggatgtaatgaactaactcctacccaacctgtttttagcagccgtggaatgcctttcccgactctattgaggccaatcctttggacagcagtaggaatattcaccaacaggtagatggagcaagtacttcgtcatataacactgatcaccagcatttggaatcacaagttttagaggttgttgcattttcccttatcacgtcagtgtattttggatgaatctctttgttgattcctctgtgatgatgtcaagtcacaggaattaagcaatgatggcacccaaacaaccagaatccctgctggctcttctgcttttggttttccaggaaatattggcatggcaccatcatacttggtactcccctcttatggtttcagttatgctttgcagttttcccttatatccttatcgacctccctccttttaacttgcctatccattatctagtctttgatcgattgagatctttattcgcaggaagaagcttggcagcatgtaaatgaacaaaagtcagctaatccatttgatctcccctatgattctgagttcgactcaaatgacatggtatgtagagccttgttcatgcatttgtcttacaatcaaatcagatctcacaccatcatttgtatgcaatggtgtaatgttgtagaaactagagaatctaaaatatctaagttgggtgacgacttcaaatcttgttcagtggaattatcatgttctttttgagagatagtatatcatatggaaatgataggaaaagaacattttcctttctcaattatccaaatcaaagaagctaggcaggaaatctagagaatcccttactttcccaagctcagtatctatccaaaagaccctatctgtttttctcattctatttttgattctgcattttgtctgatctttttcctgttaatttttcttcgatgtttttaggatatcctcgtaatatagttcatgtggagctcatcttaacctagactttcgataagcatatttgcaaactgtctatgtcattcaatggttcatttgataaaacacaacataggtcgtgcaagattacaagtgaatttctgaatacatcactaaaagcctttttttaaattctatatttgactttgtcgtggttgtaattaatgccagttcttggacatgagttcgttacaaggggcactgcccgatatccagacaccacaagccttccttaatggtgtatcacaaccgtggctcgctgcagattctgtaccctcgtacttacctgctccagcagtcgcacaaggtgatattaattatgtgctatgaagtatactcctttctttttattagttccctacaggaaatttatcaccttactatgttgcatgaaatatcaattcacaagtccgatgttcgcccccttcaaagtgtagctattaaaaaattccgtcttgtcaaagtttgagttgaaaatgttctcatgaaagaaagtaaatatttatggttgtgcacactacatatatctgatactctctctggctgactattaggaacctatccttgtaaccttataggccttgtacgttatctaattctatgattttttttgctgcaggtggcttagcatacatggcagggcaagcatcaacgtaagtttcaaaatgtgataatgtaatctttaagatatgatggtatttgcatatgattactgcgatgcttttgagtgaaaaatccaaaaagtggtatgttcgtttgtttgataatgatcctttggttacatttttgaacgcatagcgagaattatcctcaaagaatgatttagtgagaagatattttgtttctacggaggagcttatctttttggcttattacatggatgtaggaattcagcagcacaaggccctgttgcatttactggaggcaatccatttgcttagacacacctcggtcttcttcatcttcttcttcacttatgcctagatgcttcatctttggattcatcttcatttagtgccttccatatatttttttaaaaaagaagaaaccagccttattgtgcaatgtgtttatttctttgttcggaaccgacttcagctgtatgtacctttgatttgagtgtatttgcaagtggacatgactgtcatgattaataataagtcggactcaaccaaaaagcaaagagatacgaaacaagcaggtgcaactcataaacatgaatgcaacttgacttagctttgatgtcttgtgatcgagaagttggaatctctcttttttcggaattcatttttctgcgttcagaaaactacgtcatcctgggagtttctgaaaatggtcaaaatacaagaagccagcaatatgaaatatctagtcatgcatgtatctttagtagcagagttagcaaaggctccaccaaatggttcacttttgttatatgcaagaagagacgattggtggtggaataacaataatatgttggtaatctttttttctttgtcaacatttataagtataataataaattgtattcattagtaataaatattcctttgattt

SEQ ID NO: 30721 - DNA, 4279 bp, Arabidopsis thaliana landsberg
caatatctttctcgcttgggactgcaacaattgaaaacttatgtatcatactagcaataatggataagaggtaattatttagcatagctatttatatgtccccagacaccaagatttaatgacccaccgaatgcaaacattgaagtgtgaactggactcttagaaatgatattcatctcacatctagaaactttgaactgttttttggttcacttaccggattctctcgacctcggaactcattatgatcattaccaagtacaggagcagtcaggggatggatcccaagctttgcttggacaccttctaagagctcatattcctcgctacagaaattggtgaccggtcattgaactaactaaggaaaataagcacaaacagaatttctggtgcaagtttaattaagggtaactatgtataacacaagacaaaaaaaaaggccttttatttgatggaaaagaaggtcacgccaatatattttcaaaaactagctatgtcatcagtcagatattcaaatcataccttgaaataggagcaaacacaaatatactttccaatagcgtgcctgctatgatagtgtcatcagctgtgtcaatacttttactaagaccataacttcgcagtacatcatcagctggaagtttgtagatgttgcaaccctattaagaaggtgggtgcaagcagaaatgaattgactatatatgtatattttattggttaatgaggtaactgcaatgttgtaacaagaaacttgacaaaaattatccatgaaaattcctagaatagaaattggaattgcaataatttcattcaaggtaagctacgttaagcttgagaaatgttagaccaatgcgccaattagtctttttctatggcctaagactatactttcttatagaaggtaataacataagatcaagtttcttacagtataagcacaccactgaacagaaagcaattaagtgaaatgatcgctgcaaaactaggatttaccttttttatagacatggcaatctctcccatgtaataagcacagtttagattcaggttggactcgggacttgaatattctggattatcatgaggtattttcacttagcaaattctactgaatcataacaatcagcctctataagagtattttcgaatcccagggtttatagcacctagaagaatcgtaagaacaaggaagatcacaagatcacacttttctaactgaagtgaaaattgtttgataaaagctatatttgaattaaggacgagacaaaagagaaaaggtaggtgcttcgtaccaaggtgcttcataccaaagtctgaatgatctttgcaagacaggattgctatactccccttgcgatcagatacagcaacggaattagcatccattagaaaacagtcagcaactaacctctgcgctggatcacaatatatttggtgaagtttctttgattccttcaataacataaacaaaaaatctctaatattttcagccaaaattaagtaggcaaacaaagagaagacatatatataacaaaggaacaacagaaggtaatattcagcaacagaacaaacctcgtgataagaataaaatagaacaccatcacggcaatccccaacaacaattctagtgaagtatgtgcgcagagatgttatcatgaaacgggtccttcctaccgcaaacctcttcattctctcaggactatcgttcggaaaaccacagacatagaactattgaagaccaggatatttgttagtagattaacatgctaaagaattggcaacaaaactatagatcatcaaagtgaggcttacagcattgccggcagatgccaggaagtaatgatcaaggtatggacagattgcaagtaccatacccggccaagtggttgaagaggccaatcttaactgccatgtttcagcttcatcaagtttgattccatcatagctgtaatcatctggactgctgcagaggctactgcttgataggttttctgttgtgtatcccacaacatcatggaaaggtgatgtacgttgggaagacgaacaagcctttgaacaaattgtcattgaaccactatccgagttttgagtgtgttctaagcagaggatgattactcgtccttttgtactgtaacaaggcattcaaaggcattcaaaggtcagcataaagttcgtcttacatcagtctccactttcactccatggtcaaattaaaaagtggcaaaaaaacagatttcaaacctttcagcttcaccactgggtagtatagcaggaccagaagacaaactcgtcccaaccacaaggacatgttcatttcccacacgtacaagctccattgactttccagtctctccaggtttgagcttgtaggatgataacactgacccactgagcgggtctacacagcatatatcagacgtacatgtatcatacagatcagttctcatcacaatcaataatttgctttcactgtggtagataacctttcgcggggtgcctccaagctgaaacttttgcgcattacgccgtttgctgtgcaccatctccacctacaaaataagcatatacatcaggctatcatagccggacccaaataatagctccaacgcattcccacaactgtctataatgtatacgactacgaaaacacaaatgaaagcaattagcaaattcagttgtttgttggtaactatttttcaagtaaaccatatcaaaacattaacgattgatcgatggaatttgcatctttgtccaaagagcaacaaaatggtcagtgaaaatctgaaattaaataattaccagatgtaaacagttctctgaaacaaaaagaattccttgggggcattcaaacgagcatacaggagttgcatgagtagaaggttggaatgagatggaagtataggaaaggctttgtcgagctgtttgtaacaaccatggcctgtcactaagagctatgatgtctgaatccagtgaatcactgaacggaaccaagaaaacaggtgtgatgccaatgcgtcgggtagcaattaacagaaggttgactggtaaattgtcttttttgcccacaacagtgtccatctcctctttacagtgactaaaataatctggacaattcaacccggatgaatttgaaaaaggggcccactcaaaacggagaagcatcccatttctcaacccagaaaggacataaagttgatcaactaacacgagtcttacatcttgaggaatgcacccactaataacagttcccattgtatttgttagcgataccaacccagaagcaaggactcgaacaccaacaccatcttctgtgaaggaaaggacctcaacagaaggcttatgtgtgccaatcaaaaatgtatagccttgctccatagcagaaggaatcgcagctttgcaaaaattatccggggaagaatcacgggatctcttttttccaatatgtttttgaggaactgagatgcaggaaacttcatactgcaatgttactcgttgaatttcatagatttcacagcattgagatgatactgatttgaccccaagaatagacaagaaacaagggttagacgtagagacaactatcaaattttgaccaactgcccccaagctgatactgacattttctggaaaccacgatgagaaaaatggtgaagaaacaggaataccatcagaatgagcatccattgtaggcatgcacagcctaattgcatcttgatgaatctgaaccaacaaaccatcagcaacaagcccacatgcgaaggtgcaaacatcagactggaaaccaactgaatcagtgacatctttaaaacttaatccaactgataaaaccctggtctcctcaacaaatgacaaaacaagaaatgaatggtatacatcagtaagcttcattttaacagtccaagtaccagttattccttgataaacaggcgcggttttcagaagtttttctacattaatgccactacgaataattctcagagagccttcaggggttacaccacaacaagcaaatatttggtctcgtttttcattctggtcatccataaccgaaaaatccaagatcggagcaatattttgtatggaactcatccaatgtagcttctcagttcccaatttgaaaaccgttccatctgccatttctgcaaatgtagcaaggaatccaccttcgatccataaaatatccttgcatggtaaacctttgtataaacactctgatagaattactttaaccccatcatcttcatatatgagttcaaacatgaaaaaatcaccattatct

SEQ ID NO: 30722 - DNA, 4912 bp, Arabidopsis thaliana landsberg
ttactatacactgaaaacacaaaaaattaatcttttattgaatctggatctgtttctgtttcttgtgtcattataagcttagaaatttttttgggtcttgagagaccaaagcttatttctcattctatctggatttgtttcctgttaagctaaaaaaagtttgagtcttggttctgtttttggctctgtttctgttaacgtcaatacaaagtggttattggtgaggggacaggatgcttacccttgatatggctatatctacttactgtgtgtgctgctgggaggacattgcaccctctccctgttaaaggacccaaaactgtcaagcttcaacttcagacttcacgtccttataacatcgcacacagaggttccaatggagagatcccagaagaaactacagctgcatacttggtatactgttgatctttcttgatcaatctccttctctttgatgatttccgaagataagaagtaaaacattttttttttcttatgatagaaagcaattgaagaaggcacagacttcatagaaacagatatcttatcatccaaagatggtgtgctcatatgtttccatgattgtattctcgacgaaacaaccaatgttgcgagccacaaggagtttgcagatcgtaaaaggacatatgatgtccaaggattcaacattactggctttttcacttgtacgttacatcaattcttcttctgtttctaggtctgagtcaatgcatgctgctggattcggtctcaggatagagtcatttgctcaaaatatctctcgcacataatctcataacagctagagaagcatctaataaagcttcaagttggtttgtttgagtctgaatgatttgctaacaagtggttcctctttcattgcttgtagttgattttacacttaaagaactaaagcaactacgtataaagcagcgatatgcttttcgggatcagcaatacaacggtttgctcgcctttctttcctgtacttttggctgttggaagatataaagtaagaactgcataatacaggaaatctttaaccatgcccatatcttgcttgtatttcaggaatgtccctatcattacatttgaggaatttcttaccattgctcgggatgctccaagagttgttggaatatatcctgagattaaaaatccagttttaatgaaccagcatgtgagtcacaatcctaaaagcttgacttctactcttactgaaatcctttagagtgacttttaaaaagccacatataccatttggttcaatttgcagaaaatgatttctttttggctttcactcccactgcaggtgagtcattaacctttgcttctatcactgttatatatttgcaggtcaaatggcctggtggtaagaaatttgaggataaagttgtggagacacttaagaagtatgggtatggaggctcgtatttgtccaagaagtggttgaaaaaaccactatttattcagtcatttgccccaacttcactcgtgtacatatcaaacttgacagactcgccgaaagtccttctaatagacgatgttaccatgccaacgcaagacactaaccaggtcaatgctctgctcgtcgtattgtttatgattcctgaaagttcttttgcttctattaaaagtgactgattgatctttcttgcaaatctaagcagacatatgcagagactcacatcagatgcgtatttcgaatacatcaagcaatatgttgtgggtatcggaccatggaaggatacaattgttccggtaaacaacaactatgtgctagcccccacagatttggtcaaaagagctcacgcacacaatctgcaggtaggatttatttaagattcatccggtgactgagagtcagtaacacatgctaacttcctgaccatgttcttctgttacaaacacaggtgcatccctatacgtacaggaatgaactcgtatttcttacactataactttagccaagacccgtataaggagtacgactactggatcaatgagattggagttgatggactcttcactgatttcacaggcagcctccataactttcaagaatggacatctccattacctgatacctccaagtctccacgacagcttcttagtcaaattgcctcattggtcctcccttatgcaaaggcttgaagttccacataaacacctatcagtaatcctattgtttgcaattaattgtattgaataaagttacaatgattattctgaagaagaacacagttgttaagaagcagaggagtcttaaagatcaaacaaaagaaaaaagacacaacttaattaaatcgtaattgtttacttcacaagattaaatacaaaagttaaaaaggactttgtaaatcttggaacacacttctacaataccaagaagcaggaaacaatttctctatcatactgaaagatggtaaaacaaatcaaactcaatccccctcaaaagatgtttccattagacacaagaggttgtacagcaagggaagcaagagagccatttggggttgcgatcagaggcacggtccgcttctgttttaggagctactggtttaggagcttcctctttcttcaatcctacatctccttcagcttcagtggaaatcttcggtgtctctggctgcgaaggattcctctgcttcttttcaggcgtggaaccttgtaacccgcctttgtctgcattccccattctacgaaatgcaacaacaaaataaagtgagaaaagaaaacacatgaaacggaggtaagtgatcaagaaaagtttttatttcttacactggaaaagcgaaagacttgacacttaaattttctgagcgacgagaaacagaacgatctagtttattggttttgttgttgttgttagcagcttcattagccatgataacctctcttatacttgctgcagctttttgttcgtcttctttacttgcgcggtaagctttatctgtttcagctgctttcttgcctatatccaccggagtttttacctccgccgcagctcctacggctcctccttggttcacgttgtggggcgtagatggtaaaggagaaggcaaaggagaagttattggtgaaggaggctgaggaaacgtgagttcgccggatttgaaataatctccaccggtgaagctattgttacccatatggatgctgaaaagagattcattggagatagtactccattctggagctgtagaggttgttctcgcgaaaacatgtgaagggattctgtaaggaggtgtattaggggtagaggtcgtcgttgttgttgtgttgtttgttgatctttccatgacttgtgtcggaggagattgctctacattgttgtggttgtgattctgatcaggtcttggttcggcttctatggaagaacaagaagaggaagacgaagaagaaagtcttatgattggatcttctgtttcaggtttagatgctaagtttctcgagctttggttcgtggggctaaagaaactttgttcttgtgatgattccatgattccaaaacgtaagaatctgtttcttgggttttaagttttaactacttcttgccaatattttcaatctgcaacgtacaagagaaagatatagaattatagatttcattaaagaaaggaaaaaaaacatcattggcattttacgaagagattgtaattagccttacgtttcagaggatgatgatgatgaggacgaggacgaggacgatgaacacaagcaagaagagattaattttagaaaatttcagaggatgtttttttttggtgttggaatttggagttgagagtttaaaggacatgcacgcgtcaaggaggtttttacttactgaaaataataattagtgcccaattttaatcaactatttttcgccattgctaagtaaagaagaagattgatcattttaatccggtttcggtttctactcaatatggttggtttactttaaccgggtctaaataaaagtcagcgagtgaatcaaatcgacggtaaagattaactcaaataaatcaacggacaggataagcgaaactcttaccataagcctcagggttttcactactggcgagaattgaaagacgcttcgagagagatagatcatctccgttaaaccctagcgattgggtgggtacactttcgtcgattcttctttttctttatgttttaagctgtttgtttctttcgattttgtgattcgatcttttaatccgatgtttcattcgtcgatccgaaaactagattgttctctgtatgatgattttctgctcaatctttgtttgtgattctcttttgcaagcctatgaatttcatttggactttcattttatggttctgactactgagtgatgcgtatatgtgtttagtgagttgaccttgtaagctttggttaatttttcttaaattctccaatcgaaatgaccttgttgctggaactagaaatttgacgtgtagcaaaacttgagaacagatcatgaagtttttttttttttttttatgcattgtgcatgatttacttgatgaaagaatgtttttttcttgcttttattgacgattgaattgatgggtcttacgcgtgtgtattcatgagtttcatcttctgtaactacctttttctgaaagcactatctatgttttggtatgtccttaatttgcctaaccaccacgtgattgctcatttgctctttcatttgaatctagaatacggatatactccaaatggctttcttaagtaaagttggaaggttattcagtcagaccagcagccatgtcactgcctctagctcgatgctacagagcatccgttgcatgtcttcatcgaaaatctttgttgggggtaactatgactctaattcagctgtgcgagagaatactttttttttgttttgttggtctcaaaaattgtctatgtttc

SEQ ID NO: 30723 - DNA, 2153 bp, Arabidopsis thaliana landsberg
  unsure (1)..(2153): unsure at all n locations
gctgctgccattgtcgacgaactcccttacatcgaactgtttctttcagattgaacaggcttcaagattgttggagaaccctttatgcaccgtggttggggatttgtaagtacaattttcatgtttctcttaatcagaaattatttacaaaaagatttgaacttaattttttatataacaggcgtttaagagagattctccattggctatagacatgtcaacagctatcttgaaactctctgagacgaggaaattgcaagaaattcgaaagaaatggttatgcaagacgaattgcgcagggaaatcaaattggaacccagagccaaaccagcttcatctcaaaagcttcaaagggctgtaccttgtctgcattgcaatcacagtctctgcgtttttggtgtttgttctcaggatgnnnnnnnnnnnnnnnnnnnnnagaaggatggagagaatatcctcgatgccacgcgcttcttggtcagcttctcctacattgcggctgagagaattagtgtttgattttgtggagattgtggatgagaaagaagaagctattaagagaatgttcagaagaagcgatgactctaataacaacccatctcatgtaggggaagtccaagctgatactgaggtaccacgaaattgatgagtagattccactctataggaagaaaattgttatgtataagaactagatatagctaacatgtaagtcaatattcgaattgtaacttagcaacataaaaagctggtaaagaaccagtgatcattagtcattaccatgcttaatttggcattgacattggggatttatgtgatagggtttggtactaatagaatatgcaacacttcaaaagccaaccaaatttggatatataaactcctcaaaaattttaaaaaggttggatctttgtatgtatatgtacgtctaattgtacccataattgtttggtaatcattattgccacgttctatgaagtatgaactcatgaacttttcttttatccaacttggtgcttttatcgtatgctaatttgtttttgtctggcccacccatttgctattttattggttttttttatatagttctgttaatttattgccatcatctctgagatagtttcagttctgtttcttgatcggtacagaatccaagataaattatatacaaacacatacatatatgtaaaaaatctaagtctttgattttaggttcgatacaatgtcaataaagttttgtcttttttgtctgaccaatttttttctagttgatgttgatgttaaaatcaatggtcgttaatgcctgttcgatcagatttttttctaactccgaatcatcaagtgggtatataacaagcccgtaaaaatcactccttttcgattaaaagatgggatttttcgtgatgattagagatgtttccatgggatttatgctcctatgtatttctgctttgtgggttttgccaatacaaggtgctggtagagaaagtttctcaagaaactcttcttcttcttctctgccaagctctgtaaacgttggagctctgtttacttatgattctttcattggaagagcggccaaacttgcgtttgtggcggccattgaagacattaatgctgaccagagtatcctcaggggcaccaagcttaatattgtcttccaggacactaattgcagtggatttgttggcaccatgggaggtacttttcgtaaactgcaatttgaattatgtctgaaaagttgcttgtgaaaatgccccaacgaagctggggtttaatagtaatgaggttattcaaattgcagagcttgtcttgttcataaacctcttgttaaaatcttcgttttgcgcatggattgctttttctgaatgaggaagtagattggtgatatgttttcttatggtgtagctttgcagctaatggagaacaaggtggttgcagccattggtccacaatcttcaggaattggtcacataatctcccatgtagctaatgagcttcatgtacctttcttgtcatttgcagcaacggacccgactctttcttcgcttcaatacccttatttcctttgtaccacacagaatgattactttcagatgaatgcaatcacggattttgtatcctattttcgatggagagaagttgtgcgatct

SEQ ID NO: 30724 - DNA, 2248 bp, Arabidopsis thaliana landsberg
caatttccgatattgcaaaagggctccactttcctcttgtctcttttgcagcaactgatccaactctctctgccctgcaattttccttctttcttcggactacacctaatgatgcccaccaaatgtctgcccttgtggatctttatcaatttttatggatggaaagaggtgatctcagtttactcggatgatgagctcggaagaaatggagtttctgctctagatgatgaactgtacaagaaaagatccagaatttcctataaagtgccgatctcagttcattctgatgaaaaattccttactaatgctttgaacaaatccaagtccatcggtcctgaagtttatattctttattttggtccggacccattgctcaaaatttttgatatagcgcaaaagctgcagatgatgacccatgaaatacgtatggctcgccacagactggctctctgttaccttagattctttgagtgacaaaggtactctaaaacgccttgaaggagtagtggggcttcgtcaacatatcccagaatccgtaaagatggaacatttcacgcataaactgcagagcaacagatcaatgaatgcctacgcattacatgcctatgatacagtgtggatgattgcgcatggcatcgaggaattgctgaatgaaggaatcaacataacgttttcttactccgaaaagttacttcatgcacggggaaccaaactgcacttggagaaaatcaaatttttcaacagtggggagttactacttgagaaacttctgaaagtaaactttactggtatagccggtcaagttcagtttggttctggccgaaacattatcggctgtgactacgaaattatcaatgtaaacaaaactgatgttcatactgtcggtttctggtcgaaaaatggaggtttttcggttgtagccccaaaaacccgtcattcacagaagaagactagctttgtttctgatgaaaaacttggagatataacctggcctggtggtggccgtgaaaagccacgtggttgggtcattgcagattctgcagatccattgaagattgttgtcccgagaagagtgagttttgtcgagtttgtgactgaagaaaagaacagtagccatcggatccaaggattttgcatcgatgtcttcattgaagcattaaagttcgtcccttacagtgttccttacatatttgagcctttcgggaatggtcattcaagtcctaattacaaccaccttattcaaatggtcacggatggtgtaagtatccactccaaaacgttcaaaactgattcggaaagcctctgaagtcatgaacattcccagactaactttcactgtgataatgggtggcttttccttgtttttcccctttatttcaggtatatgatgctgctgttggggatattgcaatagtcccaagccggtccaagttagtggatttctcgcagccatatgcttccacaggccttgtagtggtgattcctgctaatgatgacaatgcgacttggatctttctgagaccctttaccagccggttatggtgtgttgttctagtttcattcctggttattgccgtagtcatctggatcctcgaacatcgcatcaatgaagatttcagagggccaccccgaagacaactcagcacaatgctcttgtaagttcagctcgtaatattcactgcacttgatagttcattcttggtgattttctgatacatctactttgatttgtccctgcaggttcagcttctcaactcttttcaagagaaaccgtgagtagccttaatttcatccatccatctttctttaaaaaccatcaagcaagagaaaaaaacaagtttagagttacatttaagaatctgtccgatacatattcaactctgtattgattttttgccaactcagatcagtgatatttctgttttatcctgttatgtcaacagaggaagatacaataagtaatctagcaagactagtgatgattgtatggctcttcctattgatggttctaaccgcgagctacacagcgaacctcacctcaatcctcacagttcaacagcttccctctgctattaccggtattgatagcttgcgggcaagtgaggtacctatcgggtaccaggctgggacgttcactttagagtatttaacctacagtcttggcatggctcggtctagactggtcccacttgactcgaccgaggagtatgaaaaggctctaaagctggggccaaccaattggggaggt

SEQ ID NO: 30725 - DNA, 3365 bp, Arabidopsis thaliana landsberg
tggaaattacccgagcatgtaactaaaaaacagcaaacagagattagatagccaaaacattttattttttttgatagcttgcaatacaagtcaaatatctttgatttgagactattcacatataattaattcacgttaatatatgccgagaagttgaatatatatttattttgatttttctctgaataacacggaattctggtcttgatgaattaaatttatacggtcaattaaatagagtgagttcttagcttattccaaggaaataagtcaataacacattacagttaattttattttctgctacatctatgacataaagtccaatatttatgcagtttttttttacagcaaaaaattctatatattattagtttgattcgaaaaagttggtagagaaactcaaccattctgaaatcttataacttacatggaaaaagataagattatgagaacaaacaccttttacaaaaatgtcagctcggatattcaaatttatagaaaaatgtgagatcgaaaaacatcaaaaacgaataataaataagattaaagaattcaatttccgtctcaaatactggctccgtattttcctcttcaataattttcaccagctcggtacaattcgtggcgaaggaaaccaaatctagaattctatgtatcgccgagtccatagcccaagtaagggcttccacttcagcttgaagggggagagagctcttgtcttacctctaatgccaattaagctccttgatggagtgtcaatcacgaatccgaaaccggatgtgttaccatctgctacccaagaagcatccacttgacaacggagctgtccgttgttgttcgggatggcttagagcaaagttgaactctcttcctcgttttccgctgttgttcaatgatttgcgcaagtctccagttagtggcttccgaaattgcaagctgtaaggtatcaggtggcaaaatatctttattattaaaggtattatcattcctacctttccaaacataccaaagaatccatggaaatgattttagaacctcctttattgctcccaaatccattgctctccaaagaaaaaaatcaaaatttgtaaagattgacgtgcttgggaagacacccagattggtgggatatattggacaaaacccaaacttgcattgtcagtggacactcaaaaagaagatgatttatagattatctccatcgcatctcatacatgtacgatctaacccacaatggagatataagagtctgctagagtcgctaggcattctgaaagggcttgccaaaagaaatgtttgattttcctacatgttcttaacttccacacttgtttttaaggctctttgtgcatggttcagtgatctcattctcctcgtagtactattgagtcgctcgaaaatatacagatttcacagaatagtgatcctattttgtgtgaatccaacaaaaatcatcgacttggactctatcatataactataatatatattctcttatctaagaataaaagattatatatactcggcgatgagtcgaggatccacgtaatatattgtaaagaaaactttgtacattaaatttccaagatcacaagttataagcaaggcacaattataataaaaaaaaattccgctacgcataagacaagttaataatgtaataattttaacagccgcctccacacccaccaccacaacctccaaaaccgccggcgttatttccatagcgtgttcgacggcgtgaactcttggtggtagtcttactcgactttgaaacaacaagtcctccatctttgaccgttatacgctttttaagccccggcggagtcggctgtttcttggccgttttggttacttgcggcggtggaagcaaaggtgaaatcttcttgcccgtttcaaccacttggggcggagatgctggctttttcctgaaacagcataagatactaaacatcaccatcgttataggaaaaataaatgtgatgtgaatttgtagtgattcgtatagatgataaagcgaccttacatatatagatagccccaagtttccgttgacttttatgtgcgtagataaagttgccgacatgagcaacatggctctttatacatattcttctgaaaaatacaagagattgcaaaggaattatcaatttgtttgcaaataaatgtggcaatgtctctgtttatttactaaaattttaatggatagtaaataaataaatggaatcaacttgaatacaagataacatttaccaaactcctttaaccaagaaaaacataattttaaaaaaaaacaattaccaaactacgtactatctagttcaaccgagtattcgttgtatatggtccagaattaaataaagaaaaaatcggtttttaagaacaaaagaaactcaaatggtattgccaaccgaactagttgaagcttaggcttagccaattgcttgtaaaaacaagtctatggtttttaatcatctatattttctctttgacatggtctttttagccaattgatataaagaaaagttaaaaactctttaggcaagtatgaaagaaaagggttgtggtggacaaccaagttgtagaaattctatagccaagtatggctaggtgacgacagaggttatattaacatggattttgtggattttagaagactatgtatgccaaatctagattttatatatatacgataaattcatcaatgactgtttactgtatattggtttaaataaataaataatttggttaacggactaacgattaaatatcagtgttctaaaaagtagtttaaacggttaaggcttagacatggtaagcaagcaaccataaaaaccgtgacaattatcttctcagtattggaattaggcgtcttgttattatgaggagataaacatcttatataggcggaagcgattatagtatttaacagccgccacatctttgagactacaatagaggaatagacaaaacagagaaagatgatgatttggatggaaaatgccagaaccaaagagaaagcagagcatcggttatgggaggagaacttggtgactgtcgaggatgaatagctttgcgtggatgatacgtgagataatagctacaaaggccttggagttaggttgtgaagtcgaattaaaaggcgctgattttgtttaagtcatgtgttgtagtacttgcatgcttgaaaaagaatcttgataatgatatgaattgtagaccctaattcataccaatttatgggagggggagctggtaaaatagtcagctttaatactgagtcacggaaataaaagggtacgatttgaatttgtttaaagaggatgatttggtgttagaatctccttcttaaacattttttc

SEQ ID NO: 30726 - DNA, 1253 bp, Arabidopsis thaliana landsberg
ccatatagtcactcatctggactagatagattttgaagtcctctagtttctatgtagttagatcctccattcatttctcttgactttcgtgaggtttgagaatccagtcatgtaacccatagcaaatgattcgacaactgtattacccaatgtcaccatctcaaataaagaagagaaataggattataggaatactgatcttccatgtgatctaattttggatatatcgcacacttatcaaaatccattgtaaattgtagttttttgcttgaaaagaaacgccaatagcatcagcagaaaaaagctacacaaatagtaccaccacttttttgtttatctttagaaaaacatttttattactatactcacaaaaaactactaagaaagttatagcctcatgtcaataattcacaatcatgtgcggtgtcaaaaaaatattagctttaacgatatctacactcagccatcaagcccagataattgtatttaagtatttgagtttttaatttgcatttgagtaatttactcgtaaatcatagctcatggaattaaactaaaaatttcttaaaaaaaggataaaaatccagtaaacgttggaattttatggtaaaagttcgtcttcaattcttacgaaactcatcatagctatcaatatcatacctattaaaatcattagaatcgtctagaaaccttttttaaaagaatttacatcgtcaggtcttaagaaacaaaatatttattatttaccagatacagacataaaagctgacgtgttgacattttattttgatggaaaacgtataaatgcacgacacgtgctcctactggaccacttgataagttacgtaacttatcaagcttaccgaaacgaacacgtgataacagagaactaaattcacaatttttgttattgataaaagaaaatatttaaattttgaaaaagtaatattaacatatactagaagctatataattagcaaataatatagaaatgaactacttatctaattttagttctaaattatttaccaataatttgttcatatcttgaaattgttaattgtatatcttaaatctttgactgaatttaactcttttaatattaaaataattaaataattaatcttaaggtatttaataaataaaaattactaaaaaaactacaataaaagatctatatccaataagaaaattaataattatattgataattagggagcatatgcgttattataaattacaacctaacctac

SEQ ID NO: 30727 - DNA, 1119 bp, Arabidopsis thaliana landsberg
  unsure (1)..(1119): unsure at all n locations
gtgtacaccgtagatttttttaaggcagggattagtgatcaacatcagttatcattcctggtgtgtttgtgtcatggctttttatcaaaggtatggattgtccgagttactcatgtgtcgtctctccagcttcctgcctgtttgaaacttcttctactacttctctatggatggattcgaacattgactcttcaactccaagacccttcaagatcttcttcaacacacatatcttcccatcaagtccctccttagattcattgctatgcatagaaacccaaatcctcggggcataagcactcctcacatcatcatcattgaagatctgctggcataatgctgtcttcccaacaccgtattctccgacaaccacaagagtcttgaacaccttgtaagacttttgatccaacaagaagtgttgcaatgatttgatctcattctcgaaaccatagatgtcatggcctggaagttcagaatcagtttccacacgatcgtcctcttgttttgtttcgtcaccagttgtccctagccattcgttgtatctatcagcgaaccgatttgtgaagtcaactctgcctacacttgttaatccgcgcgatgaatcttcttgagtcatttccaagcaaaaactgggacaaaaaaaaaagatttgcaggtgaaatcaactaagttttgttttttcttttttttccccagaaaaagaaaatgaagcaaaagaagaagaaaacaggggaagagaaaaaaaaaaaggaaaaaaacaacactactaattttttattttatttttcgccaaattggaggggggaaaaaaagacgaagcgaaaaccccaaaaattgaaattgcaattgaatcgaaggnnnnnnnnnnnnnnnnnnnnnnaagaatcagcgtcggaaaatgaaaagcgttactttgtttgtgagattcaatgtgtgtttcgggttttgatttcagtggatttgattgcggattgtttcttcatgcttctgtcgaatcgaagataaattagactgattcaacttttacaatgcaacatctttaggctatgtctgtgtgtagttgatttcaatggcggccaaaagctttcttctagcggcttcttctttcacagaattctt

SEQ ID NO: 30728 - DNA, 2411 bp, Arabidopsis thaliana landsberg
cgacgaagagcctccaaggaacgacaagaaatgcaaagatgagttgatgaacaagtctcgtggtcttcctttagctgccagactgttggccacgcttgttcccgtgtttgttgacgatgaaaatcctgaccagaacggttctacccatggaactaccgaaccagataacacctccacaccagaagagactggaactattccacctcggcagccttgagaagattgaagatccctttcccattgtgttcttcttttatatttgcttttctttttcatgatttattgtttgagtttctctgttttgatgtcatttttctgttgtaccaataatccagaatctccaagtagagtttctccagtgccactctatgtttcttgaattaagtgtctgaaaacgttgcaatttttaactgaaaaaaaacacaagtagagttctttgtgcactttctcttatatctgcagtttatcagagttgcttactcttagcctctccacacttgaagattgagagacatctcagttaatcatatatgatatatcaataatacatttcttctttagaagcacaactatcacaaggtaacccatttattcaaatgttcacaaacaacaacacttaaaacttaaaagcataccagcaaaagacatcaatggaaaatgaggaagcaaacacacaacaacaacgaaagaacagcaaaggaaataaaacagcagaaaaaaacttgggaaaactgagaaactctcagtttagagtcacttagaccagattccgacaccatcagtggggcagaaactaacttgagggcattgatacttatccaagaattccagctttggaaacagtctcattaggtccctccactccacttttagcctgggaagaaatttcagacgtaaaaccttgacattgcatgtcgttatctccgtctgtggttttctaaatccagtaagtttgattcctcctttgatgtagagtttttctagaccaccaaggttagcgggctcaagccataagggaagattttcatcaggaaaacactgcagatccagtttcttcaatgtcaggggaagctctggttgttcgttatctacctttggaccgaaaagtttcctggtcgcagttcttataatcccagcaggctgttcttttttatctacagcagcatttgctttgtcttttttcgcctcttttgctttgtctttttttgcctcttttgctatgtctttttttgcatcttttcctccatctacacctttggcctcaggatgttcatttatacctccccatgccactttcaacttttccagcttttcaaaatattttacagccttaaacacatctattatgccgaaaccccctttgtttattgaaatacttagctttctcagcttcttcaagtgcttcagttcagccagggtgcagaacgtctcctcatcagtagcatcactgaccacaaagcccttgagaacctccaagttatccagccacgacaacctcttgggcatgcggtctatcatgtagcaatctgtaatgtccaagtagataagcgccttgagtgaatctatcttgtctggaagtttctccagattatagcaagctctgagatccaagatgatcagctcacgaagcttacagacagcatcgtcgagtctttcaattctcgagatcccttgaaaactcagaagcttgagtttagtcatatacttcaagtttttcataagatcaggattctccacctcgatgtggcgcttggcggttctctcccaccttcccaaataaaaaaccttgagcgccttgtatgtaggttttgataagctcaacttcttattctgtgatgactgatcctctgagagaccacttgaatgcgaaatccgggaacctctcagaaacattgaacacggtttcaatcagatgaggcttctccatttttttagcttttgcttgtggctggcttgacgacccttccactaggcataccttgttcagtcttgattggctcatggttggcttctcctttttacggaacatatcaaaaagccctatctccttggagataagaaccactgaagaatgcacaaaaggggccatcttatagctacttggcttcactttgcgtttgacttcaacaggttcaatcaaatttctcttcttgaaatcatcaagaatgtccttcacaacatcttcgggtttctgaagagtgcccgtcttggaaggtatgtgttgagaactcaggatgccctccccgatccaccaatacatgagcatcgttctattcacctcttggttctccgggaacacggcaaaactcagaaggcagatcttccagatatcatcagtaaggtccttgaattcacgtagcacatatctgaaaaccgcgagtcttttagatcttcttcgtttgcatggatac

SEQ ID NO: 30729 - DNA, 3922 bp, Arabidopsis thaliana landsberg
ctactgacctaatccttgaattattgttcgaactttaaaaataaaattttaatattgtaaattaaacaaacaatataacgttgttagcatgtgtttatcgtgaaatgtgaatgtaactaaaaatattataaaggagttcttcctttcttaaagcatatgctaataatagcgtttggtcaaattaataaattattagtttatttagtcgtcaacaaattaattagttaagcagacaagaatcgtttttggagatagagattctcacttgcatttcactctcttgcaatttaacatattaagacaaacacaatttttttgctttagtgaattattagccacgagtcacgttatatagatatgcaaatctcaaaattaattaagctaagacagcagtatttgataattgagattacaaattttaaattttgatttttcatattttaaaaataatattataaaataagtaattaatctttataaaaaaatattctaaaagttgacaaaacgacaaatataaatcgaaaaaataggtgaaaagttattgtaaagtgtttttccactgagctcacagttcactctttggttacaaaagaaacaatcagttaaaatctcagtcaatcattaaagagcgtgtgatacacgtgcgaccaaacaaccgtacgatctcactcacttccggtcttaattcttaccgcgtcgatccaacagtcgatggggttaaatcgggatgtgagttcatcgaagcttctctctcttacaaccatccacgtttcccaataacatcacgccacgtaatatccctaacaacaaatttacacattcaccctcaagatcagttacacatataataatcgcagacgctctccatttttctccactacgaagactttctcctatctctctctctctcattagaaacgtgtttttttttaccggtcaccggtttatggaatgactgattaccggctacaaccaacgatgaatctttggaccaccgacgacaacgcttctatgatggaagctttcatgagctcttccgatatctcaactttatggcctccggcgtcgacgacgaccacgacggcgacgactgaaacaactccgacgccggcgatggagattccggcacaggcgggatttaatcaagagactcttcagcaacgtttacaagctttgattgaaggaacacacgaaggttggacctacgctatattctggcaaccgtcgtatgatttctccggcgcttccgtgctcggatggggagatggttattacaaaggtgaagaagataaagcaaacccgagacggagatcgagttcgccgccgttttctactccggcggatcaggagtacaggaaaaaagtgttgagagagcttaactcgttgatctccggtggtgttgctccgtcggatgacgctgttgatgaggaggtgacggatacggaatggtttttcttggtttcgatgacgcagagcttcgcttgcggtgcgggattagctggtaaagcgtttgcaacgggtaacgcggtttgggtttccgggtcagatcaattatccgggtcgggttgtgaacgggctaagcaaggaggagtgtttgggatgcatactattgcgtgtattccttcggcgaacggagttgtggaagtcgggtcaacggagccgatccgacagagttcggaccttattaacaaggttcgaattcttttcaatttcgacggcggagctggagatttatcgggtcttaattggaatcttgacccggatcaaggtgagaacgacccgtctatgtggattaatgacccgattggaacacctggatctaacgaaccgggtaacggagctccaagttctagctcccagcttttttcaaagtctattcagtttgagaacggtagctcaagcacaataaccgaaaacccgaatctggatccgactccgagtccggttcattctcagacccagaatccgaaattcaataacactttctcccgagaacttaatttttcgacgtcaagttctactttagtgaaaccaagatccggcgagatattaaacttcggcgatgaaggtaaacgaagctccggaaacccggatccaagttcttattcgggtcaaacacaattcgaaaacaaaagaaagaggtcgatggttttgaacgaagataaagttctatcattcggagataaaaccgccggagaatcagatcactccgatctagaagcttccgtcgtgaaagaagtagcagtagagaaacgtccaaagaaacgaggaagaaagccagcaaacggtagagaagagccactaaaccacgtcgaagcagagagacaaagacgcgagaaactaaaccaaagattctacgcgttacgagcggttgtaccaaacgtttcaaaaatggataaagcttcgttactcggtgacgcaatcgcttacatcaacgagcttaaatccaaagtagtcaaaacagagtcagagaaactccaaatcaagaaccagctcgaggaagtgaaactcgagctcgccggaagaaaagcgagtgctagtggaggagatatgtcgtcttcgtgttcttcgattaaaccggtggggatggagattgaagtgaagataattggttgggacgcaatgattagagttgaatctagtaagaggaatcatccggcggcgaggttgatgtcggcgttgatggatttggagttggaagtgaatcacgcgagtatgtcggtggttaacgatttgatgattcaacaagcgacggtgaagatgggttttaggatctatacgcaagaacagctcagagcaagtttgatttcaaaaatcggttaaaagggtgtgttttgggaagtttagaaagttatggggtcaaatcataattaattcgttttagtggcttcagtaattttgtagattttagttttgtaagaaaaaaatcttaaaatagagcgacaagtttcttcttttgctctatgtttgagtctgtatcgttttattgttgtatctcctcaatgagtaaacttgtatatattgatatgagtaatatgagttagttactgaaaaaattaatatttctacacaatttcatatgataaaaaagaaaaagaaatcgagtataaatggtctaaaataagagactaatggtcatgatcactgattttgtacatatggtcaaaaatgtctctcctaacacatcaaacttaggaagagagacaaatcttaagtaagttaagtcgagagggagaccatatgcacagttttcttaagtcagtgtgataatgtttcctcttgtctaatcaataagacacaacacacataaaccttagtataatactacatggatcttcgaatacacagacagagtcacagacaagaaaaagcaaatcacttgcttttgtcttgatcatttccaatatctacaataatagaaatcttgaagagattattgaatctgaaatctgctttgtttgtgcattctcttcctcgatcacctctcaagatcctctagcagcctgaccaatcctcaagaatcaagttttcttctttctagcttcagctttccaatctcgacgatgcggccttatcttccgtttaaccgactcacaagaactatcttgagccttgttcataatcaaatgagctcttctagcttcttttttccaatttctatcgcaataaacccgccgcacaaagttctcaacataaccactaggtccattaaactctagtccctcgtcttcttcttcttcttcttcttgttttcccattgtctcaaacgaaagattatcatcgttacccgcttcttcttcccgcatccgtttccttgctcgatacctacgttgtctttctctgttcttcattcgacggatcatgacttcatctttgtctatcaacccttctttctcatcaatgctcaaaccaccattgctca

SEQ ID NO: 30730 - DNA, 1475 bp, Arabidopsis thaliana landsberg
  unsure (1)..(1475): unsure at all n locations
ctcatctaatcgtcataatccagagaacacggccgtgttcggtgcttacgtggtgagacctgacggtactggtttgaggaggattcaaatttcgggaccggaagggtcggaggaagcggcgagggagagagttaatcatgtgagtttcaataaagatggtgattggcttgttttcgcggcgaatttgagcggagtaacggcggagccggtgacgatgccgaatcagtttcagccttatggggatttgtacgttgtgaaattagacggaacgggattgaggaggctgacgtggaatgggtatgaagatgggactcctacgtggcatactgctgatgaattggatttgagtcagttgaatttgaacggtcaagatggtgacaagcttgagggtcagtttgaggagccgttgtggatttcttgcgatatctgaatgcgagttctctttatcttataaaaggacagtcatatttatgtaatctcgctttttttatttcaataaaacaaacaaaaataaatgcatttagcattatataagtacacgtgtcattgaataatatcaaagcggggatagctcagttgggagagcgtcagactgaagatctgaaggtcgcgtgttccatccacgctcaccgcattttttaatttttctttttcgcaccaaattaaaaaaataaaaaataaaaatggagataggaggatgctaaacagaacgagtaaattaagttttgttctcatatttagcacatcatctgcaaagttccaaaaatagcataaattttgtatatataaaaattattgagaattctcataaataacatcgtatcaagttttttggacaaaaataacactcaaaagttttttgaacaaaaatagcactcaaattacatagaaggaaagtgaaggtagagacaagaataaggaagatgaagcgacggagacaannnnnnnnnnnnnnnnnnnnnnnnnnnnnnnttgaacgaaaataacactcaaaagttttttgaacaaaaatagcactcaaattatatagaaagaaagtgaaagtagagacaagaataaggaagatgaagcgacgaagacaacatcggtgaataaagccaggatgggggaagcgatgaagacagtagccgtgatgaaagggaagaggaagctactaagaaataagagtttcttgtttcatctgaaagtccaaactgtttagttattttattttaaaattccttcaaagctctctaagaagagtctaggttagactatttaacttcactttgtttcttttacaaaatatatctagctttactttggactttaaatctttaattaaaaaaaacaaaaaactatatgtttatctttttagctatttctgctaagttgctgctacatatcttttcgattccagcaccgatttgtttttttgaaaatcacatgtctttgcttcagcttacttgctttcataatctttttttttggtcttt

SEQ ID NO: 30731 - DNA, 4485 bp, Arabidopsis thaliana landsberg
gaagagattccggtctaaccataggaggcattacaggacggagaccaggcattcctggaataaggggtcgtggtgctagttgaacagcaccgattgtaccaggcggccgcataatgaatccaggacgaaccattgttggatatggagaaggataccggagaagccctgcataaacaaaaacaagtctctacaaattcatcagtagatgtttacattggaataccctgaacaactgcattggcataaatcaagagtatcaagaagcagtaaataaaaatcattttgtattgttaccacaaactagagcaaattagatatgcacaccagaggcagtacaaataccacccagctgaacagagatcctgaaggacacattgagaagatagcaccaggatcgtagtcattattaccacattaagtagtcatacctcacagggcaacttgaaataggtaagaatctataatcatctgttgaatttgagattcagtaatattgaaactcccatcatttcatgcccatatagaacttataaaaactattattacccatcataatagctttatttcaaccattagcagcttgaccacagaagggaatagaaaaaagaaacatgtcgaagatgtaacggaaggtgtaatttgaaagaattgcaatacctcaaaatcaagaccaaggagcactcagtcgctacaaatgcttgctgctggcagttgattaacccatcaagttcaaagttttgttcttaaaactacagtaattctcaacttaacatataaattggggcaaatctttcaagaacctttaggtaagcggtttggttaaagatgtgttacactaactaaataaattaagagaataagaagaacaaaaagcgaatttgcgcataccaaaatgagggagtcgtagaagtgagtccctacccaaaatttgatgccttgcaaccattctcagggaactcaatcaagacgctgtaggagaaaacacccggtcatcggtgttcctgtttctagttttctccctaattcctctttcaataaaacttctttttactctaaacctttaatctaatccaactacatagacatatatagttccccttcactactttaagcatcacaaattcacattcaacatacacagaacgaaaaaaaacgccacgaaaataaactatatagcctaaagtgcatcataaacaaaaaaaagagtaagaacttataaaattaagagatagaagaacccaccatgaggaggcatggcaccaggaggagcaacaccatgaattccgggataaccattagccataggctggaaaggtctcataccaggctgcggttgatactgaggcatagatcctggaggaggaactccagagctagggttttgaaaattcgcaacgggagtgaactgcataccgggacggaatggtggtggcggcgggagattggtggggagaagcgagctaggaatctgagccggaggagcataaggcggaccaggtggaaccagaggagcgactggtggttgcgaatgttgttgaggcggcggtggtgttagtgaaggattgggatttggattgggaattgaaatcggagtagtggattctggtttctgtgaattgggatcccccgtggccggagaagaagattcgtcggccatgggagttttggttacaagctttggcaatgaagtaatgaatgacttcaccgaatctaaagattttgtgccctagaaatcagaaactccaattttaattactctttatctgtgtgtgtgtgtgtgtgtgtgtgtcaaagttacaatttctttcctttctttacgacaaaaatcttaagtaacttttgtttattgttacacgtgtcaataaattattggctcattattccattgtttcaaagtcaattttcattatacaagacaaataataggcagtcgggaaaatataattcatctatacttaataaagaaaattaatggtaatttgcttaattgaccaacaaactcttaatatattcaatttatttttatgatattattgtcttggtacttagtaatcattaatcaatatacttatttaagcaatcatccttgaaaacatgatgataaaataatatttttaatggatcaagatacttaaccagtttaatttataaaagaaagaaatttacttgttgatccactcaatttagccttgaaatctttggtggttgattagcctttgctttggaagtgacaaatctgattcaatttggggtgaagatggtgacgttggtgtggagtgaagtcggcggtgctgagctcctttgttaattctttcatatgtcatcttggaaggttgctagatcggaggttttgtccttctatcaccactttgaatattattttcatcgttgtaggcgatttggtgttcttagttgggctttacttctctttctcggctattcattctgtttttagtttgggactgagttcttggctaaagaattgtggtgtcgtttactgattttttgagaatggttgtggattgaagccttagttttaaggctttggttgggtctacaaatgtcctcgtgtaagaaatgagggtcctctttggcattttccccttcggatatcaagttttctccttgtacctttgctttctcgtcttctttggttgctggaaggtagtattagtttggttctttgctctactctatttgattatccgtcttcatttctgctgaggtagtggttgtgtgagctcggtttagcccttttctcgggctttctcttttgaaggcattctaatgatttggttttcttcaaggcttttgtttgtaacctttcttgtggtgaagagtttctagtagtgaattgctttggagtctttaattgttagtcatctccatgtcttagtgattgtcaagtttagtctcagtaatcttgttttgtactagttgataggtttttgtttactatgggtttgtccattttaatggttcatatataaaaataacactcttgtgacccaaaaaaaaaaacacatattctatcttaattattttttttaatgatatttaaaattttaatagtaaaccacacattttttctatatttagtgtttttacttttatctcaatttatttattctctcaatatatccttaaataacgtcagttatttttgttgtttactaaataattactactgtgtaacttaaactttaaatattagtgacgataaaaaagactttaaatattagtaacttatccttaacgttttactcaaacataattatacttaattctcattcatctttgtactattgagttttctcattataatctttatctatgcatcacaccatttatgtgttttgttgagatctatattttatagttatcttaacatagcaataggaaaaagagaaattttttgacaaatactaaaaaaacttatttggaaggtccccattttttataaatctgttatattatgaattatcttattatataataaataattaataattacgaatatataattaattttttgtgattcatgtatatagattcttttcggttaggaaattttctattttttgtttttaaatattttaacaaaaacttagatttgacacatgtcgatatctcatcaatgtagttgactcgtgcgtgatcacgttagttagcaactttaaaaaccctattttatataataagatgcaaacttgaataaaatggttctatttgagacttgttttttttgtacaaaattagaaagatccaaaattcaaactgatcaaaccgtacaaattagggtttttttgtcgtgtattacgtcattaaaaaatattatttttaacaatgatgatcttatacatttgataagcaaatctaaactagggttttgaaatcctaaattaaagtaaatgtttcatgtacatgacacatacattttcaaaaaattagaaaaatccaaaactcaaaccgttctaatccaataaaattaagttttttttgtcgttagaaaatactatttctaatgatgatattacatttttcaagaaaattcaaactagggtttcatgacaatacacatgcatatctttcacactattggaaaaatctaaaacctcaaaccgatccaacaagataaaattaatttttttgtcgtgttttatgctgttaaaaaatactattttcaatgatgatcttatatttttcaagtaaatccaaactagggtttcatgacaatatacatacatttcacaaaatcgaaaactcaaaccgctccaaccttataaaattaagtttttcttttgtcgtgtattaaatcgctagaaaatattatttttaatgataattttatattttccacaagtaaatctgaattagtgttttaaaaatcctaaattaataatatttgagcaaaagtaaattcttgacaattacacatacccatacatttacacaagtaaataagttactcaaattgcaaaatta

SEQ ID NO: 30732 - DNA, 2021 bp, Arabidopsis thaliana landsberg
gactaagtaactgactaaccggagctacctgctgatgagcctaaaccgcttgtctagtgattgccatggacaaagctactaacagaaagaattccttctcaaagagtttgggagaaggatgtcaacaaagaattcactaaaggtgactatatcaatcgccctttttctccagattgggattattatgatacttttttctataatgcctagatgagtgtagaaattttgcctactcggtttgcggattttggtttaatgcagcgtttgcagatagagaaatctgttttaggactgctagatgatataggtttgggaaccatctgttgtaggcagtacgatttgtatgctgagctagttagataattcatggtttctgttagggtctactatgtgaatgacaggaaacgcaatgctcaggaaggagctcttatcttcttcattcgcggtgtcagatagagtctaccaccgagagatttgtgtgacatctatggttttgacaatgatctcactagagtttccctgcctggttttctggtgcaggtttggtaatggaatttatgattccaaggacgtagttcactcagagattcgtcaccctgtttctgggatatttggttaggctgattagtagcacactgttgtgcaagatgaagcctggcaagatgagactttctatgctgttgttgctctatcatgttgttcatgatttctttcctaacagctttggagttgaggaagttgaccgcgatgtcaactttggcgttgtgtttgctcatcacttggtctcactcaagaccaagccctttacatgtaaagggaagaaatctaagagagttggcagtcttctcactcctatatttgagcattttcgcatcatctttgaaggagaagaggtcaacaccacgagattcacaatggatgaacgatatcttaagaactttcactagctgaaaggcaacttcctttggtgtttcagagacaaacacgacaccatatgattcagttaccttgccctacacttacagagattacaggagagcatgaggagattggttttcattatgatccttcccgtctgcattctgcgccatgctccaggagacagagaggttcagcttcaggatccgcaccgactcagactgaggatgagttcattgaccctgttgggggtccgagagttggatcttcttctttagctctaccatatgagctgccttctcctactcctatcccgatagagccatatgtctttcaggaatacatcgtcgacagcttcaagagcgtctggaacgccatagctacactctctcgctgcggttgtgttgcttccactcgtcgtcgtcatcgctctccctcacccacctccggttcggagcatgaggactagccatcctccctatcttgctttgttttctgattttgtttttgctttatttctgactatttgttatttgtattggaacttgttgcacttattttcctatgctttgttggaactattgatgtgtgttttagtgatttaacagtctaactcgaggatccatttgaaaacactaaccaaagctctacaacgatgagctgaattcgcaaagcgatgcaaaaatgacctgagtgtcgatcgacaccaacctataatcgatcgacaccactctcaggtggcaactcacgtttctctaacttttaacttttgattatttttctttcgattcctcttgcttaatgactctggggacaatgttatctaagtctgggggagtcagttactaacttcatcttttcttttcttatgagtcagttgtgtcattctaacttagatagtcgttttattgagttaaaacttttgtctgaaattatgatctatctctcgagtttattgcatggatggtttaagtactgcagattcaaatcaatccgactaatggaaaatccagaaagccaatcaacaaacttaaggacatccattcccaacataatacacagaggcataaagctaatctcaatgatcttcctttaacctcatc

SEQ ID NO: 30733 - DNA, 1662 bp, Arabidopsis thaliana landsberg
aatgatacaagactactaacctcttgcatttacgggtatgccattttctatgcatttcaatagattctcgacttctccttctctagcaaaggcgtgtatggcgtcaatcttcctggaacatggagtaagaacgcaagaatgaacagagcttctactatgatttaaactaacacatgattctttgatctacctaaggtgagtattatgatatatacattccttctctgatgctagtcagctagtcatatagagaaaatgagaaaagaaaaccaaaagttcatagatgaatctgtaactaattgcttaggaaccttacaactcattgtcagattcctcttcgtacaccaatgagctaaaaaccggtcccatggggcctgcagcctcaccactccgatttcttcgtttctaatagtccgcaacgaagcaaacaagccaagaaataaagacagatttaagaacgaaaacagaccatccataaacagtccaaagcaatgggaataacagaagcaggtaagaagacaactaaccgagccaccttctacccagctgggtaaagctgagtaacaaggcgggtaggcttatccatcgcttcctcaggacgcatagcacccaatctctgtcatgcttgcctagaacaaaaaagatcataacaaatctcagtcgatcaaaatgcatccctaagttaccaattaacaaaacaacaaaagcaaatcctttcggtactcacacaaagcaagatacatccaggatgaagaataatcagtacatcacaagtaaacatgattaagtaacaatcttcacagtcataagatttgaatcagatcactaatcaatacaccaacaaaagcaatcctttccatacattagcaatgaaagatacgaacttggtgaaatcaaaataatatacatccatgatcaagaaacatcagtacatcacaagtaaacatgatcaagcaatcatctttcacagtcccaaacatttgaatcagagaatcaataagagtgttagacaaaccacttggcacgagcagtcattttaagagctgatggttgaggagcagtacaaggtccttcagtagcaattttatacaatccataaagctgaagttgcaactcattagaaactttctgcgaaagcctatccgatgcagcagcagcaacaaaagccgtagcagcactaaatgcctcatcaagttctgtactttcgacaccttcccaatcatcatcatctgattcatcttcatcacctctcaagctaccttgctcagctataagagaatcagactcgccgctaatcccagttaaagtttcgacctttcgcaaggtctcatactccgattgagtcgtgtggttacgagtgagtgagagattctcgtctttaaaagcgaggaggatagagattagcttagcgagaaggtaagcgaagatcaaaccaaagattatagactgtgcaagctgataccaatcagccatttcccccaaatcgaataagaaggtaaacccaatagagattcaaacacaacgaactcgaaatctgagtaaatgaaccctaaatttcaaagaagggtcacactaacgcatcttcagaaacaaaaaggagccaaccttttggaactccttgtttcacccgcttactattttctttttcttactttttttttg

SEQ ID NO: 30734 - DNA, 5305 bp, Arabidopsis thaliana landsberg
  unsure (1)..(5305): unsure at all n locations
cttgaaatttccattgagaggggggcattgttacgcacatgccggaacatccatttagaataaaaaggaaattctggggccagaaagtattaggccaaaataaaagaagattagtacctgcaaaaccttactctgaatgagttcggctgcatctttaccaagagatagctgttccaacttgttaagagcatcctggcatgcattaaaccactcagcctgaaagcaagacaacaatcaacactgtaaaacacaatagccaacactgtaagatataataaacaccagatactcgaagcataacagctctggttctctaatgtaagtatagtcattgcaacacactgcggaactaaacacattgccaaaatcaacaactgccatatcttacaaacattgaggttaatcaatggaataataaaacttgaacataagagtggctaaaataactaaccgtatcagtctcctctgcatttgtccaggaaaatttcagcattggatgtctgtcgtacaatggcttcctcaccatatcaaatgctacaacatactcgcagcaggtttcatataagaaaactggaatgtacataatcaatggagacatatcattgttattgtccattctgtacctaaaatattttctgaccgtcttccagactgaagaagaatttttagtatttccttggtctgcgagaaatagtaagagtaatatgaacttggttaaaatttagaagcacttaacagcgaacttaaccaagagatcactccaaggacattcttcttttttagtgaggattgtttatgatgtaattgctttcaagcatgaaaagattgacatacctctttcagataagatatctctgactctgaaaaccctctcctgcaaaatccttttataagtctagtatgttcctcgactgtattacaataatatgatcatatagacagcaggtnnnnnnnnnnnnnnnnnnttggcttttttgttatcgtgcttgggattcaaaataaaaaggttgtatgcatcctcgagatgaaaatattcgacaaggctagtgaaaatgaattccatcatctcagcatccacttgcagtagagcactttcctcatctctgttaccataaaacgagatagtttaatatagaaccaacacaaaaaataagaatcaggacaccacttaaaaaagttggaagcagctagcatgagtgacataaagttactagaaccaagtggtctgcaggctcagatatcgctgcatataaattgacagaaatggacgtccatacgacataaactgaagcaaaaaaaaggtctttgtaatgcattacttattggtagccacatcatctttgcgagctaaaactttgattgcgtgttcaattactgatgtcaccttttctcccatttgtatagcatgaacagaaaagctgacaaagggaaacaaatgcccaattaaactttacttaaagccaacaccaccgtgaatgaaccaccaggaaaaaagttaagaaaaagatgactgtacttgtagttcacgcgactgatgataggaagatggtgctgcacctccttttcaatgttaatcttgtaaaagggattgagaacttctttgatttgtggaactcgtgtatgttcaaacatgtgatcaagtttattaaaccaacgctcaagttcctcgggacggagtatgaagtctggaaagtgtgtggaaaaagttacggacaaaagagaaagtcaagtgatagctccaattcaaataaaagcaagacaggcagaagttattcaccttggttcccttttccttcaaaccctatgaagataaaattaactggcactggaagatagacagaatcgacttccataagctctaagtaactcgcaatatttcctgaaaggatgcaatccaaatcagaacgtggtgttgcgaattgagctagtaagtcctttagccattcacagaaactaaaggttattacttacctgacttagtgtaattcagcacaccagaatttgagtgaacggaagactccaaatcatcaaaatctgataacagcacgaaaaattgtgatgcaaatgaagacataggaaatccaaaagcaaagagaggcctggaaacagaacacataccagtacgaaaaacagactcgctccaaaatctgcttttatccctaagattgaacaaggaaaacacagaagacttcgccgtcttccggttcccttgtgaagctccatacgatagagatggtatgaactaagccacgaaatcaatcaaacaaattacgcaaactcaattgagaaagagaaaggtgagtttaaaaacaaaagcattaacagataacatcgcagctcatcatcaattttcaaatttggttttgatcaaatactaatcttgcgacagatcgaacgaagggatcgtaccaggatagctacacaaatggtgagtacgagcttggaaacggatctgttcccagccccgaatctccgcatcgtcttcttcttcttcttctcctagtagtcgataaatcgcagtagggttttgctctctcgtccagcaaaaattcccacactggccactgtgctcgttttttcttgtctttccacagatttctttttccggccttcgattagccaatatttttttaccgtctcaagttctcaaccaaaaaaaaaaaagtcttactgattgattattttcaatgaatttaaataacattgactaatataataaactgattgattattttcaagaaatgggcttgcgatacaaaagcccaccttatccgtaatgactctatgagagcactaaagagacaatataaactgattgattattttcaagatatgggcctgtgatacaaaagcccacattatacgtaatgacttttgagaagaccgaactaaaacagtttagactttaaagacatcgtttgacgcgtacttacgtgtcattttttgtcgttatggggttgccaaaaagcagcggcactcgctcgtgcgtggccgctttaaaaccccctggtctggaggaaatagtaccagctaagctcgcagctcaaagctcagtgtttaataattgtatagcttttttggtgaacgaagagtcagatcggcgagcctgagatgggttggggttcggtgttgctattactggcggtggctcttctttgtcagagggcaagttcaatcggagctaactggggcacacaggcgtcgcacccacttccaccggacatagttgtgcggatgctaagagagaatggtattcagaaagtaaagctctttgacgccgaatacgacactctcagagctttgggcaaatccggaatcgaagtcatggttggtattcccaatgagatgcttgcgactctcgcctctagcctgaaagctgctgagaaatgggttgctaaaaatgtctctactcacatctccaccgacaacgtcaacatcaggtacttcctctgtttctttcctttattagggtttcacatttgtactgtactagctggttaattggaatcagtgactttgagtttggattccctaaacagttactagccatgcctgaaattacgggctactgtctttttctgagataattctacacaaatctctagagtaggtgctaaattgatgctgtgatttggttgttggacagatatgtggctgttgggaatgaacctttcttgtctacttataatgggagctatctgagtactactttccctgcgttgaggaacatccaaattgcaattataaaggctggccttcagaaccaagtgaaggtcacttgtcccttgaacgctgatgtctatgacagctccaccacttttccttctggaggggacttcagggccaatatccgtgacctcatgatcactatcgtcaagttcttgagcgaaaatggcggtcctttcactgttaacatctacccttacatcagtctttacaccaaccccgatttcccagttgattacgccttctttgacggcaatgcacagcccctgaacgatggtgggactttttattacaacatgtttgatgcaaattacgacaccctagtccacgcgttggagaagaatgggtttggtaacatgcctatcattattggggaaattggttggcctactgatggggacagtaatgcgaatttggactacgctaagaagttcaaccaaggctttatggctcacatctcaggggggaaagggactccgaggagacctggccctatcgatgcatacctgttcagcttgatagacgaggacgccaagagtgttcagccaggatactttgagcgacactgggggatattcacatttgacggcttaccaaaatatgccttgagcctagggacaacgaacacaggagctctgatccaggccaaaggggtacgctacctagagaggaagtggtgtgtgatgaagccaaatgtgaggttggatgatccgcaggtagctccagccgtgagctacgcgtgtagccttggggactgtactagtcttggggttgggacgtcctgtgctaatcttgacgggaaacaaaacatatcgtatgcattcaacagttattatcagatacaggatcagcttgatacagcttgtaagttcccaaacatatcagaggtgaccaagacagatccatctactggaacttgcagatttccgattatgatagaaccttactacggtggggcagcccgggaacacgggttctttttcccactactgatggtggcagccatcgcagtctctattttttgatggtttcttcttgtcaatttgtaattctgtgtgatggcttgaactatttttttttcttcttgaattctgatttctcttccttagaccaagtgattattagagctgttttctgggaccaaactgaccttaaaacaatgccatattgccatgttcaataaatcaggcccaaatgagcatttgaatttgtactatagtagttgggaaagtctattgcgctctctttctccctgaagctctgtttcataaatgctggagagactgtccttttgttgttttagacatctatagtactacagatttgtacaacttccaattcttcatatgaagtttccctttctccttgctctcgttcttctagataggaaactaggagacgattatctaatttcttaatctttgagtccaattggcactatgcaccactccaaaaaatagtctttgtatctgagatgtactggtgttgtcctctactggctctgtcatgccgatcgaatgaaccggctcaccgcaccaaaagaggcggtttgcgtattgtgcgcttcatacataacagt

SEQ ID NO: 30735 - DNA, 602 bp, Arabidopsis thaliana landsberg
attttgcggcgaacatacacctggtgaagacctgccgattactgcattccgatacgtgttcttagatgagaaatggggatgacgtgcgaaacgaacgaccggtagattccatgagttccgctgcggattttccccggcgacttacagagattctaaggaatttgaggagtgagaaacgattgtgaaaatgaaatagttttgtccggtgaaggaaatgaagacttatttttcggcacgaagaagaagtgcattgtttaaaaaagctttaactgataaaaccgtttgtgagctttttcatggaggagagacggataagctaggcgggctcggggaaaaagaatgatggtcatgaaaagaaccatgttacccttatattaatctcagcttttatgtatattgtaatgttacgttaagggtgatttggcaatacattggagaatacgactgtgcaataaccggccacgttgctaaagtttttggatggcttagctgaattggatttcactgacacgtggtaatatcttattggtttgatgctctgagggagattcttagccaaaaaatcagtagaactctggtatggataggcgcatgattaagtt

SEQ ID NO: 30736 - DNA, 1705 bp, Arabidopsis thaliana landsberg
  unsure (1)..(1705): unsure at all n locations
ggtataggaactatcttgattcatatgttaatgcattgaagctaacatagtaatatgtatatgagtaggaattattttttctttctttttttttgatttttaatatgaaatactaaaattatctcgtcctattgaataaatgtcatattcgagaagattcgtgacagatgagaacaatatttccctactaattaatgatgtgcaacgaataagagaaggatttaagtctagctttccgatttttgtggagggaagtagtatcagatatgtttctgaactagcaagggcgacaatagtttctgagttaagcatatctgtggatcctcctagtaggtgaagatacttgagggacgtgtgctgagatgtcctcattatggctgcaaatcgaacctgactcttggaagctgtgcccatcttttgacacctaaactatgagagatgtgggaacgaaagatcaaagaagacacaattcttgtgtgggacagagtttattgcccaaaaccaagttgctcagctttaatgtcaaaaaccgaaaagagaacacgtctttaggatcttggttatggaaaaagattctaaaacagagagacaaagctcgtttatttcatcagatggaggtacgctcgggaacaactacctctttttggcacgaccattggagtccgcttggcaggctacatcaacacttggggtctcggggaacaatagatttggggatagcgactcaagcgacggttgcagaggttttagatactcacaggagaaagagacatagagcagattttttaaatcagattgagaatcacattgagctggttcgacaagctagaagccaagagagtgatcgctcattatggaaacaaaaagaggacagctttaaaggctctttctcttctccaaaaacttggcaacaaatcagaacaataagcaacgaatgtgaatggtatagaggggtttggtttccgtcttccactccaaaatattcatttgtcacatggttagcttttcacaatagactagcaacgggtgataggctctacaaatggaattcagaagctcgggctacttgcgttttctgcgacgaggaactggagacgcgagaccacctctttttctcgtgtccctattcttctcaaatttggatcgctttagcaaaaggacttctaaatggcagaaacgtttcgagttggagcttaatcactcctcaccttcttgactcgtctcagccatatctccatgttttcacccttcggtatacgttccaagctttgattcacagtctatggcgagagagaaatggtaggcgacatggtgagcctacaattccggcttcgaagctaactaagctcattgacaaaacattcggaatagattcagcacacttcagaagatggggaacaaaagnnnnnnnnnnnnnnnnnngtattggtttcatactcgaagttaggacacatgatcatctctcagattctgtttgctctctctaaattcatgttacatttattgtaaacaatggtttttttggttgaatataattttacattctttcaaaaaaaaaaaatgtcgaaacccgagctctctaaatggaatagagaagctgaagttagaagatgttgttgtatggaatgtggcgaaccctcatgcatcaactgcaaagttccaaggtataaaaacttgtcatgcaatgagtacaagagattgcatc

SEQ ID NO: 30737 - DNA, 3086 bp, Arabidopsis thaliana landsberg
agtcccttgattgaagtgccttctaaatgtagaaattctaaactgtttgagattagctgaaactccttgaggcttgagcaatcggtaaggatgagagttttaagagagattaaatccatcgttggaagaaagcagagacgtatgcatcctctcagattcaagaaaataagagacttcatattttgaatatccagtggcagctcctccaaaactgtgcacccttccagattcaaactcaggagattctcggcctttgacaatgctgatatgttgagcaacttacttgaatggcttagatccacccactttaattgtggtgtctcctgtgataacacaatacgttgaatcttgctgtaagtaagcctaaggttaacaagattctttggtctgaagttcgatggaagttcctccaacggaaatttcaaccagtcgaggtatcggacctcttgcaaggggaacttaagcccttctggaaagtataatttgcagtcgccgttacatttccgaggacaacaagaatcatatatcttgagatatcgaagattgcgcattttaccaaaggtcatatatcccaaggggattctctttgttactttggacatgtgacacatgtcaatgaaaatccctctcacattatcagcctcctggaagcaaatcaaaagtgaaaagttagcaagtacatgaagtctaagcctaaatcaaaactctacaatttaacaagataagttgtactgacacagtttaagaatatgaaaattgtagagacttgtaatccaaactatatgctaataatgcatgttccaagcagtactcttgtcaaacatctgaaccaaaatattttgatttttgttttcatgtagagagtgatgagatacacaagctaatctcaatttttttgttctgataacagttttgtgttaaaaaccaataaatagtgtaaatatgtttcaatatctattttgcaaagaaaaccaaagaacaatataaaaccgtacctcattatccatattcttcagcttgtcagttatatctttgtagttcaacaacatacaccgcccaggagaaccaatgtccttaccaaatgtattcactagatcattcatatcaacacggccattataaatttcgatcaagaacatatcggcgagatccctgacttcacttttagaatatgtagagtccaaatttcctgaatccattagactcctacaaatatattcaacctctgatctggaaaaacatgcaatgtcagatatgtgttgttgattaaattgatccttagaggatctctcgacatcatggatcttcatatcgaaactgcatgtcctttttttcatttgatggttccacttagcctcatctttctcacggagtttgcttcccaataacttgagagctaatgggttacctccactcttctcgacaaatcttcttgacatagtcaagaatttccctgtgggactacagctgtgatcatcgaaagcgtgatatctaaatagttgaaaggcatctctgtagtccaatttcgggaccacataagtatcatgagcaagtccatcgagtaaggacttgtcacgcgttgtaattacaatcttgcttcccttcttgatccatttgaggttgccaaggagaaactctaactgcttcttgtcactcacttcatcgagcacaataaaagatttagcttggagtagtttatccttcacatattcatgtgttgtatcttcgcttattgtgtgatttacgtgcttcagtagcttgttcaagaacgtccttcgcagctgctccaaactatgctcttttctcatcctcaagaacaagttacttgggaccttgcatccacccattatagcaaactctttgcgatagttgttttaccaatgccggattctcccacaactccaataatacgagtttttccgtttttgagtacaccatcttttccagctgcttgagtcgtcgttcaactccaacgaaagaaagtattttaggcttctcaactctctttggaattacggcagtcttttcatcattggcatataccaaaccaaaaccacaattcaacaccttacaagctattacctcttcggtaccatctgttacttgaaactcaaggtaagcttcaggacaaaaacatccgtcttcattgttaccaacaccatgtttgttgatatcccttttaccgatatagccaacaaagacatgagacgactcaatcttctgcggtgtgttatctgattccctccaacccccaagagtgatactgaaacgaatacgtgatccgtctttattcttgaactcgcacttacatttcactaacagatgatttctttgatcatgctttccagcaaataagattacagcgcatagagaaatcccagtgaacctgttgtcacaccagtgtgaggaaaactttcgctttaacacagatccagaggttcggtaactgaaacatgctggtacattcaatccaggaaagcaagtaccaatccgaacttccaaaacaacaccctgcataaaaaagaaattaaaaaacaatgttgatcaacacttatgatattagaaagaattaaagctgatagagagataaatatacataccccatcatatctagataaagcatctagtactatctggcttttccacccagtataagagatgatactatcctttgcgtcttgatcaagatttccgcagtttgaaaaattgaaggttgcgttgatttgctgagtcagcagttgacgagccaaatgatttgacacttttttcagggaactacacccatgagcatcaaaaaactcaagtcttggtggaagcatcgaaatagatctcattttcttgcattacttcacgtttagccttttcagattataaagcctactgatgtcagcttctatgctgacaaaatcactttacgctcaagcataaatgtcccatcgaggaaacatcattagcaccatgtggccactccctcggattattggaacatgactcaaaagcttggtctttagatttagtaaagctcgatatgtttggcatatttgttgcttttattttatcaaaacgtaaaaacttgatattgtttc

SEQ ID NO: 30738 - DNA, 1593 bp, Arabidopsis thaliana landsberg
acagaggatgaatcaatctattcaaaacccagaaacctcaaagagaaacacaaaacttcacaaattattcgattattgagaaaatgaaatgttttctgaatttaagtgtgttgcttctaatcgtggccgttgattgtagcttgatctctcaccgtccacgtattactactctcgttactgtatcactgacctgatggttatacttgatatcattattccttcggatgttaccattaccaaaatgagggacttcaactagaacattcttggctctctctggatttagacttttggaatactgatataggacattgttatcatttctcaaccttccatatgattttgcttgagatagaagagagtttggttgacaatagataccaccatcacttaaggacttttcaaatatctttgatgcttcacctcggtcgttcactaccctatttgcaattgcaaaatcctttgcatcccaacatattatgttatccctttcatcaggtgcatataccaaattaaagccacacttcagcacctcgcaacctactactacctctcccataccatctgtcacttgaaactcaagtgaggtttcactagatgcacatctttcctcttgtttgttgacatcgaacctacgcacatagccaataaagacatgagaggactcaattctctgttgcatgttacttgatatgctccaacctccaatagtgcaactaaaagaactacgaataccatcttcattcgtgaacacaaagtggcattgcaccaaaagattattgtggccgtcgtcttcaggaaactggataacagcgcatagggctatcccagtaaacctgttattaaaccagtgtggaggcagttttggctttaacattgatccagaagctcggtaaccaaaccatgctggtacttcccagccaggaaagcacgttccaaccaaagcttctgacacaataccctaccaaaacaataaaaagccaaaacaatatcagatatcatggatgatgctaggaagtgtggataatgatataaagaaataaacataccccattgcatcgagagagagcatctagcactaactgacttttcctccgggtataggagatgatactatcctttgcttcttgatccaacttgtagcagttggagaaattgaaggtggtatggatctgttccgtcaccagtagaagagccagcggatttgcaatcttttccagagaatcacaggcatgagcatcaaatgattgaagtcttggtggaagtaaagggacagatttcagcttcttgcagtgtttcacatcaagccattttaggtgatagagttgtccgatgtcagtttgcaagctcacaaaatcatttccacttaaacataaacgttgcaggaaagagactctattaacactactttgcaggaatgacccaagctgctgtaagatgatacttccagtagcttggccttcagatctagtgaagtatgatacttttggcatctcttctgctcctgttccatcaaaaagtaaaatctggaggtgtttcatgcccttcttgatggaaggaaagttcttaagcattgaacaaccagagagaatt

SEQ ID NO: 30739 - DNA, 4182 bp, Arabidopsis thaliana landsberg
tgtttagaaaattccaatatttatatattcctagggaaaaagaagcttattcttcaaattattgttatgagtcgttaaaatatggataaaaatataaagtctaaatattaaaaactcagtttgctttgcttttacctctccaagtctccaaagtcaaattaattttagttaactaaaccaaaaaaggtttattagtcaaacttagcatgcaatgctgggtaccaaacccaagcattagtctcttttaatcttctttttctccaataagtttttacaatttttaattgtttgcatttcccttgattatttatcttcatcccaatttagctaataccaactccgtttcttattcttccaagtcttttcctataaatacgttcttcttcccctcttatttcatatcactcaccacaaagtcttctcatttcctcatcttcttgttgaaagtaatggcaagactcacgagctttctccttcttctttctctcatctgctttgtccctctctgtctctgcgacaagagctatggaggcaaacttttcccgggttattacgcccattcatgcccacaagtcaatgagatcgtgagatcagttgtagctaaagctgttgctagagagacacgtatggctgcttccttgttgagacttcatttccacgactgtttcgttcaggtttagttaatttcttttacgtttcaacattttatgttgttttaagtttacttgctaaacaaggtaactgtgaaatgtagggttgtgatggctctttgcttctagacagcagtggaagggtagcgactgagaaaaactcaaaccctaacagcaaatcagctcgtgggtttgacgtagttgaccaaatcaaagctgaactggagaaacaatgccctggaactgattcttgcgctgatgttcttaccctagccgctagagactcctctgatcttgagagtttcctccacaatctctattttctcgaaccaaaactgaaacatcagctaactcggttggtttttggtttagaccggtggaccaaggtgggttgttccattgggaagaagagattcaagaagtgcaagcttgagtcaatcgaacaacaacatccctgcaccaaacaacactttccagaccattctatctaagtttaaccgtcaaggacttgatatcactgaccttgtcgctctctccggtaagctttcgtcactctatcacagtttcttgcttcacacacatggaacacaattaaaaaaaatccattatacattacttgcttctcaagccaccacacttctcaaatgttatctcaggtagtcacacaatcggattctcgagatgcacgagtttcagacagaggttgtacaaccagtccggaaacggcagtccagacatgacattggaacaatcgttcgctgctaacttgcgccaacggtgttcaaattcggtggggaccagattctctcggtgttagacatcatcagcgccgcgagcttcgacaacagctacttcaagaacttgatagagaacaaggggttgttgaactcggaccaagttctgttcagcagtaacgagaaatcgagagagcttgtgaagaagtatgcagaagatcaaggagagttttttgagcaatttgcggaatcgatgatcaagatgggaaatatctctcccttgacaggttctagtggcgaaatcaggaagaattgcaggaagattaactcttgattgaaacaagaaaactcttcttatatcttgtggaacaaatgtgagacatttacttttactttggagtgtgttttgtttgtttttttcaattctgtcatttggaagttttatttcgtgttatttgcgttgtgttaagacataagtttgaaatttataaaacttgtacgaggaaatattttgaaattataaactttaaactattattgggcctaaccgaacctaataatttatgaattcagaaaacactaaatcttaaaactgataggcccataaaggcccatttcacatcccactagttagggtttatgctttcttctcacatttcagcttcagatgcactgacatgaattctcaacgaagctaagatcaattcgatagagagtgaaaactatgaggaatctgcgaatcatctcctctcacttctcacgagttttgaaatccaccgagacacgctcaagttccgttcaattattcacgatccaatctcggagctactcatctccggcgacgcaatcggagaacgtgtccaaaatcgtcaatgagctatcgaatctcactcttttggaaacaatggatcttactgagatccttagacagaagctaaacatcagtgaattgcctgtgatggcggcgatgatgccagggatgtcattaccgggatctggagctagtaaatccgccggcggagaagggaaagagaagaagaaggaagcaaagactgcgtttgatgtgatgcttcaagcgtacgatgcagtgtcgaagataaaggtgattaaagaagtgagaacgattacggcattggggttgaaggaagcgaaagatttggtggagaaagctccaacattgttgaagaaaggagttagtaaggaagaagcagagaagatcattgagaagttgaaggctgttggagctaaagttgctatggagtgaccatttttaggtacctctatactttcgattgctcctaagcagatggattagctagctttagtttgtttgattatgggaataaacaagctttgagattgtgtgagcttggtgttgaattgttagtgcttattaggtttgagaattggaaatgaacattaatttgattctggaattgcataaagttgcttgctttgtttttgtaaggggagtaaagttctgagcttgacgttgagtttcatgaagggcctttgaagtttcttgtcgaaatgtacagagcaaccagcaattagaatagcttttgtagtctattgggaaacatgtgaaattgcttggtctataaacacttttagtaggtattctagcatctgtatgattcgtgtttgcttcatatgcttaagctttaggttttgacattgcaggtgttattaaaatggagcatgagcaagaacaaatgaagcttctgctgagtagtccttcctagtgtttattacaaatgtaagatgtgatggaaagtcatcagcagctcttttctttagagatagaaacagatttttgtcttcaatcaaatatacacgaaggcttgttagaagcaaagttctctcttctttggatcaatcattctctcagttcttggtttgtactaacagttgatgatttctttcatataataatgaatcatgttatttccaaattttcaagttttatgctcaagcttttcgtatggttaaactgtagaaagaagctgttcttgttttaaagatagcaacagatcaagaactcgacctgagatcttacaattcgtttgtaatcacaatattataggagatgttatactttatcgtcatggaaacgccacctagtttctttgggagatcttccatgtttgcagtttttcaagtaatggtcattgtctttcggcttttgctgcaaggagagaacaataaacatcataagaagaagattattctgtgaaagcctttgaaatatgagaagaagataaaacacacaaaccttcacggatgagctggagagcattgagagaatgctgagacagatggaacttagtctcatcgccggtgaccacgaatcatacaagacatctgcataatcaaaagaacacatagaagggtcttgtcattggactttgaaacagagtgagtcattgtgtttgtatgtacttacctaaacaaatgtgaccgttgctgtaaatatgaggatgaagtggagctggatgctgaaagataacctgttttatatgtggaaccatcgggttatgagattgatgcgatgattaagtatcgttaagtattaacaaaaggagttagaggacgaacctgtggagcttccataggataatgctcagggaactcaacttgaagttggtaagtttcattggcgtaaagagttcctggaactccatgcacttcaatgatccatctgtttacaccaacaattcaacattacatcaccgattatcaatattcgaaggaaagacaataaaatgattatgtaccgttggagattatcagagact

SEQ ID NO: 30740 - DNA, 1084 bp, Arabidopsis thaliana landsberg
agccggtggccggattaggtggttctcctcctacagtgatcgtttcgagtcaagaggttggtcacaaggagaggaacgcataagagatctcagctacaggctcgggaacaagtgttggggtaggggaaacttattcaaaaatcaatcaagaagcatcgtccattcaagggaaaaggaatcagatcgggaagccatcttgggtcaacgttgcaaaaaaacatatcttctctcagcagaagtgtgtggtatcagagatagatggttaggacaaggtagttgttccaaggatgcgtgagcccgtgcaaaacctctatgggaagatttcttgattggaaagttcctgaatactaaggcccctcacgtggggaaaatccatatgattgtgaacaagatttggagattgggagaccgttcttcacttatagatgtgtttgaagttaatcagtctacagtgaagtttcgtataagaaacgaaggtatgaggcagaggattttgaatagaggaatgtggaacatcacggatatccctatgatagtatcaaagtggaccccttttgcagaggaggctcagccggcgatgaaatcaatacctttatgggtcactctcaccaatgtcccaccaatgatgtttacagacaaggggttggagtttctagcaagtgcagttggtaaaccaatccgtctacatcctaaaacagatgtgtgcgtctgttttgatgaagctcagattatggtagaggctgacttaacgaaagaattactaaaggagtacaactttacaggagaagaggaaggtgagctagactctgtcattaagtactcttacccatggttaccaccaaggtgtggctgctgtaaaaaatggggtcatctacgtgaaacttgtctttctccggagaacaagtccacttctggatacctcagccctggatttgttgaaagttaatgacgtagtgacaaacatggacacatctccaggtctgcaaattgtttcagaacagcctgcacatgtagagtgtgatttgcagcttcaagacaaggatctagcggcaaaaagtactgatggtgcacatatagaagcggt

SEQ ID NO: 30741 - DNA, 1735 bp, Arabidopsis thaliana landsberg
attcaaatgtttcattgcatgtatatatgtaaatataaatctattcaaatgtcatgtatcaattttatcattcttttttatgtatgaatattccttttgtaaattgtgttgttggttttgatttaataatcatgcatagagatgtactggtattaatggtatatgcgcaggaagctttttaacaatgacaatatatagccgagcacctcatgcaggttttagaacctatgatgactgaaaacttatgcatttcgaaacacacaaaatagtacagtaaaacctctattaattaataatgttgggaccgagaaaatttattaatttagaaagatattaatttatcgataaattaataattattaatttatagaaagatttttaaaaattttgtatttttttacaaaatttcgatataaaagtagtttttctttataattaatcattttttctaaaactaattacaaggaaaaaataattattaagtttaaaaaataatacaaagtttttttgacgtaataaaaatattagaattaaactctacaaataattaatagaaattgaagaaaaaataatactagagtcatatttcaataaatattttaaatagaatattgatatatatatatatatatatatatattcataaatttacataattattaatttataatattgatgggaccatatatttacataggattttcaaaaaaaatattatcttattaatttatcgatttgtatcaagttttacactagtcccaactcggaaccagaaaaaattattaatttatagaggttattattttatcgattattaatttatagaggttatactgtataagatactagacacctgtgcaattattgtatgcgtagctgtagtaaggtttctcgtcgacccaaagtttgacggccgagatggccgagaacgaggaactacttcccttggctaggttttctccatatggtccgttggagtgaacaaggttgcagtcggcttttctaaaatttgaatagttcaatgcgtaggccgcgagagttgtgtcccacaccacgttcggtactccaacctgcgcacgagcggtgttgtgagagttaaggtagtcttgtggagtgttttgagcattggttgcaacaacaagaaagctaatcgcaacgatgacgagaaaaggggttttgaaagtattcattgtcgtatttatctctttagtgatgattatttttaagaagatggagatatatagttaatgttgtgagtctgaaagaatgctttgccttctttatataggctatgtgtgattttttaggttcagcggttttgggaaactttaacattgggagttgacttatctttttataaagattatatttatttttaaagtgaagtaaaatgatcaaaaagtgttatcatgcctttaattatcattattaccgtattgcgtgatctgaagctagatctaatggtctcctaagagaaaataaaataagctatagtagtatataacaaaaatcgtactgctagagcaaagtggccgcaaatgaataaaaacgacaaactaatctatttgtttttttccgaatagatgaaagtttttttttcacagaacagaacaggtcttgtcttatcatcctcttcactaaaacacacccaaataaaccagacggttcttagtaatacaaatcatttgcaaagattgtctgataatcaagttactatgtcttcgtttatgatctg

SEQ ID NO: 30742 - DNA, 874 bp, Arabidopsis thaliana landsberg
gatgctttgtatgcacctaacacccgttttcggaatgggtgatgtgcggcaacgaaattaagcgaaaccactccaaacatgagttttggacctaaagtagtggattgggcacgttcgtcgcgaaaaacgaagaaatggttccggtggcaaaaactcgtgcttgtatgcacctcgacacccgttttcggaattagtgacgtgcggcaacgaaattgcgcgaaaccacaccaaacatgagttttggacttaaagtagtggattggacatgttcgttgcgaaaaacgaagaaatggttccggtggcaaaaactcgtgctttgtatgcaccccgacacccgttttcggaatgggtgacgtgcggcaacgaaattgcgcgaaaccaccccaaacaaagtggattgggcatgttcgttgcagacaacaaagaaatggttccgttgcaaaaactcatgctttggatgcaccccgatacccgttttcggaatgggtgacgtgcggcaacgaaattgcgcgaaacctcccctaacaattgttttggacctaaagtagtggattgggcatgttcgttgcgaaaaacgtagaattggttccggtggcaaaaactgagtttgtatgcacccgatacctattttcggaatgggtgacgtgcggcaacgaaattgcgcgaaaccaacccaaacatgagttttggacctaaagtagtggattgggcatgttcgttgcgaaaaacgaagaaatggttccggtggcataaactcgtgctttgtatgcaccctgatacccgttttcggaatgggtgacatgcggcaacgaaattgcacgatagcaccccaaacatgagttttggactcctcgtaatattcctcaacagattg

SEQ ID NO: 30743 - DNA, 3199 bp, Arabidopsis thaliana landsberg
tgtttcattgtccaaaaaagctcctcccgaattagctatgtggaaatccatttaacccataaggagttactatttgaaatgattctccagaccaactttaagcaactaacgtcgtttgcctctttcaagttttgcaagcctaaaccccccctctgtttttggcttacacaccttatcccaagaaagttttgccttctttgaattcagttcaggacccgaccaaagataagctgaacaagtcttatcaatctcccggatacattgtcggggtaatcggaaagcagctaaccagaaattgcaaataatgcagagaatagagtttatcaagttgagcctacccgcataagagaggtagcgtgacgtccatgatgcaatgcgttttcttatctgctcgagaagcggagcatagtccccagccgagagtctcttagtaaccaaaggtaagcctaagtatctgacgggtaattgaccaacctcaaaaagaaatttatctgcaatctcagctcttactattggtgacgctccagccatatacaaagtcgacttctccatactaatttttaagccagaatgcttataaaactcatagaaaatctccattattccctctatggaacgaaccttaccatcagaaagaaccatcaaatcgtcagcaaaactgagatgtgttaggcctagccgtttacatttgggatggaaaccaaatttatgagcaccagcaggcttatccaacatcttggagaggacatccatacatattacaaacagatatggagataaagagcaaccctgacgcaaaccccttgcactttggaaataaccagcgagatcaccatttacttgaactgagaacgaggccgtaataatacacagttttatccaatgagtaaaaaccgctggaaatttcatagttgttaggacattaatcagaaaagaccattgaaccgagtcaaacgctttagagatatcaattttaatagcgcagcaagtagagactgagtctttatgatagtccttgactaattccgtagcaagtaatagattctcaatgagtaatctgtcttttacaaatgccgactgatttcccgcaacaaatattggcagtagcactttcaatctattagcaatgatcttggaaattaccttgtagataacattacagcaagagataggtctataatccttcatttccttggctctcagcttcttcggaatcagagctaaaatagttgagtttattcctttagggaggaaacctttcacacaaaaagattggactgccaaagtgaattcatgacctatggtagcccatgctgccttataaaactcagtggtataaccgtcgggacctggagatttgtcctttggcatagaaaacagaaccctctacacctcctccgctaacacctcacgtgtaagcagcttttgataggtatcagaacaacgcaaggcagcatgttttgaagctcactgacttcgacacctgtataatcatctgggataagctgcagaaattctcaaaagaatctctcagcttccacttttatcttatctccttttgcaacactaccatctacacaatggatttccttgatctgattcgttgactctctagccaccacagcccgatgaaaagttttgttgttcttatctcccacttgcatccaatgttgcttcgatttttgctttaagtatttctcttccaggcctgccacaaaatcccaacaagtataagcctcattctctgcttccatagaatgcagtgatgggtttgataagttctcctcttgtgtcttgcacaatatctcaaaagcttctttggatttcttcaccaggttacccattctatcttttgcctacaactttatcttaggtttaagatcctttaacttctttgtaaaatggaaaagcgtagacgtagataggaataatggctctgtatccttccagtagtcatctaccacaggcttgaactcctccatttctgcaataacattaacaagtttgaaaggttttcgtctatttttatgactgccttcttctctactaaggttaattcttcctcataagtgatctgagcaccctccagcctaaaaaataacgtaagattgtgggaatgtttgcagccaaacatcatttatcaacacccggtccagttttttcattataagatcgttttctcgcttgttacaccacgtaaaaagtggaccctgcgaagccatatcagttatcgaacaatagctcaccgtttgttgaaaatccttcatacctgcagtgaccacaggataactatccgcaagagagtgctcttcgatatccaaagtttcattgaaatctccaaaaattatccacggtcgtttccgaataataggtgaatcagaatggtctttcagttcctgccacaaaatcttacgatcttctgcagtgttcatagcgtacacaaaagaacaaaagaattcttcttgatggttgtcaagcttaaccgagcaggttaccaactgagcactcttataaaagggactaagccttgtactactacgccacataacccaaatgcggcctcttgaattgtgttcataatttgttatgatcgaccaatccttaaacaatttactctgcaaactttctgctttatgctccttaacccttgtctctaaaagacatccaaactgaaaaggcgtttcctccacccacttctttattacagaatgctttgatgacttatttaaccctctaacattccatgagaaccccgacattaacaacgtttaagagggggtttcttggtctgatctttagggggaccccttgctgaatgagaagagttatgtgggatcgctttatgagcagttttagatgcacgaggtaaagacgaacgcaaaaggacctccttatctcctcgagttaagagctccgtgtcctcaacctcccttgaaatcgtaattcttgtatctgtcacaaccaaagcaggctcctggtctaccttttccgctacctcctctgttgcttctactgctcccataacttcctcttcacccaaggcagagaacgagttagagaggatagaaacctcaccgtacttaagaccctctgttttccccggactacgtcctgtattagccggcgtgatccaaccctcatccatcttattattaattcataccgcttctatttgtgcaccatcactactttttgccgc

SEQ ID NO: 30744 - DNA, 754 bp, Arabidopsis thaliana landsberg
aaccggctgcggaaaaacagatcatcagtaaaactttaaaagattgatagttcatcgtatacactgaattactcagatgaagcccaaaggcttctcctacctctttggcatccttaagatacagagacgcgacaatcacatgaacatctgttttctcttcagagtctgctccgaaatatgttttgtaccattgctgtgacgaaatggttctaactgaagctaggaaatcagcagctgggcgacacacacgtccagcaccaagaatcaaaacgcctgattttttcgtcatttcaggcttctcttttatctcattttcttgctggactttaccaatcttcagtgagatcttatttgcttctctatgtggggatatataatcttcatttggattagctaaccgagttaatgaatcaatgatttgatccaatactctcttatcatccgcaccaacctaccaagataatgcaagatgggttctttaacaagtgggaataggttaatgtggggccagaatgtttttggcttgtagtttgtttacttgttttaaaaacttacgagacttagtgaaaaggacattgaacctaaacgtgacattaaaaactcttgacagttgttccatgtgaatgattaggttttatccagaaagaaacttacttcaagttctgagtacgattcagcatcagcgctctgccccagttcacatttagccaaatgaaatgagccaccagccgcttcgatcatatcaagagcttcg

SEQ ID NO: 30745 - DNA, 4567 bp, Arabidopsis thaliana landsberg
  unsure (1)..(4567): unsure at all n locations
ttttacttgagagtttcagatttacacatgcacaacgttaaaaaaaatagcagaaaaaagaaagaatatatagttctttatttgtgagaaaaatgtatgaaaaaaaaagagatgggtgtaaaaagcaaaaggataggaccactgttactttgtagcctcgttgaggaatctcttctcgcatctcgacttttgtgccattgcaaagtcaatgcccagaacttgttcccaggccatctccaattaactacgtctatttaattaaacttttaaaagaaaacctaataaattaaacaaaagaaaagccgtcaacgaaatctaagcttgcagcgatatcgatgaactgataccaaaacaatgttcaagtttcactttcaaattgttttttcttgaaatagtttattgggtaaggcccatagatatttcataagaagaacacttgtcgaggttgaatcgtatgtctgcccaccgcggcccatgcatcctctgttggtagcataatcgttttaggccatactattgttcgtacacactgattttgaagtcacctttgtgcactccttaattcctaaattgaagaagcttgttctcattcttctttgggttacaaatgccaaggcaaaaggaacttgggccaaattaagacaacaactcaagcccactctctgcaaataatacttgggaatttttactaaaacggtgcgtttcatccaagaatctattaatatccctaacttgaaatcatcatatacgtaacccaacatattaaagagttaataatgttaaaaaaagtctcagaagagagagacgtagagaacacggaaagtggtaactggtaagcgtcgtcatcgaggatatagtagctacgtgagcaaacgtcttcactcatctctgtctatttctcttcgaatacacgtaatacattttcgattggattgatcctccctcggtcctatccaagtatccatccacgtaaacaagagcttgttcctttcttgttttttctttctttaaatagtaaaaatacttatttcatttgtttcgtttgatttcattattattgtctatggcattatatactatatatattatttctacaacattggctggctcacgttgttctcgtgtatacaacaaacttaattaatgtctctctattgcattagatagtttcggagcatatccattatgtgaaagccacattaagttataactaaaagtagttttcgaaagagcttaattaagttatgttctgtttcaaataaaaatgaacacgaggattttttttttttttgacagatcattattaacaaaaatgattacctgaagaaaggggaaaataattatagctgattacagatcattattaacaaaaagaattcttgtcacatcattcattataacaagaaatattatattatattaatttaatctttcgctaacacgcccacaatatattaatcatatacgtaatttagcttataaaaaggacggaaagagattattactgcgcctaaaaaactcactaattccaaagaaaaaaaaaagcttgtattttttcttgacaaaccagctcacaggcattgcatgatcaaactcnnnnnnnnnnnnnnnnntcccttttccataattttcccattttgaggaatgcaaatttggagagcgctttagctaaatcactgccttcattttttcactttggatttaataaatttgcattcctctcttcctctctgctctgttctgttctgttctgttctgatttgagttttcaattaatcgctcgagcaaaagctatttctcaactcgttaaatttctgttcccagtttgttcgattttcaacagtttcacattaaagtttgggtttttgatgtttggttgatgaaactcgaaatatgaaatgtttgtgaatctattccagggtgtttaaaataagggtttgttgttcatctgcagagattatatgtttttacatgaaagatgaattcaaatggccatgaggaggagaagaagttggggaatggagttgtggggattctagctgaaacagttaacaaatgggagagacgaacaccattgacgccatcgcattgcgctcgccttttacacggtgggaaagacagaaccggcatttcccgcattgtggttcagccatctgctaagcgtatccatcatgatgccttgtatgaagatgttgggtgtgaaatttctgatgatttgtctgattgtgggcttatacttggaatcaaacaacctgaggtgtgggaatttgcattaaaaagagttcctttttttcttctatatatatatcagtttatgagatttgattctgtttgcagctagaaatgattcttccagagagagcatacgctttcttttcacatactcataaggcacagaaagagaacatgcctttgttggataaagtattacacttttcatttatccttttagtcctatctaagatactgaggaatgttgacaaaaggggtatccaattgcagattctttctgagagagtgactttgtgtgattatgagctcattgttggggatcatgggaaacgattattggcgtttggtaaatatgcaggcagagctggtcttgttgacttcttacacggacttggacagcgtaagctcatgttataattctgatgatcaggacatgtttctgtgcagaacaagatgagatgtaattttccatgtttgatgcaggatatctaagtctaggatactcaacacctttcctctcgctcggtgcatcgtatatgtattcctcattggctgctgcaaaagccgctgtaatttctgttggtgaagaaattgcaagccagggactgccattaggaatctgccctcttgtatttgtcttcaccggaacaggaaatggtatcttctttagttctactgcgagttctttgaatccttctgcatatgtttcatctcattaaaaaatttctcatccgcagtttctctgggggcgcaagaaattttcaagcttcttcctcacacttttgttgaaccaagcaaacttcctgaactatttgtaaaagtaagtcacgctttgctttttatttggtttcagagttttgaagattctgaaatgtatatttctcacaggacaaaggaattagtcaaaatgggatttcaacaaagcgagtctatcaagtatatggttgtattattaccagccaagacatggttgaacacaaagatccatcaaagtcattcgacaaagtaacacttaccttcttagctccttggctgtgacttttgttccactacgctaaagtagaatacctattaattcttcaagcttatgatgtttaggccgactattatgcacacccggaacattacaatccagttttccacgaaaagatatcgccatatacgtctgttcttggtagatcctgatcactgttttacctttaaagctcaagagtttacatataagcaaatcctctgtccactccgtgactgtgaccatctcattttggttagttccagtgtgtaacccctatgactttctgtgcagtaaactgtatgtactgggagaagaggtttccctgtcttctgagcacaaaacagcttcaagatttaacaaaaaaaggactcccactagtaggcatatgtgatataacttgtgacatcggtggctccattgaatttgttaaccgagctactttaatcgattcccctttcttcaggtaatatatacttaggaagagctttcttttgagtcatctacgtttactatgatgaaactcgtcgagctaaacactatctctaggtttaatccctcgaacaattcatactacgatgacatggatggggatggcgtactatgcatggctgttgacattttacccacagaatttgcaaaagaggtatgtatgaaggttacagttatagtacttaagattaaatctaaagttaaaaaccttgtattgagtgggagttcttgtgtcctgaaaaaggcatcccagcattttggagatattctttccggatttgtcggtagtttggcttcaatgactgaaatttcagatctaccagcacatctgaagagggcttgcataagctataggggagaattgacatctttgtatgagtatattccacgtatgaggaagtcaaatccagagtatgttctgcttcgagcgttacttcatctgaaatatttaggcctcttctctaaactatgttttcatctttacccactttaactgcagagaggcacaagataatattatcgccaacggggtttccagccagagaacattcaacatattggttagttttgatgaagaaagtatatataactagtttccgaatcatatgatttaagctaatgaattaagaaaatatatagttcaagacttatgattcatatctctatcaactttttgaccaaagattgatactttttcgacatctgtcacagcattttgtgatgattttgattgagacaaatcatttgtaggtatctctgagcggacacctatttgataagtttatgataaacgaagctcttgatatgatcgaagcggctggtggctcagtt

SEQ ID NO: 30746 - DNA, 3334 bp, Arabidopsis thaliana landsberg
acaattcgatatgttgtaaagaacatccgagtgttggaagatgtcttccaaacatcgatgatagtgctgagaagggtgggaaatgctggaagttttgtattgaagggtgtgaaacaggaggtttttgcaaactttttggacataaacatatatgtcattgcaattgttccggttaatatgcatcatgcaaaattaataaggctcctacgtacgatacaaggaaaaatttgtttgaaaatataattaataaaggttcaactacattgttcaaaaatgaataacagattgcataaattttatatctcttctcttcttctcacttctcaatatcaacttaaaaaaataaaaatcaataatcacattttgaaacatttatacaaatataaatgaataactctaatgtatgtatatatatacttaaatttctgcatatgtatagtattgttccaattagtgtttaaagacacctggattattctttatataaaatttacgaatttggtaatttatatctattatgtatgtagtactccgtttttttttgttaaccgcacattagttataaaaaaactccattggagatttcttttctacatatgtacaacatggtattttttctacatatgtacaaagcttcaatttaaattgagacggtataatcagataattattccaatatgtaacatgttaactcaagaatacatattttactgtaagaacagttccattggtagtatcttattaaggtttttaaccctctggagatgttctaaagtttcaaaagattaattaataataattttttcaaaattaaaaaaaagagggaaggggtcattatttaccatttataacttgatcactagccattaggatattgctattgcatgatcaacatttatttagttgcaaatagtgattaattttaaaattgactaaatcatctattgatgacagaacatgggtcacaatcatgtagttgcagattgcaatcgacgtgggtcacaatctttgcagttttatcccaaaacaaaaataagacactctttaatcttcgagttaagacacttaaatgtcgtagactgttacatttactgatcaatcgattatttcagagaacaagaaatggaatatactgatatgattaggattctgtgattggaaggaatgtccagctcaaccatcacaagtaacgatctaatcgatcctaaaacaacgtttaatgctttataaactaccaagaaaaatacaacaatacacgagattaagaaatgttataatgtaattgataactaatgacatcagaataaaatggtgcgtccaagattgtcgttgtttggacgccttttcttcaaaaagtcaatggaacgaaactccagacgtgcatggtgcaacaaaacaatgtcactaacctaataaataaaacaagtttatcgatcaaattaattatctgcgtaaaaccaaaccaaaacatttgtttctctgttgtttgtctcaaactcaaatggttgaccgtcctaccgatgtggtcgtagaagtcggttcttccggcagaactattttccgaccggacgagactccgactccagaacctcggagaccaacacaattgccgccagttcctgcaccggagaaaaaactaaccctttttgccttaagactcgctgttcttgagaaggtttttgagattccaacattctagttcattatttaggagtccttttcttgagttttaaattgtgttcttaaatcttaattacagattgcttcagggttgggatctttaggtttcgtgtgggccacggttgttcttcttggtggattcgctggaagtttagagataacagatttctggtttgttactgtgattcttgttattgaaggagctaggcttttcagtagaagccacgagcttgaactgcagcatcagtctaagtacacaatctctggaatcaacatcttccggttccttgtcaaacaagttaaccaaatatttcaccaggtggctcacattgccggagacgacaatagaccatcggttcgagaaacgagaaccgtacaaaggaattcgggacacatcacgcggacaaggacatggaaaagctcagatgttcctatgttgccttacacaggatgggtttttgtttcaagaaacgtgagtagaatcttcttttggctccagattgcttctgctttcgccagcatttttatctccacgatccaactcatcaaacaagactatggaggcaacgacttgaaacccaaaagcaccaatcttcacgcagctttgactctcttctactctctagccctagccgaggctcttctgttccttgttgagaaagcttactgggaatatatgattagtgttatcaacattcttgagaaagtgaatgaagaatgcggtcttgagagatttggtacgggctcggtgagaagattcttctatgatgcctactcaagatgcctcaatgggagcatcttcgacggattgaagatggatatggtgatctttgccatggagctcttggtagcgaattctcttgatgagcagctcattggagcagagattctttcgatattctcaacccacgacgactattcggttgatactttgcagaagattgggacaaatcttgcaatcatagaaaggttagtggagatgttgaattggagagacaaaaatcaagaagatgtgagaatgtcagctgcagagattctctcaagattagctagtaagaagcagaactctctgagagttgcggggatcccgggagcgattgagtcgatatcttctcttttagagagcacgagagattcaggtgaagccactgatgagattggagaacagagtataaaccagtcaaatttatggacattgaacaatcttggactgctgattctgaaaaggctagctcgagatcatgagaactgtggaaaaattgggaaaacaaaagggttactttcaaagatcattgacttcacttatgctgagaagaatttgttggaaaatccaaatgttgctgttgcagagccttataagatcttggctgtgaaacggtctttgaagctgttaaagaagctggtgagcacgaccggcacaacagggaagaacttgaggatgactatctctgggattgtcttcacagtgagcaacattagggaaacattacatcatggaaagagtcagcctcatttgcagaagcttggtgcagagattttgactttccttgcgtttgaagaaggtgcaaccgacaaaatcgcaggcacgggcggggttttgaaagggaatctctgaatattcttgaacaatgagattccaaaggacaaaagtggt

SEQ ID NO: 30747 - DNA, 1630 bp, Arabidopsis thaliana landsberg
tcccaaattctcttcatctaatctcttatctttccccgcgtacgccatcacaaactccacacttagcgcataatagccactctccaccatttctcctataacgtgcgcatgcgtggcgtacaataccgataacccttcttcctccatcctcctcagaatcgccatcgccgcttcaactctccctgacttacacgcgcctaacacaagcgcgtcgtaagtacgcgtgtctggcgacataactccttcctcctcttcctccatcttcctcaacaccctgctcgctccgccacgtcaccgtcgtaacaatgcgaagttaaaaaataattgtatgaagtcacgtccaccggaatcgcgtgagatctcatcaattccaccacgcgccaagcttcttcgattctgttcttcttcgtgagcgtgtttaagatcggatgaaatacgcaggttgagagtccgaattctccgatcgccatatcgttgatcaagaccagagcgtcgtcgatccggccgagtttgcagagacgagcgatgagagtttcgtaggagtgtttccgagtgtagccggcgtcggtctgaggcaaaatacggcggagatcttctaaggaggaggagtaagagtctgtgtttgttaggaatttgaaagtagctgtcgtgttgaaacacgcgtttacgacgcggctgttgaggagacgacgtacggcttccaaatcgccggagcttccggctttgaagatgaggttatcgaattcgacgcaagtacgacgaccaggtgaagcagttggattgggatttacggtggagaatgaacgtcccgagattgattgaagcagaaatctggaattgttcgcttctttaacgaatcgtcggagaagagacatcgtctgattcaggtcaacggagattaggggtttaagccggaacattagaaatatagaatacagtgtagagatatactgcgcttgagattattgggctacactagttttgggagaatagatgggccttaaaggcccaatataaaaaggctacatgtttatttgtctcgtttcattgtctagggtttgtagaatatatataccatctttcatcctcaagtagtctctctcaccgcgattagggttttgagcaaaaaggagtgatgagagctaaggtaataatgatcttccgatactgtgttcattgtctgattcatctgctctgttatttacatccttagtatttagagccaacttttcgttttttcttcgtcaagtaattgtggatctggttgtgttgttttatatctcagtggaagaagaagcgtatgaggagattgaagaggaagagacgaaagatgagacagcgatctaagtagaccaaatctactccacaagtctttcgcttttcccctctgcattttgtgtttcatttgcttcagtttgttcccagaatttgtcttagtttcaagatattgctgttgttggattaatggattttcagtttgatcttcctttgtctattaatttacgatttaatatttgtctctaagcttatattatctcatcgtagctactagttgatcttaacgaatttgtagaattagtgatccgagagcgatcaattttgaatatcatcatttggttgcaaacatttc

SEQ ID NO: 30748 - DNA, 789 bp, Arabidopsis thaliana landsberg
aaaaattgtgttatgtatgctcagatgatcatggaattacttaaggggagcctggatacctttgtgcttactaaatgatcatctctgatattatttcaagcatgtactgtagttttaggctaggtactaagttgaggccagactttatgttcagcttgaaacagcttggaatgctattgacagcataattgtatgcaaagttatcacttttattgcatataataatttctggcccatgtcatgtctccgaatgccatctgcatatgatctgtttgatgaaattccttgctgtcttgctatgttcttagtcatatccactttttcgattcttttgtcaacttagagattttatgttatgccatttttaatttgaatttataacagtgctttcttctgtcagctgtatgatatattatgtcccactttgtttttctttaaaggagttttcaattttttatgttttgtaggatggaaggccatcgccctattctggtggttttaaccagcaggcttaccaacctcgaggaccaggtggtccacctcaatggggttcgcgtggtcctcacgggccacattcaatgccatacaattaccaccatggtggaccgtacccgtctcaaggctcacatttcagacctcccaattctggtggttatcctccacaacatatgcctcctagaagtggatatggttctggttgggaacaaagacctccacattctggtccatatgattattacggtaggcaaggaggtcaaaacccaggccctgtgccttctcatggtgctt

SEQ ID NO: 30749 - DNA, 1808 bp, Arabidopsis thaliana landsberg
  unsure (1)..(1808): unsure at all n locations
taattataattaggttttaagtaatgtactcacttgattcataaacttccacattactttttctttaggcagatccccaaatatatcaattattatctcagaacttttcatcttatccaccaaagtatatttacttgcatacaaagaaaattaaatgcttgtgttggcattgcaacttaagagagaacgtgtcaagaaaagagaaacgaagaagcagagagaagccagcacgaaagtcccggaaagggacacgtcgaacctgtctctccttatatacgacgtctaatgtcaactcgtgatctcttaaacccttaaaatggcgaagaacaaggacgacataaagtatgcaacggctcaagcgaagctatcgggaagacgaagcaattcgtgtaagctacaaacacgggacaccattagagggaggcaagatcgcagagtcggagcctgtagagctgttctcgagtgctcaacgtatcgagaagggaaaagagcagtcagcagcatccggcgatcaaacacagatacaacgtgacatcaaagatatcaagggaacacgtacagacgatagtcccgctgatagaatcagttacttgggtatagcgtttgcttagttcaataaatgtagacaactgttgctgtctaaataaaacgaactggagcatgatgttctaagagctaacgctaacttctaacttcaatctctaaccttgaataaatacagcatatagatagattaactgttaaaagattcaaaaaccaaatctctgttttgccagaactgcatctagtggatataggagtgagccaaattcaaaatataggctgatatgattgttcaagactaaaatgcaaaaaacacaaaaggttcaaaactgattcaagaagctgcttaaaaatcaagaaactagaaaggtattacataagatagaaattttgagacacgtcctatggaatggactacttggatcgctgtctcatctttcggcgcttcctctttagtctcctcatacgcttcttcttccactgtcaataaaaatgtttcaatcaaaatccatgacattatcaggaattggaatttaagatctcctaccaacttctatgaatagtatacaatgaagtgaaatttaccaatcatttcacacctaattttgaatctaacaagcaatactcagtaatcatttcaataacgtttcaaggtagatttgttccctatatgtaaaagaatcaatcaattcaacaaagagtaaaattgacaaggaaaactatagagccgcgtaaactaagaacaatctgtgatgaatccaagtatctaaacaatatatcatagagaaacaaaagcagattagagaggaaatgaacaaaccttggctctcatggtgcaatcgccgcttcgttcgccgttctctccacttacggacgagagagtctccagaatatatagctagggttttcagttttcctctctaaaatctgataaggccctgatattttaacgggcctaaaaatttaaggcccatataatgatttaaggatnnnnnnnnnnnnnnnnnnnnnnnnnnnnnataaaagaggaataaatgctagagattagagaaggagaagaaagaaagtacatagatgtggtacacagcgagattgtgagaagaagacaagaaaaacaagtgctgcttcgtcttcttacccatcatcaacacatacttccagttttgactttaacagtgaatattactcatttacatcctcattaaagaccaaagcaaatcacatatacatatactgatatactacttgtcgtctttttgttttca

SEQ ID NO: 30750 - DNA, 2233 bp, Arabidopsis thaliana landsberg
  unsure (1)..(2233): unsure at all n locations
aatgtcctttaaaattcattttgatatcttaactccaagttattcaattcataaaactatatgttaccatatcgaaggcgtgattgatgatgacttgttagcataatatgttagagtgagacctgtttcttgcactaaaagctgattttttttttttttaattattaaggaacataaaatgtgtgtatgtacagaggcaataataatggttctgaggttatgaaagctacaaaatgccaaaaagacgaagaagacctgcccacttaactatatatcactacacaacattactatcactcgttttcctctcctgaagttgaactaccggacctatcttaaccaccggagccaaacccaattacccaataaacaaaaacagtttcaccacccacgtaattcaactataagaaagggaaagaaagaaccctaaaagatgatgatgaagaagaaaaataatcagaacctatatcgcctagtttgctggagcctacccaaataaccgattatggtgactggttatcctttcaggggaccaaaacttgccttcatctttcttcatcgctaatggtataacaaacgagactatacagaaataaagagagagaaagaccttataccatcatgtttaagtctgaaagatcnnnnnnnnnnnnnnnnnnnnnnnngagatcatcagtatctggtaatgcatcatcatcgatgttcaaccatgagcttagatctcctgcttgtgtatcgaaatcatctggaccacctaaaccgtctggtatctgcaggtgagataggtcaagaggctctgactcatccagtgtctccaagttactatactcgctgttgttgctgttagttgttttcgacaatgatgttctggtttgctccacgatattgacacaagtagaagaagaagaaaacatcggagttgttttttgcctcggttttgtttttgatttccgttcacccttggcatttacaagcgcaggccgaccgatcttgttagtgcttccgcctcttgacgaagaagcctgtccttttccatctctgtccctctcacttctctttcctttcgtactgcttgatagtggtttcccacccacatcatcaagcagcaattctctcttcttcattctatttgaccacatcatttcatctctgccttcccgtaaagcattttcagaagaattggcatgattctccgtgctctgtgtcattggcaatgccaatgatgagcttggttgtgatcccatgagtgctgaaaaaaagaaagattaaaattaacagagagtttctggatttgaaaacatagttcaatgttctgtaaaggaaaaacgatatcatacttgaagctgatagaatatcttccttgtctgtgggattatcttcaaattgtgtcaacccggcaatgatgatattcttaaatgtggactcactaaagcaacttttgcctgtttcttcgaattgacgacatctttcaagtgtccttttcacaaaagcaaacgcggcctgctttgatatcttagtcgccgaactctttccacttgcagagtgatgccgccgacttgcctgtaaaataaaatccatatatgataatcaaaacatgaaactggactatatcagaaaacgaagaggaaaaagggtcaacagtggaataaatctgaaaagtgaacccctttatgagagaatttaccttgctcttttcatatgccatttcgatgagtttttcataaccgagccgctcaaactccctgtgtaaggaaaaaatgtcagcacaaaaccgtcagatcacagtctagatcattaaaggcatgcaagtaaaagcggaagaaagacaaatcttacttctcctgacgttctttcatctctagggcaggctttaatagccgattcaacatatctttcttcttggaaaccttaaattttaagatagacaacatcacaaagttagctatctagagaacacagttgtactttgtcctttactgctacgacatgaaaaatggccaagatagattgaagcgacaaaaaatcataatttgccaacgctatattgttttgacaaagagataagagcacgtgagagaacataccacctcacaaatagcttcctctacgttttgatgtcatcaacaattccttcatcttccacgtttgaaatactaggctgcaagaaaacacaacagtcacacatcaatccgctaggactatagaaatagagtccactccatagcatataagc

SEQ ID NO: 30751 - DNA, 1409 bp, Arabidopsis thaliana landsberg
  unsure (1)..(1409): unsure at all n locations
accgttgctagtgcaagagaaggtggaataaacacgtacgagtacaagaaaattcccaagctaaacgaaagcaagtcgagttaggaagagtctttgtaaaagaagagtcttttcttagatgtgtggaagagcaaagagggccactttccaattgttgataatacatgttgatttacgacgtccatatagatctgaatgaatttttataaccagttagactttacatcttttctacacaactttatataaccagtattcttgaaacccaatgactgaattttaagaagaagattatactaaaaaaaatgaaatgataaattatttttttttatttgacatgatgcagatttggatgttcttatgattggtgttgaagagaactcttgagatatagggcttctttgagcttccgaccgagagcgaatgccaatggtggagggactgcatttccaatctgcctatgtttgtgttttgtcgtccctgaaaactcatagctatccggaaatccctacattttattatgaaacaacaatttcacttaaaacagttgtatccataaccttaacattacttaacttccaaaacaaaacaaaaatatctacactctattactgatgctagagaattgaagaagaaggaacataagaacttttcttacctgagatcgggcgcattcacggacagtgataattctgtcctgttctggatggaagcacattcccaccttacccatgggctgcggatcggtgatggaaatgggtaagtttccttgccagtccaatctaccatagagtcccttccattcgttgtggtttttagctgtctttgatagagctaaaggacgcagtttttccacgagtccatttgataatgtgacctgtagtattaaaacattgcatgaaggtgacatatagatcgatttagtaagaattcttgtagtggaatgtataagagtaagactgacattttcgtcnnnnnnnnnnnnnnnnnnnnnnnnnnncctctttgggattttcttacatcgaatgaggtttagttcgttcagccctttgcagatatgatcagtgagaacactcatgtttcctcttatcttcttttggaaccacgagactggagtagttccatactacatacaagacacaagaaacatgagttcatgttattttatttaatgtaaatgtatagatactttcttctagtggtgtaattattaaacaatacctctttgtttatcttggattctccgttttctactggtggaagatcgccaattgtgtctctcaccgtgattgaacggaaaggtgcaccaaatttagtattacgaacagcatcatagcgtaaacctcgaggtaatgagattttactgccgggattatcaaagacatgcattggctcaggccattctggaa

SEQ ID NO: 30752 - DNA, 3013 bp, Arabidopsis thaliana landsberg
cctaatgaaacactctagactcgatcctaaatgtgatgcaactacatgaacactctttttttgtgaaatcattttctgaaatttttcaaatttttttggtttttctatgccttacatgaatgcagactgaaaaatatacacaatgcaacacacacttcctgagccctcccccaaacttaaatcacacagtccactgtgcgaataaacttggaagagagtactcaggacaaatctaatcacagaaacaaaaaaaaatgaagaaacaaatcacaacagatggtataatacaatggtgaagtgaggcgcttacctcagtcgaagaatgaacgtagttgctcgtcaatggctgcctgcgattgctattaggccagaaactccctgttgtgtctcatctccgccctgtgggttctcgacctcatctcctttgtggcggtcagcaccgccacgagtatactcgacctctcttcttctgctacggccaacactgctttgtggatactcgacctctctcttatactcaggctagcaccgcggtcgagtgatctctcctagcgtggagaagccaaaacaaggtcgagtgtctttgattgctctgtggtcgagtgtattgctgtaccctcagagccagaatccacttcgctcagctcttcatacttatatcctgaaaacactaacaaaatgcatcaaaaacaacaaggaaaaataaagatatgcacaaagatagacttgggacttcctcccaagtaagcttgttttaagtcactaagcttgactcttacagagcttagtcataaaaaaggtcgaagagaggaacatagaagtcctcatggttgaattttcagtgcctgaatcatactctgcatcctctgttgacatatggtatgatgagtactcatttgatttttcttcaaaataagcctctttttgatcagcagagtagtcttcttcttctgaaccaggctcctttgaccaatcctcaatttcaaagttggggtagcctttaaccatttcttgaagttccagaatggtgctatttaactcttccatcttatgaattgactttccaattgtatcttcgtgagctttatgtccaatctagagctcgaggagttcttcatcaacaaaatcaagaatcaagtgttcttcttcagtagaggggttggtgggctgtttaggctctcctggagaataagtcggaatagggatttcctcctcactcaacaacttgttctctaggcttctttcctctaagtgaactcctttctgatcttctggtgcaaaccattctattgtgaaatcttcgtcctccttgatagctagtgcagtttccattttctttgggtcaataccatttgaaagcttattaactcttttttcaaacatccatagttgatctttcaggttcatcacccttgaagataatccctctatgactctgctttgccatttaaatttttttctcatctcataccagtcatcttcagtctgagctaacccttctattgctctcttcttgtggtcaatagttctcttcagcttgctgagttgagaagtatagttgacttttggtagggttccagcttatgtttcttcatcaacatccatgtcctgaatcccaaaactctgacctcctgttgttgatttccctgaagcttttctgatgtcaaacttcatcttgatgcctttttcaaggttcagattaatttttccattcctgacatctatgactgttccaactgacgctaagaatggtctgcctaggatcaggggatccttgccttcttcatctacgtccaataccacaaaatctgtaggtatctcaacatttccaatcttgtcaggcagattttctattagaccatgaggatgtgcaacagaaccattagctaagagtaaagctaagttgcagaacttgtattccatgatccctagccttttagctgtagagagaggcataagactaacagatgctcccaaatcacaaaggcacctattgaatgtcaatggtcctagagagcatggcagagtgaatgaaccgggatcatcaagcttttcttggatgattttcttcttgtatgtttcttgggtagaggcactgctgatcatctcttgattctgatccttcttgagtttttcaattttgaacttttttccaggatggtgagtattcagcaaaggtgtgtgctttatagtccagatgaattgctgggtggcaggtgcagcaatttgagttgaatccccccccccccccttcttgaatcatattttcctcagtatggggagtctgacgacttggtggagactcatcttcttggtggatggtgatagcattaccagtagcatagtccttaggattttggactgctttccctggaagttgttgaggatgctccagagcagaggttgatacaaattgactctccacatacttgatttttgaattcaaagcttcaaacttgacattcagatcgttgtaagaacaatcgatcttgttgtataattcagctatcttcttatcaaaagccatagcgccagtagcttgtccttgaatgatttgttgaatgagttgcttaatttcaggatcttgagctgatggggcttgttgtggttgttgagtgaaccctggtggtggattttgctgttggtagctgataataggtttttaagatcaattaatcctaaagcactatcatgtcgttgtagtattttaggttgtcaatccaaatgggtgtgatgctaacaatcaagatgtgatcagaagtcactaagtcaagcaaagcaataacaggttttggtgtgttctagcagttctaaatgaacatgcagaaaacagaaattcaagcagaaacaataaaacactcgaccaacacagctctttgcagagcactgggtgaggtcgagtgataggtcgagtaacagacagaaagtataacacagttattcgactgcacagtctgttgccagacaactgggtggtcgagtatgaggtcgagtaacaaaaaagaattataga

SEQ ID NO: 30753 - DNA, 1590 bp, Arabidopsis thaliana landsberg
ctcatacttaccttcacaaaagttagtggagcaacccgtcacacacacatactatagaggagaataaagagaaaaatgtgagaaagtgggttaccattgaaaaatagggtttcttttcttttatttgtcaacttgaaaaaaggttttacttttgattttagtttttcacaataatgatttcaaaaatcttctgatgcaaatgcttttattcatttagctataaaagcctttttgtatgctttttttctctttttaggtgtatggtggagtgagtctggctgttagcgttgatgtcaagccaaaccgcaaaatccatttggcaaagatgggaatggacctaatggaagtggggtttacacttgtcactctctcacccattctatgttccactctttttcttctctcatgtttgcgcaaagatactaattcggggttgttcctttttcacttattgaaagtgtatatctttcaaaacattcagaaattttgtgggttagtgttcactaaaatctttggttaattatcaagtcatccaaatattacaagtaccaaatattaggacaagtctttaattttcacaccttttttcttacctatatgagagaagttttgttgtaagagtgaatgtgtttcctcgttagtggagtatgatgaactatgcaacttcaaggcagcacatcggacattttggggtctacaagattatcatcgtagatttttaacgcgccatttagaacttctcagtctcatttgggtgatgaaaatgccttccaaggcataatcattttttgttgacattttggtactttctcatgaagttgatgcatatgattatacttggaagttggaacatatatatatttaaaataataaaggtcctctgttccaggcttattgcatccgcaaattcatgagtacaatcctttttgaacagagaacatcgaaagaaaatcatacgaaagattttacaatcgtttgagaattaacaaaaatcattaacttatatagtttccaaaattcaaaagttcaaaacgcattacgaaatcgaccgaaaacaaaaatacaaatcgataaaacttaggtgcaagtttcacgggaaattccgagcctggaatttggaacgtcgatgagaactcggtggttctgttgctgcatactagcgatgacgttaaggacagagttaacgttgaccggagctgcagccatggcgaggcagctgaggttacctgcggagctgtggatgagaaggttgtctggaggcagagtcacgttcattccggcgaacataaacgtcaccgacgggaacacgacggagccggagtagcatgtgtcgaaacctcctagtgaagttgcgtttgcgttcttaacacgtctcctgaactcgtttctcaccgccacgtaagctggttcgactagccttgtgtagaccgtccctgcgtacattcaaaagtgttttgtaattaaaaatcaaatttcttttctaaaatataatttttatatgaaaatttggattggccatttttgttttgattgtaaaatcatttttagtccagaaatatcacgtgttacgtgtgagagagcagagcaatt

SEQ ID NO: 30754 - DNA, 2340 bp, Arabidopsis thaliana landsberg
ttctactcctcacgtgggacctttgagcgttctctttgagaaaaaaaaaattcaactcagtttctcggatctcttaaacaataccactccacacgttcctctgctatttcccttatcgttgtataaattggatatttatcaaaactgtaactattttgttagaatgagaatcggttttatcaatataccgatttttttttttttttgctaagagtcaatataccgattaatcagctagacttccagtttgacttgattaccattcgataatgagtctaaaaattacaacaccttgggtaatgagtttttgtggatggagagcaacgcgcatgtcgatagagaagagagccaatattagtgtggacccaaaaaacagatagaaacaacgaaaaaataggagatggaatacagactgttctctctacgatatacaaaaccccactcttcatttttatattcttattactttctacacactcatcgtatatcactcactatataaacacacactcacacattcactctacaaacactagaaaccacaaagacaaaatcaaggtcttaaacaatgagatcccatctcttgattttgttaatctctctcttaatcttgaaatctgaatccataaactgcaatgaaaagagccattcctcagatctaagagtgttccacattaacagtctatgttctccattcaaaacttctgtttcatgggcagatacacttcttcaagataaggctcgtttcctatacttgtcaagcctcgctggcgttaggaaatcatcagttccaatcgcctctggtcgggccatcgttcagagcccgacttacatcgtgagggctaacatcgggacaccggctcagcccatgctcgtggctcttgacactagcaatgacgctgcttggattccttgttctggctgcgttggctgttcttcctctgttctctttgacccttccaagtcaagctcctctcgtactcttcaatgcgaagctcctcagtgtaaacaggtaactaaatattgctttatagttataccctccgtataaattagatatgtgcatgcattctctggatggacttgaaaaatgaaaactatactcaacgtaatttttttgaatcatatcatacattcatacttaacgatacttttgtactgaataaaccgggaaaatcgatatacaaaaaatacatttaaattatactaacaaataattcgcatttttactttgttcaaaacaagatctaatcagaacatacataaatgtttcaaatcgaaagaaaaaaaatggttagtatttggacttgattatttttaacaaaacaagaaatttaaaaccaaaaccgaaatacgaaccgaatgtcaggcgtaatgtgaatgcctctacgtcaatttttggatccatctacacaaaagatgtgaatgtgaacttcgtttttggcgtgacattacaccatgatcgagaagtctagtcacgggttttggaccttttggtaccatgagtctaagtcacgggtatattattatttatacaagaaatttataaacaatccaactagtagagcatattttactgtttgaactttgatctatatatatactttgtcgtcatgctagttaggttttgcctataatacaaaaacgccacttacaactgcaattaaataacgtaacacatcgttagtagcgcaatttaataaccagatccaagatggataaaacaattctttatggaaatacgttgttaaactcaaagaacaaaaaaaattctaaatattaatcaataaagagttttttttattgcaggctccaaatccaagttgcacagtaagcaaatcatgtggtttcaacatgacctacggtggttcaaccatcgaagcatatctgacacaagacacactaacattggccagtgacgtcatcccaaactacacctttgggtgcatcaacaaagctagtggaacatcgttgccagcgcaaggactcatgggcttaggtcgtggtccattgtctttaatctcacagtcacaaaatctttatcagtctacattctcgtattgcttgcctaatagtaagtccagcaatttctccggatcactaagattgggacctaagaaccaaccgatccggatcaagaccactccattgttaaagaaccctagaagatcatcgctttactatgttaacttggttgggattcgtgtcggaaacaaaattgtggatattcctacaagtgcactcgcctttgatccgaccaccgcacccggccccatctttgactcgggtatggacttaacatcaactccttaatattttttatttttcgcttgagacctg

SEQ ID NO: 30755 - DNA, 2939 bp, Arabidopsis thaliana landsberg
cagagtcacattgttgttcgcgcgagaaagcaaacaatcatcctcggtcttcggtaggtttcttcttcccatggaattcgcgccaattcgtggaccttaatcactcactctcctcttgacacccacgcacgtaccctctctccctccaacacactctattattattttcgcagtatatgtaatttcgtcccaaaataattaagttaaaggattaatttggagattcaagtaactctatggagcttggatttgattataactatgattggtgacagacgtttaacttattagcattatttctgataaaataagcacagcatagcggcttttcctataacaaataatacatcaaaacgtagtatagtgtacattgatttcatttacattcctcaattctaggctggcttatgtataataactctgcgcagcaccagaggtcaaatagtatacattaaccaatttttctttcacatattcacacagatgacatctattgtggtgtaggaagtacaagccggttcaaaggcttcagcacttccgtcagctgagcaaatgacggccgcagattcggatccctgcccaaacataaaaccaaacatattttcaaccagcgcagattctaaaagtgttttgagtttgtttcatgacacttacgtttgccaacattccaggatgatccttcccaccacaggatcaagttccttggggatctcaagccgccgattctggaacccaactgctccaactacttgcattgggttcattcctctccatggtaatctcaatgttgctagttcccaaagtattaccccgaaactgtacacatcacacctgacgaaaaacagccaacattttttttaatctccttggaaaaaaagggaaagtaaagagtagtatctgccttaacattttctagtagaaccaagaacagaactgagcttctaataagctactcacttttcatttgagggctcattgcgtagaacttctggagccatccattcaggctggtaaaattaacaatgcatgtgattagagaagaagccgtaccccagattataacaagcatgccagtaggaaagttgcatttctatcaaaaagtaaagagatttaagggttctgcgttctcaccgttccagcagttgatttggaggataaaaaagtattgtgctttaagcgagacaacccaaaatcaccgacctacaaggttagtaagataaaaacaaaatctatttatttaccattagagtaaacaagtatattcgttggacaacttaagaaaaaagtcttcctaccttaacattccagttgttatcaaccaaaaggtttggtgttttgagatcacgatgaacaattgtcggtgtactggtgtgtaagcagttcatccccattgcctgaaagtaacaatagtctggaatttagtgactattctgaagaaataagcctgggggacatggaagttgatatatgaatctatttttctaccacgtcaagggccattttaatccggcgccgctcgtcaatgtgagatttgggccgatgaaggattcgatacaagcttcctctataataaaacagcaaaaaaacattagaatcttttaggactcaaaaatctcatatgcaattaactttcacaagaagaagatgggacaaacctaggcagaaactctgtgacgatggaaagatttggaggacgagtaacagccccaaggaagaatacaacatttggatgacgcaatcttcgcataatccgtaccttcagatagggaaatattaatagagtgggaattcaaaggcaagcaaataagctgcaacgtaagccattgggttcaaccaaaaaaataaatgggtagctaagtatactagtaaataaacgcaagtgaacttatggcttacttcgcttctgaactcggctaaagcagcacctgagaagtcctggtccaaaaatttcttgacagcaacttcctaaatccaatcataacaaaaatgcagaaatataaacttgaaaccttccacttctgtgaagataaacagcacgggcagacacagaaggctagtttaaatcaccaaaaataatctatcactaaataaactaaaaagacaacagctaatattgatgagagaatgtgagacaataccatggagggcactaatgcattttgtggctagtgactgaaacaagcgtatataaaagtgctttttaaaactgtttcactttaagaacacaaacactgctttgaatatttaatgaccaaacatgcatttaagcgctgcattttatctctttgcactcattaacaaatttgacaggttaataatgtttgaagttccagataaccggcagatacatgctccttgacacaattgaagccctaaaaaatgtgaacgcaactaaagcggagcaagttctggaagagaataacagatacaagttgctacaatagctctaatgaaatcaaatgtaaggttctgaaaaactaaccgtgccatgccagtcagcatgatagacctctccataggaccctaaccaaaacaagataagcattaggacatatgatctccaaaagctatatgctacctaaagtttattgcacagctatcccttgtaataagcaactgtagatcgtaaaaaaggggctatgctataaaattgtgctcccactagataataattagctgccgtccaaaatagaaaagaaaatagatactaactagttaaatctttcaaacacgtaaacaaataaactgcaggccacattacctaatcctattctctccgcaataacgagatcattccaaggaatttcacattcaccaacatctgcatcatcaagaacttgaggatcattccggtaggatgtagaatcaagagatgaacttgtactttcgtgatccttaagcctcggatcacagccagtggatatgtcatcacttgtgta

SEQ ID NO: 30756 - DNA, 2032 bp, Arabidopsis thaliana landsberg
gattcctgagattgttggtattgatgctgacgtcgatcatcatgttttgttttgcagttggatcaggggaaacaagcttctgtagatagtttgaagacattaatgaaggaggaggaagttaaaagaaagcttgcaagactcaataatatgaatcagcgtcattcacaatttggtgggacattcacccgggttaccatggtattgtttctcgcaatgatgcttaaaattttaggtttatgtaaatagttatgtaacttgaatgagatttttgataggatggcactaaagctgtactaaagggaataccttctactacggaaagcacaatgcttaagcctcagcaaggtcgtggagccaccgaaaagattgtctgggaacatggaccaatgtctgtgacaaatgacaaagttttgaagttgctgcatgatttcatcaatcagtttatgtcaggcggatataatggtagatgacacaatataacaacctcttttgtttatacttggttttaagtatcctgatgctgatgctgatgccagcgtaccatatctcttagttctgatgcagtcattatgtgaagatattgaaaaggagcatccctccattcaaaatagcgacattgttactttcttccaagttgctcagtccatcacctcttttcagtttcacaagtcttcggcttctagtgtgagtaattgagctactttggttttgtctctcattggtctaagttgctatgcatttatttttccttcatttcgacaaggctgaatctcggtaattttatgattgtctggcttttttttcagccagcaatagaaacagaggaaacctctgaactcactaccaaccagaaggctggagtaaacttttccaagagtgacatttgtgcgccgattgcagcaacaattaacgacagaatgtttttgcttgtcatttcaaaatggcgctgtgcatttgatggtctgaaagaaactaaagattttaagtttctatctgcagcaagctctcttgtgaaaaccatggtatgcaatatgcatgctttaatctcttactggctagttccctaagactgttcttctgccgcctatttgctttttaaatggtttttgtagctcatctttttctttagacatatgcaagtatcattggtttatgagatggagaaatggagaaatgatagtcatttccttctgcattttatccagaaactagtatactcatggtgttcattgttcacgtggtttttccaatgcagctttgcttactagatctggtgatcaaattgctacctgaagactctaaggaagcttttactgtccgcatcttgctgtataagttgttttatgaccagactgatcaagggatgtgtcagttcatcctgaatctggtgagaagttttgacacgcacaagcaacctaagaggttggcctctgcttctgtttcttataattccagaattttgctgtcatgtagtatcttgcaatatgtgatacatataatttgtgtaaacctgtatatgcttgttagacttgttaaatgttcagttgaaaagctcattttaatgtttttctagtatgattgtacttgacagttacctaacttcgtaaattaacttgcttgtggttgctttgttttttgccagtgagcttggagatctggtggaaagcatccatataattgtaggccttatggaaaaccttcaagggcgtggaactttgagggtatgtaactggttagatatgaaactccgattggatgatatacaaagcttagtaacatgtgtaaagtgttactaatgcaatatttcaaccaaatgtctgtttcatgccacaggtttcaaaaaaatcaaggaaagcaagaaagaaaaaacccaagggaaataaggaggccacagtgcataaactgtctgaaaatcatccaagtacttcaaacgaagctagcacagcaaaaagcataccgatggttatcccacagttcaacagaggatggccaatggaaatcctcaaataaccagaggcatgaacatagagac

SEQ ID NO: 30757 - DNA, 3342 bp, Arabidopsis thaliana landsberg
  unsure (1)..(3342): unsure at all n locations
ccttcccagcgctcatccttttttggataagaatgcatgatattccaatgcaccactgctcaactcaaaccctcaaaaccatagggggggatctgggtccgttactggatgaagacctaccggaaggtaggattagagtcaacatcaatggtttagagtccttggaaatgtccatccctatccggctccctacaggcgaagtgacctctgttcagttggaatatgagaagcttgaaaaacattgtttcctctgtttctctctgacgcataaagaaaaagactgtcccagaaggtgggcgataagagtgacaagacgcgtactcggacgctgaatcaagaacgcactttgagtaacattactgacaataagagaagacaagatgagagacggaatcttggttactctaacagggagagtgctcctcatttccgtttcacggccaatcgcaacgatccaaaagatagttctcggtctgatcttagagatagaatcagacacagagctgttccttctcatggtagtagggatcatcatcgtgagcagagtcctagaagatggaccagaagggagagtagaagagagtctccgcagcattctaggggtcttgcagggaggtctgaaggggaatcccaagcctataaaccctctcaggctaggggatcttcccagcgtgaccactctcagcctgattctcaattagtgtcctctgtccacagaaaccagcatctacctctcggtgaggatattcttggaaacagagttgaagaccaagatactgattctcgacctgcaactcagcacttctcctcccccactcctcacttggccttaaatggtttggatatgggtactaggatggtagaagagactagtaattcaaggtcaagaagacccgcgcttgagagagtagctctatctaacgaggatccagctcagctggataatctcacaatcactgccctatctgaacatctccaagatgtagatattcagtatatgggagattcaggtcacagtggcttgattcacactcaccgggatgtaggaggatgcagtcattctggcgtcacaccataaaccttaccacatgatgtggaaattagaactccagcctctctcagattaggatctcaggtggagtcggtcacagttacatttcccagtaaaatgccttcaacaagaggtacacgtaagaggaaagtacctgctaaagcacaaaaaccttgagctatgcctcaccagcgtgttcctattagccctctgcaaggctccagtagtagaaaacagaatatggtagggaggaaacctgcttcaaggaagaaactgagggtggaaaacttacctgaccttcatgaaaatgaagtcttggatgctcaagagggttctcagggggattttcaattccctctaaacccgcttccttagccttactctcttggaactgtcaaggggtggggagcccccttacagttcgtcggttaaaggaaattcgacttagtctttttcctgatatcttgttcctcatggagacaaaacaacaagatgagtacattgctaaagctttcgagtggatgggttatgctcacagttttatagtcccgccaattggtttgagtgggggcttagccctcttttggaaaaaagaagtggatgtggagatccttgaatctgcagccaattttattgatactcagattccatacccgtactcccatgctcacattaccttcatttatggggctcctcaggtggaaaacagatcagtgttttgggatcgaatcacattactgggagtggggagatcctcagcttggctactcacgggagacttcaatgacattctcgataactcggaaaagaaaggaggaccgctgagatgggaaggatcgttcctagctttccgtagttttgtgtcacaaaatggtttatgggatctaaatcactctggaaattctctgtcttggagaggaacacgatactcccaccacattaagtccagattagaccgggctcttgcgaactgcgcttggtcagaaaaataccccacgagtagatgtgagtacttgagatttgaaggctctgatcaccgtcctctaatgacttttcttgggagtaaacaaaagcggaagaataagctctttaggtttgatagaaatctgaaggaaaaggaggagatcagagatcttgttagagattcctgggagctctatagacaggactcagttcttcacaaaatcagtcgttgtcgccagagcatcatccagtggaccaaagatcnnnnnnnnnnnnnnnnnnnnnnnnnnnngagttctcaacgactgctgaaagcaacgttgtcttcagaagttccagatcaggagagaataaattcacttactctagagttagagtctgcttatcggttggaggagcttttctggaagcagagaagtagagtacagtggcttcatagtggagaccgcaacactggctacttccacgccatcacaagaacccgtagacaaccgaatcacttgtcggttatagaagacagtcagggacaggcgtttcacgaagaagaggagatagctgccacaatttcggagtactttcagggaatttttacttcaaataatacttgtgatttgaaagtgatagatgaagtcctcttaccttctatttctccacaatgtaatgaggctttgtccaagattccttcttcaaaggaaataacagaggctttgtattctatcaatgcggataaggcaccgagacctaatggtttctcggctgcgttttatcatgcttattgggatatcattggagaagacgtttcccgggatatccggttgttttttctgactagctgcttatccccccggatcaatgagacgcacgttactctaattccaaaaatctttgcaccaaggagagtctcggattatagaccgattgcgttatgtagtgttcactataaaatcattgctaaattactcaccagacgcctccaaccttggttgacctccttgatctctaaacatcagtcagcttttgtccccggaagagccatagcagacaacgtgcttatcacccatgaaattctccactttctccgagtctcaggtgcaaaaaagtattgctctatggccataaaaaccgacatgagcaaagcttatgatcgtattgagtggaactttctaaagactgtcttagagaaacttggttttagtactacttggatctcttgggtgatgcaatgcgtgtgctcggtttcttattcatttctcattaacggttctccccaaggttctgtgattccatcaagaggtcccccgcaaggggatccactctccccgtatctc

SEQ ID NO: 30758 - DNA, 1278 bp, Arabidopsis thaliana landsberg
acattttcgagttatagtatatatatagacagaagaacaacatataggaggaacttgaaattttggtctcgttcataataaaactcaaaattaaaaatttgcataatcacagtaattacttctatactggcaaaaacaagtaatgataattgaaatctaaaatgtttagagttttagtaatgtgaataataattagccgtagaaccctgtttggctccaaatcgcgtcacgaacgcgccttagttctctgcctttgagagtccttccgacgccgtcaaacaccgacgcaccaccacctccgatctttctgctccgccgtgcttgactcttagcaaggtactcatgcggcggcatcatcccggattcctcatcctcatcatcctcgtcgtctaactcgtgtattgactcaaccgagtcaactcggtatatcttactccagtccggtacgtttaccggcgccgaagacgccaattttctccggtcttcttcgccctcacctcctccgccgtgaatcttctgcactatcatcggcgaagacgacggcggagcaaccaaagagccctcgaaagccagcgacaatcctcccacgcgcccgttttttcccaaggtagcgcgtaagttccacgtgccgtaggattcctcattctcggtggtgtcgtcgtgaatgacggccggtgaccagatgtcttcctcaccgagctctaattcgtcggtaacggagtttccgtgactgtcaccgtaagtgtagcttccaaggtatcgatcgctccggttcattgtcgtcgcctttcgaccttttgccatgcaacaacaacttcaccctcttctttaatctctaaattaatcactgattaattcaagtttaattactataaaatttaaccattaattcatataatcaattattagagattttgctataaggttcacaccgagagaaatggaggagtatatatagcatctgtgaagacaagagtacaaatgaagaaaataaaattattcccatttgacacctatattatccatttcttacaaaaggatacttacatttattatggagagttagaacccaaattttgtctttttccccaaaaaacatttgtattcttggatgatcttatagtcacatccagtaactaaaaaatggaatacaataataacaaaaaaatcctgatagtaaggatttattccaacttgattatactctacgtaagtatcgtttttcaattattttaacacgaattcataaaaatgaaatatatctttacaaaatgagat

SEQ ID NO: 30759 - DNA, 3162 bp, Arabidopsis thaliana landsberg
gagcccacatatatgaattaggtcatgatattatagacttctcgatcgatcaaattcactttcaaaggtcctttcttgaaaaaggcaaaggcataactcacaaagtgatcaaaaacatatttgacaaacttccccctcttatgctttaacactctctaacttgtgtcactttcttttgaccccaaccataccctaccccctccataacctcatgtccatatattacatatctatctctctagtgtagtagatacatcattacttaagtatatgttgggattgttaattagatcgaaacatgtatcctaatctcgttatacttgaaaccacacatgattcccctcggctaattctaacgaccatttttcaacgattcgatcaagtcgccaatcatattttctagtttgttcatgaatttcttaaggatttgtttcttatttatgcatgttatattgttcttattgctcgtaagtttaattcgtgtagactgtcttaaagttgttttcccactagatgactccatatgtatatatcattaatctatatctgcacagaagtatttatatcattaatctttttccatgttataactttcagtgacgcccttatatatatataagaagatgccatttcatgagcaatcatgattttatttgggaaaatgaattgaaaatagtgtctttttctagctcgtgagtgcccccactttgaagtggattctttggacagtttacctgtggacacaataatgttgcgaggacacatctgttctcattaattatacaaactttccctttcattttatatcaaattatcacttaattaataactagacctaattacattgtcactaatttaatcttatataccggtgctcaatcattaatatccttcttacgtgatacatgacatacgaattgagttttgacgttttaatatatatatacaccacatacaactaaaaatgaacactacgaggaagagcattatataacttattttcatagcttaatttttgtatttgtttgctgctaattcaaagattcagttatattccattatgttttataattataaatattcaaactcgaaagcaagaattcaatcaagttcctgtcaggaaactattgcttagccatcgtaagctatacattagccttgtattaacaaatatttattgaattttaatcatacttatattattaatctacattttatgccttttgggatgttataaagacattaaaatattgatttttttttaattaaatcaatacaacagcaaaaagagagaaaattatacgcatagcaggttcttgaaaattttcccacaattagtttatggatctaaaaataagaaaagaaaaagcgtttgcatgggaagcaatatataaatcttatacatctcaagcttgggattcaagaaagttgcaaaattaactctaaactgacaaaataagcaaaatattttccaaagtttttatgttgaagttttatattgttttttttttctttcaaattttatattactaacttagccgtagaaccctgtttggctccaaatcgcgtctcgaacgcgccttaattctcgtcctttaagagttcttccaactccttcaaacaccgagccaccgccgccagattttctgctccgtcgctgttggctcttcgccaagtactcatgcggcggcatcatcatcccggaatcttcctcctcctcttcatcagactcgtgtatcgactcaaccgagttgactcggtatatcttactccaatccggcacgttcaccggagccgacgacgccaactgcctctcaactcttcctcctcctccaccacctacatctccttctgctccgccacgtatctggtgcacgatcctcggcgaagatgacgcgtcctcaaacgccagcgacaaaccaccacccacgcgcccattcctcaccacagcatcgcgtgtgttccacgctccatgagattccagcatctccgggctgtgatcgacggcgtgtgaccagatgtcctcctccgtgagctctgattcgtcggtggcggagtttccgttactgtcaccgtaactatagctgcttcctaggtacctctcgctctggctcatcgtcagctttcgacctcttgccattgaagcttcacttttaacctcaacaaatttaaccacttatcgtttaattaattactcttagattatagttattatcttaagcattcagagattaagtaattagagatttcgctataagttttaaacgaagggaaatggacgactatatatagcatttttgtaagcagaagagtccaaaagaatgtgaaatgacaaataaaatctcaactataccactcattatgaatttcttacaaaaacaccccataatatattatcaatatctaataaaccctaattttaatttctgaaatctagtggtccttgtttgatagagtttctttccaccgttggatttaatatataaaaccaacttttggatggaaaaagtttgcacgaaaggtagtacgtaatttcgtgaatgtgtttaatattctgccatctaataagcgcaaacgaatttttaatttagaccatctcttttgtctttcgtcaaatcaagtaagaatctctgtgatctcatatctgggaatctgaatagtgaaggggtctatttagaaataaataaaataaggaggtggtaaatgtaaatgtttgagggtctgattaatgtggataaactaaatcatagagttcccacacgtaacagttaacagataaacaatttggatacgctgtaataagacgagacatgccacgtgacgcgctaccgagatgcgcgtgtgaatcactcgaggccagtctgataaaagtttaattttactcgagaaagtctagggaaacacttattgtcaacttgccaaattggggggggaaagaaattgcaaactttaggtcgcttgttttggtaagaaataattgttcacgagaagttttttcctgtgcacagaatttttgtagcacgatcaaaagtttagtcaaattgtttgtgtgcaacgaagtttgcgataagatgataccaatttatggatttgtaatagtgtcataatcgtatagtaatatatatccatatgttgtagaaaataaatctatgtataattggt

SEQ ID NO: 30760 - DNA, 1785 bp, Arabidopsis thaliana landsberg
tacgagtaggaggaatcgggcgataatatgctccaagagattttatattataaccaggaccaatatattcatggtacccaacaagagcgctaccattcttctccagcacaaattttctaccaggagacgatgatccaaatgttggagaggttctcccttttgatgttttgaatgtcagtgagagaatccacgtaatgtcaaaattagtcggagttgctaaggtcccctccacagacgtgataaactcatttggatagtcaagcacaaactgcaatcagaaaacaacttcgtataagcgcctaaagaaccaatatatagtatcaatgaaattttacgttactagatttaaagaatcatgacctccttctcatttgtaacatcacgccggtacggagtcttttccacttttccgccattatcgtactcaaacctgacactatctatatcacttatactatcgacatacaccttttttacgccgtcataattacaaccatcatcccaaggcagtcctttacgatcaccttggcattccagtttattaggagtggtcgtactgaaatatgctccaaaagagtttaggcttttcccggcattaacatgaaacccaatgatcttatttccattggatgcaagtaaaaacttcctgccctttctataccccatcataacagcattgttgaggttagttttgaaatgaagcccttgaatgactttggacgcatcatcgtagtaaccttcaacatatactagatattcgttctttgactggttaatatccatctgtaaaatttgataaaacgtttactacaagatttaataatatcatcaaataaatgaacctaaagttatacttaatagctacataccttctgtaaaaaaccatcaccaccagcgtcaccatggattaatccagtttctagttttccattcttgatatagtcaactttgatgtacaatatgccttcaacaccacctagcacttggatctttgatacattgtcatggtcgaatccatcctcccacttcttgcctcccataccacctttcacttccaatctcgtaggagtaatggaagtgaagtaagctccaagagagtatatatgtacattatcagatccatgaaacccaatgatcttctttcctttgacggctagcgtcaacatggtacactcataactataccccatcagttcagaggtcctgaaattggttttgaattgaattgcttgcaaaccataagactttttgttgtagtaagcgtcaacagattcaagatgttcatcttgtagatggtttatctcaaactgcaaaaatagtgagaataaaaataccacagagtcagcattatatatcaacatcaccacaaataaaatgagttagggaatacagtaaaacttctataaattaatactcgataaattaatatacacaataaattaataaatcatgttgtacgcactacaaaaattaacaaaactcgataagataataagataaaaatacttttcaaaaatcctatgtaaaaatatggtcctaataacacataaatcaataatcatatatatatataataataatatataatatatggtttagggtatgttaaacattgaatatttgttagagtttgtgtatcaaacaattgttacgttatgtttataaaattcatgataaaaagttgtcataatttttttattagtttcaaactgcttaatatgcatcactttcattttaattgttttatagactttaaaaatacgatagttgataaattgatacata

SEQ ID NO: 30761 - DNA, 3435 bp, Arabidopsis thaliana landsberg
agagaccgcttagagaaatctaagagaaggtcttccataccgcttcaccaaccacaacgaccacaattggcatagggttgatgcaaatatagaccaaaggactccgactacaagaagaaagaaaaccataaataaggagaaaattcaagggaataaagtaagaaagaaaacgaaaaaggatctctctctttttgcctataatttttagggtttttcttattttctttagaacaaaaaaacttatttatacagcaacaaatagaaaagctttcctattttgtttgatgacattttgcagggctaattcttcatcaaagaaaaggattgtggcaccgaggaaaagattttgcacaaaataacatttctgatgtatttggtcattgttcatgattgcataacaattaatttctctaaaatcaatgaattgcagaaaacagaaaaagaaaataatagactaaacgaataaatcaaggactaactccatctcatagtattctgtcaagaaaacatcataacctacactatcaactatactattgtctctgatggaggacacaaaacacaaacactcgaagtctcctacgaactcaaagatctctatccaaatgcttccacaagattatatgtcttactggtaatctaaaaccttaataaaacgcaaattcaagccacaaaagacgaaggcaatgattattaaatatgtcttgccgatttacgggatctaagaagattaacaatctatattgcaatcacaaatttcaccacgtatgtattacaaattggttacattacaaagccacataatgacataattgtaaaacataataaatatgatcttatcatacatttttttatcaataaagcaaacataactaataaatttcagtacaaatcctaaataacatataaacacttaaatgaaattttttagtgtttatatatttttcctcccaaacatattacagccaatgcgatcaatattcactaaaattattatttctaaatttgaattagcggaattacatgtaaagcaaacccgtgcgtagcacgggatcaaccctagttatgtaatatgagaatgtttttttcaccattcccttttcctttgcaatggtctcatgtcttatatgtttctagcctcaaccaaaaaagatgaaaatgttctcttctctcagcttattgtactatatagctcagagtatgtagccgagctaatgtcatgagaagtatgagtaatgttagatatatagggcatgaatggtctccgttgttaaactttactagtttcagtgttcagattcattaacaaagagttcaatagtaatttgtgagagtagatgaatagtaagatgctcttaaacgtgctcttaaacgtgagtgtgaggaatgcactctacgttgtatgagagtagatgaatagtaagatgctaatatatctattttgttctattctagtggccataggaccaatttcttacgttccattagattagactaaccaccagcaggagttgtgattgtgttgagcttgagtagttctcttgacctacaatgagtagtttattactcagttgatttgtcaattcactggatttagaaggagagtgaagaatatcaaagagatgcttgaagatgtcaaagccaacgagtttcacaccagaatattgttcctgaagcttcgaagcagacaagttaagaccacctataattcataaaacatgtctttctttttcgtggaatctcgcttcttgaaacagcctattgaatacagagaagtttggtgcacaaaaaaaaaaagaatacagagaagtcacaacgagcttcagtccaactccatacactttattaaacagaggaatcattcaaaagttcacaagatacagagaatcaaaacagaggaaataaaaaagaagagaaacgaatcaaagtttttgaaaacagaggaggataatgttcgttttttttttgctaagaaaggataatgttcgttttaaatcatataaatatgatcaggagttggagatggggagcacgtggatcccaagtttatgaagcatgttacttgattttccatggaaaccaacgatcttgtgaccttccttgtggagcacgaagattgggtcatcatcgagtccataacatggagaagttcgcttgttagtggtgaacttgagcatgattataacttcatattcttcacttccaggtactacatcataactgccttccactgatgtgaggtattcagacggatagtccaagtcaaactacaatttaaaaacaagataatccaaaagaataacatcaaagatctaatatacaataagctttgtataattggataaaggctgaagtagtagtaatcacctcttcatgtcgaagtaggttcttgttcccatgatgatctcccactactatctcatgaacgtcattttcatacagaaacttgattgaaacgataccaacctcaccagtcccaatgtatatctttctaacaccttggaaattactgccatcgtcccaaggagctcctccagcaccaccttgtgcttctagcttttccgccgcaggaggaagaggcattggataataatatgcaccaagagctgtcatatacccagacacagggttatgccatccatgaaatccgactatagcacaacctttgctctcgagaacaaattcaactgaatcatcaaaagaatagtctccaaattgtttagaggttctcccttttgatgttttaaaaatcaatggcataaccgaactagaactcatggtccccaccacagacgtgataaactcatttggatagtcaacaacaaactgtaaaaacagaataagctaaccatcaacaacatatatgtagacgaatatatagttagttataagtattctgaccttctcttcttgatgatcattgttgttcaatccatggctacgctttactactttgccagcgtcttcatagttgatcatgagacaccttatacgaagagctgtaaagaagacggacacttttctaataccctcaaaagcaccgtcatcccaattccagacattgcttccatcagtaatgcctttgcattccgacttttttggagtaagcggtgtgagatatgctccaagagagcttagattcttctcggcatatccatgaaacccagcaatcttcattccactggctgtaagtttaaatttcttacccgtattggatcccataagttctgaagtcttgatgttagtcctaaattgaagtccctgaatgacctcacattcctcgtggccctcgtagtaaccctcaacagacgccagatattcttcgtcatgtttaaactcaaactgtaaatcaaagattatgtatcaataaatattatactcatgcaattggataaacagaattttattaatactattgtccgtacatgataatga

SEQ ID NO: 30762 - DNA, 2580 bp, Arabidopsis thaliana landsberg
gtccgtcaactaaaatatacatatatgtaggtgttgttgaatagtttaattattctggttattgcagtttgttgttgactatccatatgaagttatcacgtccattgtggggaccatgaatgatagttatgttacgtcatttgttttcaaaacatcaaaagggagaacctctaggatatttgttagagaacttctgattcagttgaatttgtcattgagagcaaaggttgtgccgttgtcggatttcatggatggtatgcacctcttggggctgggtatattacggctcttggtgcacatttttatccgatgcctcttcctcctgctgcggaaaagctagaagcaaaaggtggtgctggaggagttccatgggacgatggtagtaattttgaacgtgttagaaagatatacattggaacatgtgaggttggtatcgtttccgtcaggtttttgtatgaaaatgacattgaagagatagtagtgggagatcatcatgggaacaagaaactacttcgacatgaagaggtgattactactacttcacttttattacctacttatccaattatacaaggttatttatatttgatctctgatgttcttcttttgaatacaattgtagttcgacctggacaatgcttgcgaatacctcacatcagtggaaggtagttatgacgtaatacctggaagtgaagatgttgaagttatcctcatgctcaagttcaccaccaacaagcgaacttctccatgttatgggctcgatgatgacccaaccttcgtgctccacaaggcaggtcacagaatcattgggttccatggaaaatcaagtaacatgcttcataaacttgggatccatgtgctccccatcaccgacccatgatcatattatatgacttaaacgaaatagtatcctcctctgttttcaataactttgatttgtttctcctctgtttttttttctctcaagatcttatgaacttttgaatgattcctctgtttaataaagtgtatgtatggagttgatgtgacgctagttcctaacttctctgtgttcaataggccgcttccagaagcgagattcatttttccagattccacgaaaaagaaaaatatgttctatgaatcagagatgatcttaatttgtttgcttccaaacttcaagaacaatattctgttgcctttgatatcttcaagcctctctttgattttcttcactttccatctaaatccagtaaactcacaaatctactgactaataaactactcattgtgggcttccttgctcgtatgagccggtcacgtcgttctatcccatcaatacccctttctcgaacaacaaccttgtgctcaaggttcggaataaagtcaggaaatactcatcacccatctaaccaatattttttgggggagggggtctgtttcctctgaaaaaagagacaactgtgggtcaagagaactattctatccatttttctggcagagacatgtggaattcccaatgtcaaaaacaggacaaggtcgcacaatcacaacttttcctggtggtctgtaatcttctatatcgtttttggcttgactaggttaaccccgtcgaaatggaacttaagagagtggtcctatgaccacttgaatagaagtaacaaaatagatataatagcatctgactattcatactactatctcatacaatgtagagtgcattcctcacactcacatatttttattcacaacttatccaacaagctcgtttgagagtgctctctccattaaaatactgtttactctttatctctttgttaatgaatctgaacactgaaactactgaggtttgccaactgagaccattcatgccctatatatctaacattactcacacttctcatgacatcagcttggctacatactctgagctctcttagcttcatcctccttactcttctcctataacattaaacaatttctgaagctttcgcataaaatacatcgtaaggtgcgtcaacttagcacgtgctgcacttacttacctttgactctgcttcttcaacaaattgttgcaacacattatctcctttaagaatttttgcgccacatcctggggacccaactgaaccaacagcctcttcatccaccagaactgcctttatactctgtgatccttccgtgatgctatctggtacctgtttagaattcacatttaacatttaaaacacacaaacagggtatttgtagtacattgcaatcgaatatctacattgaagtatcaaaaactataagggtgaaatcctcatacctcaaacattgcttcggtgagaatactttccagtatagaccgtaagccacgtgcaccagtgttcttcgacatagcctttcttgcgattagcctagttgctccttcagtaaattgcagttggacctaacacataattaaacaccaaagaggtttatagtaaagggaggatgcacttataagtcaacatggagtggtaagaagtgttacattgttcatgcgaaacaatttcttgtactgtttacccaatgcacttttaggctctgtgagaacctgcataggaataaaaaaaa

SEQ ID NO: 30763 - DNA, 4487 bp, Arabidopsis thaliana landsberg
gccccaatcgtcttaattacttcactatctcctctccaattgcgtaagaatctctgaacattaaccattttgattgttcttttgtttacatgtttttgctgaatctgttttctgatgttgattcttcagcacgcaacttcctcaagctgctggagttggttattctttgaaaatggacaagaagaatgcttgtgctgttacattcatcggagatggtggcacaagcgaggtttataatctttattaattctcatttctttccataagaatcaacatttcaagaattgaaatttatttagtcttttggggtttggttgtttgggactagggagattttcacgccggattgaattttgcggccgtaatggaagctccggttgtgtttatatgtcggaacaacggttgggcgattagtactcatatctcagaacagtttagaagtatgaaactaacttaacttcctctgtttttcattacaaattagaccaaaacaaatcctctgttttaatgtgagcctatgtggtttgattacaggtgatggaatagttgtgaaaggtcaagcttacggtatccgaagcatccgtgtggacggtaacgatgcacttgcggtttatagtacggtacgctcagctcgagaaatggctgtaacagaacaaagacctgttctcattgaggtaaaaaaatcacactagagatttatctcaaagtttacaactcttgaatttggtgaaataagattgttgttgcttttgttttgcggcagatgatgacatatagagtaggacatcattctacatcagatgattcaactaagtacagggcggcggatgaaatccagtactggaaaatgtcgagaaaccctgtgaatagatttcggaaatgggtcgaagataacggatggtggagtgaggaagatgaatccaagctaagatctaacgcaagaaaacaggtagagattctgaaaaccgctacgttatattaatgttgagattgaaattattttaaccgttttaatcggttgtgtgtgttttgtagcttctgcaagcgattcaagctgcggagaagtgggagaaacaaccattgacagagttgtttaatgatgtatatgatgttaaaccgaagaacctagaagagcaagaacttggtttgaaggaattagtaaagaaacaacctcaagattatcctcctggctttcatgtttgaatctagaggaactgtgtggttaaaatacctcattctcatatatgatgtatcatgtccatatcgacttctcattgcagactatttatattgtccacgtatcgaatagtaatcaagtatcaatgtagagaccagcatttggagcatcatgaaatggccttgagaatgttattttcatggtccggctgacccttaaccggttcaaactggagtaaatgagtgaatgttaatgctcgagaatgggtgaggctccgttaatcgttaagaaaaaaacgtgcctacctagccaaatgacatcttcctcttttgtttttagcacaagtgaatgatccaaatatcatctacctaatatgacccataaaatagtatgtgattgtctttggatgttatcccataacataacttaaatttgggatgcatgcatatattatatacttcatataaaatgagtggacctcataagttgcggtttcgatttttatcaaaaacaacagttgtccactttttgattttgacacacacccacattcaagcatctcctttcttctatattattactcaaagaataacaccccctaaggataacaccattacacaaatcaattctcagttaatcatttgtttcaatatatgttagtacttaagaaatattcgaatagttttacgtattcaaattttataaattcaatgaatgtttaattaccaagtcattttggcttggaatctattcaattattcaaaaaaataaataaaaaatactgcattttaacgtatcagccagtcaatatattacacgtgtcataaagcattacccacacgtttctcctgcctctttccctttcatttttttttttcattttttttgtttcttctcacggtgttgttatcttcttcaagctagctctgtgaaactcttcaaatgaccaaatatatcaaataataatagtgtaattaagtcggaggaaaacaacaagaacccagaaagaggaacgaagaaactaattcaaaggtatgatctttttttctttgagagaattatgttttctttgtagcaaatcctctggtcttacgtttagtcactgaatttgttccacttctggaaaaatctagacaccagagcaatctatgaactttaatttccaatcactaccgtcttttgaggttgtaaaatcggtaaatggcagatttttcactctcattcctttgtggtgataggatcaagttcaccgcttcattttagtcattaaacaaagatggtgatgggaggagaagcatccatggaactggaccagtgttttcagaagatgaagatggaaggaatctcgatcaaagagtggaaagatatccctgtggagcttctgatgaggatcctttcccttgttgatgatcgtaatgtcattgttgcttctggtgtttgcactggctggagagatgctatctcttttggcctcactcgtctccgtctctcttggtaagaatttctatctaacttataaaccctttttgtatttaggactcttctctgtgttggtgttttggatttgaagtaggagttgagtttctagagtctttattgtatcttgtgcttagggtcatgttgatttattgtctatttgtgtaagatcagatctttttttgttgcttttgttttgaggaacattttagcagtctatatatgattgatttggctagattgaagaaagtgaaaaagctgtttaaatttttgatggaactcttttaagatgatagatcagttttcaataggaggtgaaaccaagttctttaatccagaagagtggtctgaagatgactcttaaatctttgaaccactagaagcttgttcttgtcacttccagtgtattcagattgatctctgtctactacactctttgatgttgtttcttatttttatactaggtgcaacaacaacatgaacagcttgttcttgtcacttccagtgtattcagattgatctctgtctactacactctttgatgttgtttcttatttttatactaggtgcaacaacaacatgaacagcttggttctttctcttgttcccaagtttgtaaagctgcagactttaaatctaaggcaggacaaaccgcaactagaggacaatgcagtggaggccatagcaaatcactgccatgagttacaagaacttgatctcagcaaaagcttgaaaattacagaccgttcactttatgcacttgctcatggttgcccagacctcacaaaactcaaccttagtggctgcacttcattcagcgacactgctattgcgtatttgaccagattctgcagaaagcttaaagttttgaatctttgcggatgtgtcaaagctgtaactgacaatgccttggaggtgaatctttgtttttctttaatgttctctcccaaacttggttttactcctttggtcataagtgtggcagagttgatagaatttgttcatgttgttgtgtgcaggctattgggaataactgcaatcagatgcagtcactaaacttgggatggtgtgagaatatcagtgatgatggggtaatgagtttagcttatggctgtccagatctcaggacccttgacctctgcggctgtgttcttattacaggtacttcacatagttaagcttactcgaagctaagatcattagttttccctctgcagagaactatcattggataaactgcattgaaataaacaaaactagtaggttgttatagatggactccgaaagccattgatcttgagactcaattcggtttgtcttgtactatttcgcagatgagagtgtggtagctctagcagactggtgtgtccacttgaggtcactggggctatactattgcagaaacataacagacagagcaatgtactcgctagctcaaagcggggtaaagaacaaaccgggatcgtggaaatcggttaagaaaggtaaatacgatgaagaaggactgagaagtctcaacattagccaatgcactgcccttacaccttcagcggttcaagctgtttgcgattcatttcccgcacttcacacatgctcaggaaggcattcgcttgtcatgagcggctgtctgaacttaacaactgtgcactgtgcttgtatccttcaggctcatcgtgcacacaatgcggttcctcatcctgctcattaagacagaggaatagttatgttgtatatataaacatcatgttgatgaagattagtaatataaacgaagtagcttttttaaggtttatgtgaaaccttagaagcttgttgagttgttcttactttgtca

SEQ ID NO: 30764 - DNA, 4121 bp, Arabidopsis thaliana landsberg
tgtcatgtgaatcattctagctaataacgttctaaggtacagagaatatgccacgtttctgacacaattattaacccttagcccttaggtttaatgaatactattatctatgaagcattgcgcattgcgctctgtttctaacatcctttccacccgcctaaaaacatcttaatacagtatatataccattgtggtacttttatgtctaacataaactaagataggtattttccattttaactgctgatcaaactcaacatagtgaacagtacaaacaaaaatcaaactaacagtaacttttctagaaaattagtttgatcctagctagctttatttatatatgaataaacccaatggagaagttcataagctccttttttcagcaggatatatgaataaaatgacgccactcccttatactttacccaacaatctattaatcttatatctacttatacatatacacaaaatttaatgaaattttattcatacatgttgatagatacacatacaaaactttttttgataaaataaacgagttaatttcagtgatctttacaggaaaagaagaaaaaaaaagccgtaaagagaggcagtgccactaaccctacatcgcacatgcatttcgtttggtatattactttatgcgtaaagtagtattttaaatacaattccaatatttacgaaatcattgcactgaatacaaaatccaaagttttgagtttttggcccctctctttttgccctgtcagtccattaaacgaccactataagtcgtaaatggatttctccaatagtaatatgacacgtcatcctttcgtttgaatctaccttcctcctccattccaccaaagtatcggcctttatacaagtttgtttgttttctcttttcgtaaacatctttagatatcaataagctaatttagtaattaagattgtaccctaaattgattggaaactatcgttatggatgctctacccacattaggatctttgtagcatttctattatgtattttactctctatttagattatgtctacaaaagatcgaaaactcatgattgtaagaaattttgtatataaatttctttctaaaatctctgtcaagagggcaagtttaaaaaaataattgtgaactaatcaacgtggaacaaaactttttaagtataatcataattcataaacattgcttcaagtcacaatgatgtctctgtctctcattattccaaaaccattagaggttatagagccagttaattataacttatcaattccactagtgttgagaatgaaattatttgtttcttggtggtattcacgaattctctttatcatgcattacaaatgccactttcgtatctggctaaaacaacaaatacaaaaaaaacaaattgacaaaacgacgccgcttattaactgctacatctaaaacggggccgtttattaactgctacgtctcgtgatagttgatacctctctccctttatatatcttcctcttcttctcccttccattattctccacaatttcataactttcttccgctcaacttcagataaattcggattctgtagctctttcaatacgactgcggagatcagagccaattatttggttatggcgtctctgatctcagatattgaaccgccgacgagtactacttcagatctcgttcggagaaagaagagatcctctgcttcatccgccgcatcgtgtcgttcaagcgcatcttccgtctccggtgagattcacgcgcgatggagatcggagaagcaacaacggatctactcagccaaactgttccaggcgctccaacaagtccgcctcaactcttccgcctcaacatcatcatctccaacggctcagaaacgaggaaaggccgtccgtgaagccgccgaccgagctctcgccgtttccgctcgcggaagaacactctggagcagagcgatcttagctaatcggatcaaactgaaatttcgtaaacagagacgtcctagagctacggtggcgattccggccatgactacggtggttagtagcagcagcaacagatcgagaaaacggagagtgtcggtgttgagattgaataagaagagtataccggatgttaaccggaaagtacgtgttctaggccggttagttcccggttgcggtaaacaatccgtaccggtgattctagaagaagcaactgattatattcaggctctggagatgcaagtgagagccatgaactctttagttcagcttgtctcctcctacggctcagctcctccaccgatttgatgaggttaaaatcgtcttttaaattctaccatctctcgatctttcacagcttatgtgtatatagaagattcggcttgattataatctgtaactactcttcccaaccgctgattcttgtctgctacaagtaaaagtaaattttgaaccgagtcttcccatttttacgatcctcaagtctaaattaagtatatgattgattaataaagtctttaccattagggttcaaatcgtagttggattatttgatttagattgatgaattcgttgttgatcaaaaaaaaaataagattgatgaattcgttattgcagttagtgggaaaatgggttcctcttttaacctcatagtatgtgataactaaaccaatatggaacttttgatgtacttttagttcattcaatatggctttgtactatatcatcttatgtactatatgaaatttcaacatgaaatagatttgtactgcaataaagtggaaagaaaataatttcccatttagaattttaaaatacattatagtagatgtaggaagataatgggttaactttagttttgattatggtagcatgtgatgatgcattagagaatgaatggaatgatacattcaaattcattgaattgaatgatgactgatgagattgatctgtcactcaatcatctactcgctttattgcccctcctttgaatcccatttttgatacttataggttgtttgtcttctttttcttttcttttccttatttcacaagaaatataaaggaaaaaaaagaagaaaaaagattaaattagctaataattccctgttactaaataagttttctcaaacactaatctgcagttctgcacgtactgtatatccttcaatattcgtcacgaagcaaaactgaataacctgtagttaaaattgccttaacaggagtttgattcattagcttaattaatatacgaatttctgtgatagggatatgatttaagaacactggagtatgactaggcgacaacaagagacaagtgacgacaaaagcaaaaaatatttaaaacatagagagaagtgaccttaaaagtatgaggaggcacatgggagtggccatgcctttgtcctcttgtttctttttaagccttctcttattaacttgcacgacaactcttttcatcacatatttcataagttatattattattgccaaaagggacaaactattagagaaaataaaccgcaacattgtagaagattggattaaaactcgccaacacactattagagaaacttgcccagataaaattatgtccatgtcgaacacagttataaccaaggagcctaattcccaaaaaatgatttttatatttggaaaccatccattgcagatactcctggaggtttctcctagtcttcagtgccgaagatttcacgacaaaagaagacttgaaaatctcgatactcttttgcggaactttcccaccgcgacacacagagatcactccacagagatatgaggcagctttgtgtcctttagacgcggcttttgcaaacattcgatccctttctcttcatcaacaatattattgaacaggtaaacgcacttcacaattccttcacgagccactgcttccgtgtttccgctctctctgcatctcttgagaaaactctagctttagttataggtcatcgtttgcggttttgatttcgtcgaggcagacgtgttcgagaacttgagggtcgttgcagagattatgtaatgatttgcatacgaggctgaagttgaacaagcttgagtgaagaaagagccacgcgtggcaagatctccttcacaaccacttcttctggagagactccatttt

SEQ ID NO: 30765 - DNA, 4102 bp, Arabidopsis thaliana landsberg
ctgaccgagtcccgctgactgctgcagccattttgccaccttttagtgcaaatgtttcgtgtgcagtgctggacgaagaaccacacacttcccacaaagcattgaatagatctgagtagtagctcggtattgtatcttcaggttcgtccggtggagcaagagcttttaggaacatgtcttcaatccccacagggacactctcgagttttccctgaatcatctgaccattctctgcatttgcttccattgaaacctcgaccaaacctggtgtaggttctctaggttccagttccactgtcgcggtgctcctctcaagccatctttatcctcctctttcagtgtgttggctaccacgacaatgtctaaagaaacttcttcattgggtacattgctgttgcaatgaggctcaccgcaaaggaaaggtatgcgacatgagggaatagagccataaggggctgaagatgagaatttgagcaccgtcgcgaaaatcgcaggaggtgagtcgactttctctaaatcgattttctgagtttcacttccccatatactgggatatggttcagcatccaatctcaaagtacacgttattctaaccttaattcctggcatgtgtttgaaatcaggaatcacagagaaatatcttcttaatctttctagaatctctgcaatctttgagtccattacccttaacgtaggttttcctgattcaattcttcgagcttctggcaaaatctgaagttcttgactgccatccggctcaacttcatctacctggattttgttttctataatgctatatccatcagttccaacacttagagatggtagagacaatgaccatgactgtttcacgagtaggggcgtaacccgttcaagatgaatataggatgaaaggttccgagatttactaggatcatgacgaaaacgaggactttgaacactaaaaaatgtagaagaatgggttgatggagtgacagcatctgccggcttcaaaatgttcttaattctctgtcctggtatacagaccagcatcctcagatatatcctacaatgtaccaatttatgaggtagagttaacgtcatcacaattcataaatattagaaagattcgtttacgtgggtgtcatggtcatacctagcattgtctcggacctccagatcagggaaatagagacatgtgagggaaagaaggcgagagagtccgagaaataatctagagctcttatggtgactcatcaatgttcgacagatgccaagaacttcagttccttgatcccacaatttcaaccccacatcaagtccgcgcttctcaacaagtgaaattacaaacttcgtaagcagctctatcaatcgagaaggaggtattgtatcattctcggctattcgatggaaaagcgggaagtaagctgttaataagttttttttcttaagtttgggaagcagattctcatcgactatctgaagaaaccgctctcctaaccactgatgcttgtgacagtgaatcaaccgctcaataaaagccacaataacagggaccaagatttgaaactccaaagtcatgtctaccagcaacccctgaattaaatatagaagacaatcaaaacaaatgaagagtatatctgagagcagaatcagcaaaagattggttcctgaactaaaagctaattagaactaaaaagggccacacagttccgttccttctgaaaactagcaaaagtaaaccatcatcaagcaagaccaagaagcaagtaaagagagctacagacctgcacgttttggaagaggctagactccataaggattctagtggtggaagggtcagagtcggaatgtgtagatgcacatatcagaaacttgtgtaaagtgcggaatgctagttcagtttctgagctccatgagggcaaccatttgaaatccgaaacccataacaagcagtcgtgcaacaaatccccagcaaattgactggtatcacctccactcaaagcgttggaactcacagagcattgtaccagcagatcaagcttcaacgctttcaaagcgagtggatcaaaaacgacaggatgaaacttctgacccatctcaagaacagatgtcctcttctcaagctccccactcaacatatgcttattcaacaaacccattaaccagtgcagcgcaagcaaacggaaaacaagatagatctgagtctcctttgaaaagagcataagacgtctcatgatctctttctcttgtccctcaaacgcatcagggaaccgagaatacataagcaagacaacatgacaaagcattggatcaaacgaataaatcatccccaagaactgaactttcaacatagaagcctgtaactccaacgccgatgcaagtggcacaaccatacccataaattccatcatagcacaagaagtaaacaaatacggagattccaacataaaagccaatgttcgtctcagttccttctgatctggccccaacccttgaccttgactcataatcgaactctcatcacgcatccaattaggagcattaaaaggcaccaaaggtacagaggtactaagaagtgaaaccttaagcttctgattaaccacattgtagacaattgtggtgaacaagagaagataagcttgcacggcgtgagttctctccgcttgacacaacgaccaaagatgaccagcgacatcagataacaaaccaggaaaagctttctcaagctgacgtaaacactcacaggcgatagcacgagcttgtcgatcaaatccgtggttaggacgattaacgagcgcaagaagcaaatcaacaactgcttcaacgtgacctacagagaaagaatcaatcgatacaagcacagacgtgaaagagaccatagcttgctctttcaatcctgacgatccatcagttggagattgcacgatcgtccggagaacatcgatgaagcgatcaaaggtatcgctaccacaattatcaaacaaaatcggggaaaattcatcgagaaagactaggattgagagcttcactggtgtagggaagtcttttttgaggagagacgagagagcgaagtccaccagagaatcaatctggaaaacggaagtgaaccagtcgcgaggagcgccggcgtcgcggaagtcgtcgatgagaacgtcccaatcttggatagagagaggtctcgccggagtcttctccggcgtcgtcgtggtcattctccgattgaatctaggatttgaatctgaagaggaaaatgaatcaaagtcattagagaggagaagataagactatcctcgtcgccggcagtaatactccgagatacagaacaattcaccgaagctgctgactcatttatctaattatttatttatgttccatattttatttcaattctgtctctatctacaatataattagtgtcttgtaacttaatttttcttgctacaccaaaactctttattccttcgaaacctggcagcctcaggcaccatcctgtaaaaatcttggatagtataaccagaggttggagttggttgtttgtgatctgcgctagagaagtgctctagctcatcgaaatgtaaacttcttcttatgttgccttgtgaatcgataatgggttgtggaatggatgggcaagacttttacatcttatggtcgtcctgtgaaacagaaacgataggtcaaatgtcttttggtttttagtttgttttgtctttctcttccgtatttcctctctttcttttgctcttcatggcgttcgaactctcaaagacctagttaacttccatgacatactaaatactatgcacaaaggatattgggtatgccctatgttttgtctttaacaattattttatatacatgcagactattatctagcggtctatgagatgagtgggaaccgtgtcgcagtcatatttgacaatacagggtatacaacatcagaggaaagcgaaaccaacagagcactcccacaaactacatatgcgatggatagagggtatatttacttcatactgttctctatggttgatgtgtagtcgctgtatattcggagaaattttcctgggtggagacagcaaacatcattttaaaaaatacccccgtttagccccagcttgga

SEQ ID NO: 30766 - DNA, 1756 bp, Arabidopsis thaliana landsberg
cttaacaaaacaaaaatcgtaaaggataaaacctaagaagctcttatccctttttgtcaatcgatctccacaatctgaggccttctctctgcagctttcttgcgtataaagataccccatctcaaagcagctttaagctttagccatccaacaacagctttccccgagcctctattacgttctcttcggtacgtgttatcgatctgagcttggtacgggatgctataaccgtaacaagactcatcagtctgaccaaaccctccttgtgttcccacagtgttcacaccgataccaaacgtcttcaacagtctctgcatatcgtcagtctcaagcatttcagaactccttagtctgatttcttcgctgaaaatgtcttcaagaccttgtcctgcagctcttggtggacaccaatcttctccattgtatgagcttgaatcattggagctttccatcgacctgttgtagtcttgtacgttgcaagggaatgagggtaataattggttgcaatgttgctgcgcaaactgaggataatctattggttgagggaccggtgaataggtaatcgcattctgatgaccttgcacagtttgcctattgttctggttatgcagctgttgatggttcggagcagtttgtgctgtgaccatttttggttccagtaagctttttatttccttctcggcaactggtaagcaattcaacagcttaccgtcatactcaatagctttatgccagttctcgtaagccagcttcaccaaaatgtctgcagaaatctgtgagcaaaccaattatcagcttaatgaccaaaaaattcttttcaaatcaagacagaaatatgactgtctttacactttaccttttggtcatggttaagagactctagagataggaactgtccgtttgtaattaggcctcggaattcatatatatgattgaagacaacgcctgtagcgtgagtttggtctgtgtaaaacacataaatcttcccacccaacacgcacgtctttgcgtgctccaccgtgttctcccacattctattcgacattccactcccaagcaactacattatcagggagaaaaaagaacatttaactaggatatctttggcaatattggtggtttgttcacattaacaaataaatatgcttacattcctcattttctgtggatccttaacaaggagtcgaaggaagtcttcgactgtcacgatattagctttcaatagcttcttgtgtagcactccgtctttcgctattcgatccagtctccagacttcgtcgtgtacagccggtggataatgtttcttgtatactgcaaaacattgtcaaaagaaaatgaattttactgatggtcgatgacagagccaagttagtagtaactaacactcatcaatacaatccaaatgattagaagctcacgttctcctctatgatctttgacagcaaaaggttctgttttggcttcacgaatgcaaaaactatcaccataccctgaagccggcttaacaccaagcctaaactttcggctacgtatccaactcgagttgtcagtgaaagtaagttctcctagagttcccacaccttccttaagcactatctgtgtgtccccagttaagatggggcgtttcccttctcgctctttcacttcaaagctctcaaagtgctctctggtccagtcttcatcgtcttcatcattgaagtcaaaatcaaacacgacaacattcagctttaagctgattcttctcctgtttaacaca

SEQ ID NO: 30767 - DNA, 2808 bp, Arabidopsis thaliana landsberg
cgtttccgtcataggtaagttaatgagaaagtgccttgtcatgggacttgagttcaaatgtaggtccaaaatagcgttcgcgcagatcttccatcatctgctcagcaagaaacaacctttgaattacggataaacataggtttgagcaaatgtagaaatatgtgggatgcataaaagagcatcctttagggacacgtatgtctaccttgcattgaggagcatcaaaggggagattgaggacctcagcaacaaccctagcggtgtgagtggttctggagaagggggagtagcaaatgcgaaccttgtccagttctatgttactttccttgagttgctgaatgttgatcatgaaaaggttgagtgttttttttctatttggggggtagggtaggcaaataaagagatgaaagcaaaccaaacctggaggaacgattcgccggcgagacgagcctgagcgacaccatcaggggctaactggtactcggggaggacaccattttcctacaattgccagcagcagagaattttatgtataggcgattaaggagacgaatagatgatgaagaagaaaagaggaccaaaccatggaagagacgacgaggcctctctcgttgggaatgctcttgccgtggcggaggacccagtacctgttggtgttccctactgacgacgaatccatctctttctctctgtttttcccctaaacccaccaatgtcaaaattcccactttacctctctatacatttcatttactctatctatctgaggtttgatatttatacggtcgtattcactaatttcttctaattcctaatttttatcgaaaatctcatatcagtaatttctaaggttttgactggctgcattcttatctcttttatcccttatcttttagtcaaagcttaacatttacagtcactaatttccttctaatccgatatttttttaaatactgtaataaggaatatttattcaccattcttcgtggatattgctgcactacacaattgtcaaaatgtagctaaatacggcaaatatgtgtttttgatacacagcactgcaatcaagcatcggttttggcttttgcctacattaagttttcttctttgtcgtaaattcacaagtcgacatattttatatattgatgatcgaaaaatgagtgacaaacaaagctagctaataagtaaaatctatcaaatcgaattataaaagacagttttttggatctgtggttgttgtatatgtgaaaaggtgatgaagaagatgactgggcacgtcactctctccttctctatctctctttcacagttttaagcaagacgctgccatataatccacaggaaacagagttaacaagaaaagctttgcaattgcaggtccccaaaaaatagaataaaaactataagaagaagcgtagaagaggctctctcaccttgtcactggtatgcatgaaccaccatggacccttcctccacattaatctaccatacacacacacatttgagagctttattattaccacaaaaattacacttttggttcaccttgtatttatttatagatagatacaggtagctctttctttacctgctgaatccagccaccatccgcaatcccatgaacatgctcagccccacccacactccacttagccccaaccctgccggtgcatacagcatgaacgctgatgatattcctcccaccaccatctgccacacacacacaaatcaatcaatcaccctatatcttatcttttcttttaacaaagaggacttctctctctctctctcttccttaccatcgagcaagccgcgtaggggaagtcagacatcccatagtgcagcccatcaaagataaacgcaagcgctgttattggttgagtcgccgctacaaactgaatgcatgttacgtgaatataacaggaaaagctcggcccactctatgtaattacatcactcaccaatacaccctttctcacaatccgcagaacttcagggtctttggaaaacaaaccagctattgaactgaaagacatccccaacacaatagccagtgcgatcccagtcaccactcctatctgtacaacaccaaacacgttacatctctctctatatatatatatataacaagagatcaagtagcatccccaaaaagtgaatatgaactgcgaaaagggaagtaggctcagaccttcagaacaaaagtagtaacctctttcacaccttcaaagtctcttttggatgcagagctcgcgatcaaggcctgctcaacaagacacacgaggcttaattacattctatttaataccaaagagatgaagaaagctatagccaaaatctctaggtatgaaaaccaagctgagaatctaatacctgtccagatgaagctagtgcatcagtaagcagagataccgccaaccacacttgcatgcatatctgatgtgctgccattgcgaaaactccctgacgagccgccattgatgtggcaacagtcatggtcacgagcacagaaagagtccttccaagaacaaatccccctataattcaagtcaagtttaaaacctagaaatatcaatacagtgcttacatccataagtcccataagggagaaaccagtgtctacatacctgattttaggtaatcgccgaactttagtgacccaatctttggaggaagcagtataactcttttgttcaagagtataagcatcaaaatggcaacagtgtacctatgaatcagaggaaaggggtttagcaccatcctacaaggttgaccaaaggaggaaaacaggaaaagaaaaaagatcta

SEQ ID NO: 30768 - DNA, 3342 bp, Arabidopsis thaliana landsberg
  unsure (1)..(3342): unsure at all n locations
tcccagaggttatcagatgttccagagctctcagagatctatcagcaattctcaaccgagtatggcgaggatttttctacctctgctgatgagttgcgtccggattctggtgttagtcgcctggtaagtggctgtgtttcttagtctttgatggtgattttatattaacaacccttgttgattatgattgttgttttctagttggtcgaaaaattgtctgccaaagcccctgatggtccaacaaaggtcaaaattttgatggcaatcgctgaggagcataatgtcgtctgggaggcacaatctttcgtcgaatcagatccaaaagataccgagttgttggtaagttatcacgtttcagagtaaaggcatcagttgttttatctactcgctaatgttaaccataagttttactttgcttctgttttagaatggagcaaactcgtttcagccagcgagtagtatgaacatggattcatctataaactcgaacaaggaacagcctccaaacatccatgctccagctactgtcaatgctcatcatggatcaagtgaaagacatcattccccagagaactcttatgcaaatggtggaagatcttcaagccgtagtaataatgttacttctgggaaggctgatgactactatcattcgaaagcgagaccttctcgtaagcggttttcttctgctatttctgtattttttttatattatgagtcatttaacggagtttttatgtttgacaggatctaggcctgatgaaggagaatgtagaaatccaaatcatggctatgagaattcatcttcaagaaataagcagaaatgggaaccagaatttgttgattccacagacgctgcacgtgctgctgctgaagctgctgaaagagcaagtttcgctgctagagcagctgccgaactttcgaacaaagaaaggatgacgaggcaggattccacacagtcgcatatatcctctgcatctgtaaatctcagaaacgagccttcacatcgacgtgacagatcgaatgcacaaagagaaagtttttctgaagatcatgtttcgcctagacgaaatggtaggatgcagtatgaagatatggacagaacccggcaagacagatatgatagggcagaacagattcctcctgtagatcagccatcaggaagacattccgtggataactcgagaaataacggttcctttggtagagagaagcagccaagccaggatgagacggatataaatgttggttactcagaagatgttcacctcaggaagcagtcaagtcgggtttcatcacattcacattcaagcaattattctgatgagaatgaccttggctcagattttatgaagtcaccaagcatcgtggaggaaaacatatttgccactgaatatgatcaccaatctcagagcagctttaaagatatagattcccatgatnnnnnnnnnnnnnnnnnnnnnncagctactgataattatgatgactatagttcattttttgatcaacctaaatttgatgcggaagataatcattatcaagatgaaattgatcatggtgtaggattctcattgcttggcagcaaaacatctgcttcagctgcttcgtggagcttcaaaggagatcatagtaagtcccatggaaaacacagcagctcgagctcacaagttttccaagagaacccaagttcccgattatttgatgatgtctctacaagtcctccggcttcttaccatgagcctgaccnnnnnnnnnnnnnnnnnnnnnnnnnnnnnnnctcagaaagcgatggtgatcagcctatagacaaagtttctggagatgtacatgagagggggaatctgacatctgatcgatctcacaaatttaaagtctctgattctgctggacacgaagttttccctttagacacagaagaacacacagataattcaaggacacgggaagaatcagattcagactcagagcctcagcttggtctgaggcttggagctttggccggtggatttaggaacaaaaagacactcccaccctacagaatgagttcggcatcgtccaaggctgaaaaggaatatatccaaatcgatgattttggtcagtctagcagaaaagatctttacagtaagaaagcaagcaacaccgagacaagaccaagttttatgcctcctcatccatcttctagtgatgaagacgactcagacatgcaacatccaggaagaacagaaacaaaatcagattccttatatagtcattcccgtgtcaaccatgatgactcggaggaagaaaaactcccaacacggtcttcttcaagaattcaagagaggagtcataagccatcaacaggaataagggatcagaagagaacgaacttcaagatgccagtttcagcatcgtctgaagatgaggaagaagtcgaaagagaggctgcacgcatcaatgccaagccaaataaaacaaccgggtatgggttctctctaaggacaaagggccaatcgaaagctaatgagaaacattcattaccagtgacaacgaagaaaaccgacaaagagtctcatgatcagccatctccaaggacagtaacttccagccatgttccacaaactgtaaaatcacccgatccagacaccccatccagggagagggagagagctagtcatgttcaccccaacctcccagaatatgacgatatctttgcaaggctcggagcgcttcgtgctcccagtcgacgctgaatctgctcatcttgtccttctgttcatatatatattctttcacacggaaaacagttcccctcattctttactctgactgaatttgatattcttacacgttatacagattgaagtagtggtgtgattctgcttggtcttgattggttttccttgtcttttttttttttgtgtggaaaaacagaaaagaaaataactatttgcgaagagaaagattttataataccattcgaaatgttgtcataatagaaataaattttgttctctaattctccatcttgctgaaactgcagtgcaagaaaacaaaccaacaatctaacacatgtcgaaaaagccagacaaatgtcatgttatggcagggtttgacatatcaaagtccctccatcagagtttctttccgtattgcagttcaatgaaagaaaccaagagcttgaccacccacattccgtttaatagcttcttcatgatccaaaatgccatcgggagttgtaatcattatataaccccactgcatataacaaattaaagaaggtgtaagttacgattagctgcatattcagaactagtgtagagccgaacctggcgcgttggaagtgtgcggtttgtgtattgcccg

SEQ ID NO: 30769 - DNA, 2822 bp, Arabidopsis thaliana landsberg
  unsure (1)..(2822): unsure at all n locations
cttttggacatcaccgcgtttgtccgttggagccagggaagtcgtcatttcttcggtttttatttttattgtttgatttgaatctgttttctcttctatgttctgtattttgattgccatcatgtgttgactgcttgaagtttaatatgttatctcatctgctgttcctcttcttcctggtacggagagggtgagagcacctagaggggggtgaataggtgatcctataaaactttaaacttaagccacaaaaactttgttaggcgttagcacaataatagccaagtggctagagaggagtcttaacaaaacacaatcaccacaagagatcaatcacagagatggcacagtggtttatcccgtggttcggccaagaccaacgcttgcctactccacgttgtggcgtcccaacggacgagggttgcaatcaacccctctcaagcgggccaaagacccacttgaataccacggtgttttgcttgcttttctcaatcccgtttgcgaggaatctccacaacttggagcctctcgcccttacaataagaatcaaagtgaaagcactagagtaagggagggaagcaacacacacaaatccacagcaaaacgcacacacacagccaagacttgagctcaaaataaatagcacaaagttcaccactagaacggagctcaaatcactaagaaagtcaatcgagtgcgcggagatggagtgtgaatgattaagaatgctcaaagtatgcttaggtgactcctccatgcgcttaggggtcccttttatagccccaagccagctaggagccgttggaggcattcttggaaggcaattcttgccttctgtcgggtggcgcaccggacagtccggtgcaccaccggacatccactgttcattgtctggtgcggatctccttcctaaaatggcacagccgaccgttgcagaattgtagccgttggcgcaccggacactgtccgtcgccccatcagaccgttggctcggcacgcgtcacgcacggattgcgctgccgaccgttggcgcggccgaccgttggcccacggacagtgcggtgatttatagccgtacgctgccgttcaattcccgagagcggccttttcaccagagccagcctggcgcaccggacactgttcgatgcaccaccggacactgtctggtgcaccaccagacagtccggtgcacccagactgagcagagtcttggctgctcgagccaagtcttttccatttgtttctttctctgattctagcacttagacaaatatgttagtacataaaaaccaatgtactaagtctagaatcatacctttgtattgatttgcactttgtccaccatttgtcatagttttacacataaccatttgtgttggacacttaatcaccaaaatacttagaaatgtgccaagggcacatttccctttcaactttcatctcccaaacgaagtacactcaagatcttctcaagaggtttgggatgaaggatgctaagcccgtgaagacaccgatgggaactgacggacatctcgacctcaacaaagaaggtaagcccgttgatcaaaaggcataccgatcaatgataggttcattactttatctttgtgctagtagaccggaaattatgcttagtgtatgcatgtgtgctagatttcaatccgaccccaaggaatgtcaccttgtggtcgttaagcgaattcttaggtatttagtttctacgccttgcttcaagatctggtatccaaaggggtctacctttgacttgattggatactcagactccaactatgtcgggtgcaaggttgataggaagagcacatcagggacatgccaatttctaggaaggtccctggtatcctggagttccaagaaacaaacatttgttgccctatccaccgctgaggccgagtacgttgctgcaggacagtgttgcgcgaaactgctttggatgaggcaaacctccgagactttggctacaatctgagcaaagtcccactcctatgtgacaatgaaagtgctantcgcatggcggaaaatcttgttgaacacagccgcacaaagcacattgacatccgacatcactttttgagagaccaccagcaaaagggagatatcgaagtgtttcatgttagcaccgagaaccagctagccgatatctttaccaagcctctagatgagaagaccttttgcaggctgcgtagtgagctaaatgtcttagattcgtggaacttggattgaattgtagcatacatgtgtttatgcctttgatcatgttccgtttgcattttgttgcttattatggtgctcaagttgtacaagcactccccggacctcataagtccttgtgcaagagatgcacatttttagggggagatgtgttacaacttgaccctttgagactaaccatatgcttgagtttgcttgatttagtctcgaaggagaattgaaagggaaaaggtggacttggaccatgcaagacttccactgcgctccgatgaaaagagtaacttattccaagttcatctctatacttttattgcatgtttactcttagttgaagattttggtgaggcaatggggttaaagggccaaaattgatcccgttttggtgcttgatgccaaagggggagaaaataaggccaaagcaataaatggatcagctaccacttgtgaattttgaaaatagtagagttagagtttttgtttgtcaaaatactcttgtttgcctcttattgtcaaaagttggtctcttgtggggagaaggcttaattatgaaaaaaggggagtttttgaatccttgatcgcgggatcatgtagag

SEQ ID NO: 30770 - DNA, 1019 bp, Arabidopsis thaliana landsberg
cccccataatcatctggcaaacggtattgttgaccagcttcatagcttcctcagcaatctcaacgctctttttcttcaccgccttatctaataggtttaagtaaaatcgttttaactcctctgcacggactttttgtgacctctcgagtgcttgaggcccgaggaacttggtgacaatgagcttcttcatgaacttccagtattctccgtacggtgcggtgccgaagccaaaggatccgaagaggagagacccttcgttcgtaggaaagtcgcgcgaggaaacgtttacgtcttgtgtcctaaagatctcataggctattgagggagacgagacaaggagtatgggaacattgaagacgtgaagatagaggagaggtccatacttggaggagagtttttgcaaagatctgtgcataaaaagagagaggagatgatgaagatggccaatgatcggtagagagggagggctcggtggcaaattcatgaataatttgaaagaagaaagagtaacagaggaaggaaaggaggcagaggaggattaagatcaaacagttttgaaagtcaacgttcattattgctttcattgttgctcaaagtgaaaaaaaaaacagatgaatatagcaagaatccatgaataattgaatataatatgatcacatgcttcatttattacgtaaacaaaattgtttatctttccggaagaagtgggatagtagatagatggaatcttttcttttcagtagtattaaatccaaatcatattcagatccagctaagaagttttttactattcaaacactcactcatgagtctctctactatgaaattgatatctatctgaatttgcaaatgattttgcattataaatacagattctcggtttagtttagtttttgctactgcttgtatatatctgtttcacacagtaaaacgaatcatgagtttctactatgaaattgacatataatgattatagattaggtaggtgaagaattttcgagaagtgagtaaatttttaa

SEQ ID NO: 30771 - DNA, 2639 bp, Arabidopsis thaliana landsberg
gaaaaatcgtactcaaattatctatatatcaacaactaatcctctttagatggttttgtttttttagataaatttggcttttagttcccatcaacatttcttccatgggtttaagtgttgatcatgagcttaacaagtcattagctatatcaaattaccaaaagactgattctcaaaaccgatcaagaaagagcatcattttataatctaactcgtgtagagtactgaaattttgatttggaaattaattctcaccgacttaacatggaccaaatgtacttgatgtgcaccgacttaacatggaccaacttggtcgatatcaatacaattctggacatctagaggacgcttatggtacgttgattaggcttcccgtgtgtattttgcttgtgatctcggcattccattgccgaaggttcgaggatgcgcgcattctttcgattgaactatctacaaacgcacccaagcttgatgacgctgatgacaggaaagcaatccattataaatccttatgtggacgaggcttagccaacatggctttaggccactattacacagccgctgttttggtacgtaaactcatatagatttatttatgttttgtttataattatgtttggtgtaacttatattcatcaatatttattgttttcgcagtttgcgcatttggtcaaatgctatgccaagtggccaaaaaactcttttgacctctttacttgggaggatttgttcatgtacacggcatggtgtggtcttgccacgatgaaaaaagatgagcttgaggtaatacaatattaattgattatatatatataaaaataaataagccgacttgtaaactttttttattgatgattttttaggagatttctgagaggatgggaagtcaaaaagttggccaccatttccaacacttgattagaaaaactcttggagggtaatatataactcttaaaaaatttctattgaatacacttgtcggcaattaaacaagcttggtttatttgttgcaggatgtttaaaccaccatgcttggattttttgaaaactcattcaaaaccaaagcacttttggacttatacctccacgaccatgtgaatgctcttgagatcctcatccaggagaaatttagggtgtgatgcatggttgctttaaaactatctagttttgtcttttttgtaaggctaagtattttcttgtctctcttggaacaagagtgtttgcaagttttcttttatattcaagtgtgttggacttagaaaggtttgaaaaatcgtactcaatatcaacaacgaatcctcttaagatggttttgtttttgtagataaatttggcttttagttcccaccaacatttcttccatgggtttaagtgttgatcatgagcttaacaagtcattagctatatcaaattgccaaaagactgattctcaaaaccgatcaagaaagaaagcatcattttataatctaacttgtgtagagtactgaaaatttgatttggaaattaattctcaccgacttaacatggaccagatgtacttgatcattttcaatataacaaactagtgcaccgtaccgtattataaagtctttctgtatttttttttaatataaaaacattttcagatatatttatttccaataaattcatttattttaagaaattaaccaaaaagaaataaaaatgaacaaacatatataagtatcttgattagaagaagcacgacacaaaccctagatgagtgagtccgaggaaaagacatgcaacgacgatccaaagcagccgacacttgtcctagacctggatatatcgatcttggatcgcttgagattctctgattatcatcgagccagatgcatttcttcagaatggtattacgccttgaaatcgtgcatcagagtaacaactccatggatcataatgtttccatacaacacagattggaaagaaaattcatcatgtaagttgttcaatcctcgtgaccatagttgctacactttaagagatgtcgggtttgatctagctagtagtcgttgtttggccagttccggtagatggttccttatgttagaccatagaaacgattttcatctcttgaatctgtttactcgagagaggatttatcttccttgtctgggtgcaaccgatggatgtccgatagaattttggagaatcaataataataatttttgggtgactctcaatgaccaaaacaattctgcaaaaaaaaaaaaaacttcacatatggtcatgtgtcttagaataggcaaagctgttttgtgggtagatgaagaaaccagagactacttagttgtttggaattatgatggcttttttgcatatcacaagaaaggagatgacaagaataactggaaagtgattcaacctttaatgaatcaacgatgcgtggatatggtgtgtaaagaaagcaagctttacgtgcttactgatactcacgtcactgttcttgatttctcccacgctgatgcttctccaatacaatgtgcaagtttcaaatctccgaattatggtaatgattcgttttgcggcaagaatcttgctgtgactttgtcaggacaagttttgatcgttatacacagtgggggtgtctacaagatggatcctaaatcattagaatg

SEQ ID NO: 30772 - DNA, 674 bp, Arabidopsis thaliana landsberg
gcttccggactagccaacaacgactcgtaactaaatcaaacccgaggtctcttactatgtatgttttgttttcatgaggatcgtacaacttacatgaatctttttttatttccacatctccttttggaaataggatgagccatggagttgttggatttgttactccaatgactgttttggaagcaatataccatattgaagaaacgcatctcgctcgatgaaaatcaacaaagctcaagcgttccaagatcaatcttaccaggttcacggcaagtatcgaatgtttcgaatcttcattgaatgtctttttctcggaatcgctcatctccttctgcttcttatgtgtcatgaccaagtaaagacctagaaacattttttaacaaaaaaacgaaagtaaaattacataaggacgcttccctagtctattcgttatcaacaattattatccattgaatttactaattacatttcgacgggtgcaaggggtgggcattcgggtaagcgggttgggttcgggtgaaacccgatcatgtacggatcttttggatagagaagtttatgacctaatagagtaaatctaaaatatcgattcggttttggtttggatccaatcgggttcgggacggatcggatataaatgttatggtcttttatggatatgatacctgaatttt

SEQ ID NO: 30773 - DNA, 3307 bp, Arabidopsis thaliana landsberg
gagcgggcaccggctatttttaacactatgatgagggatggtccgtctcctactgttgaatccatcaatattttgttgcatgctttgtgtgttgatgggagactcgaggagctctacgttgttgttgaagaattgcaagatatgggctttaagattagcaaaagctccattctcttgatgcttgacgcatttgcccgagctggaaatatctttgaggtaaagaagatatacagtagcatgaaagctgctggttacttacccacaatccgcctttataggatgatgattgagcttctctgcaaagggaaacgagttagagatgctgaaattatggtctctgaaatggaagaggccaatttcaaggttgagcttgctatatggaattccatgctgaagatgtatacggctatcgaggattacaagaagacagttcaagtataccagaggataaaagaaactggactggaaccagacgagaccacttacaatactctgattataatgtattgtagagacagacgaccagaagaagggtacttgcttatgcagcaaatgagaaatcttggtttggacccaaaactggacacatacaagagcttgatctctgcttttggtaagcaaaaatgccttgaacaaagctgaacaactgtttgaaagagctttctctcaaaaggtttgaaactagaccgttcattttaccacacaatgatgaaaatatcccgagattctggaagcgactccaaggcagagaagttattgcaaatgatgaagaatgcgggaatagaaccaacacttgctacaatgcatctgcttatggtttcatatagttcttcaggaaatccccaagaagctgaaaaagttcttagtaacctgaaagacacagaagtggaactaacaactctgccttatagttcagttattgatgcttaccttcggagcaaagattataacagtggaatagaaaggcttttggaaatgaagaaagagggcctagagccagaccacaggatatggacttgctttgttagggcggcgagtttctccaaggaaaaaagtgaagtcatgttgctgcttaaagctcttgaagatattggttttgatcttcctatcaggtatagatgatctgatgcattccttaaagagtatagttctgttaagatcatgtttgtggcttttcttattatgataatataaaatctgatacaggatcatatcatatggtactgattcttatgaatttttttctctggttttttaatgatacctaccaggcttttagctggaagacctgagttgctagtttctgaggtggatggatggttcgagaaactgaaatccatagaggacaatgctgctctcaattttgttaatgctcttttgaatcttctctgggcgtttgaactcagagctactgcatcatgggttttccaattgggaatcaaaaggggtatcttcagtctcgatgtttttaggtcagtcttgtatacgttcataaatggtgttaacactcgcccatgaactagtcacttgtttctcatgcaaatgtttccaaatgcacagagtgtttagcagtaacatttgtgattcactttgatttttcagggtggcggacaaggactggggtgcggatttcagaaggctgtctggaggtgcagcacttgttgccctgacgctatggcttgaccacatgcaggcacttcatctctttcttctctcttaatatctctgcatcttcacatcatattccacaaatgcctgcataactaaagatcgtttgagaatcattctcatattcaccaataaccctctgttactattcttctcccatttcaggatgcatcactggaaggctacccagagtctccaaagtcagttgtcttaatcacagggaccgcagagtacaacggtatatcccttgataaaacgctaaaggcgtgtctttgggaaatgggttctccatttcttccctgcaagacgagaacgggactgctagtggccaaagctcactctctcagaatgtggttgaaggactcgccgttctgcttcgacttggagctaaaagactcggtgtctttaccagaatcaaactcgatggacctgattgacgggtgtttcataagacgtggacttgttcctgcgtttaaccacatcaaagagagacttggtggatttgtgtcaccaaagaagttttcgagactggcgttgctaccagacgagatgagagagcgagtgataaagacagatattgaaggacatagacagaagttagagaagatgaagaagaagaaaatgggcaatgaaacgaatggtattaacactcgaaggaagttcgtcagaagcaagtgatgtcatgatattgtactctcttattataaaatctcattagtgattatttgtatacagacagttttgattttcctctttgtggatactaattagaataagtgttcatgtaatatttatcgatagggtttagtaaattaaacagagctattgcgtctaacaaccttttaccgtgaacgaaaaaaaatgtaatgcattcaactactctttctaccaatgcctagttcaacttatttattgttgagttcaagatttttgttgtcgttgttgttagaatcagtgactattctaaagatgtttggattacacatatttatacatacaataaatttcaaaattttcaagagccaaaaaaacaactaatttggtgcatcttggttcttaataggaacatactgcagatattttccttctcctaggcgtaagtttttttaaaccagtggtgttgttagatgtttctgcaacacttttgggtcttcgttttcgtttctcctttgcattgtcttggatctcgttatcacattccaatgccaacatcctctcctctcctccattgtttggttcattttcacaaacagtttctgcaacacttttgcgtctttgttttggcttctcctttgcattgtcttggatctcgtcatgacattccaatgccaacatcctctcctctcctccattgttcggatcattttcacacacagtctcattctcttgtctacatacatctcctgagcagttctttaatccttttctccgtctctttggatgtctctctgcatctgacttcttctgcctgaatcaacaaaaaggtgaatttagttagattcacaaaagctacctgtgtgtgtgtgtgtatgtaacgaataatctatttaacttacttggctctgcgtttcttattcacggctacactatccggttctggctctagagatatatcccgtagtgccaaatagggcttgtg

SEQ ID NO: 30774 - DNA, 1580 bp, Arabidopsis thaliana landsberg
agttagagaacataataattggtggtttgtcatatgaagttctttgttgtttttatagagttgtttttttcatgtttaatcataaattttaattttaacaatcacaaaaccaacacttataacctaattgtttgtgatagtgccgttactcttacatagttacatttatgtccaaacttgcaaacttgcacattttctggatacatgcatgtatttatgttcgtacatatccatgtataaatatgtgtccatatggattcaactttttgttggttcgattaagaactatatattatggaaattcagtagtggaagccagtagaatagcggcccacactgcttcctactttatgatttgaatatacatatatgattttagtatagataccgataaatatatactgatttgcattcaacatcatttatgtttacagaaaaaagattattcatatgttactataaagacatatatgtgtgtctaatctatcaaatgccactcaaaaatatatgcaatgcaagaacagaattcttacgttagatctcaatatcgataaaatactcaacaagtcccatgcatgattagtacgtatttattattaaaaaacaaaatctcaaattatgccctattggaaattaatgttggttttctccaaagtacaaacaaattaaaagaacatagcatggagtcaggattcaagattctaaaaagtgaaaatggagttaaggtcgaaagtgaacgtatggaacggtgaatctacacattcaaatatggttctcggaaccataaattaaagaagtactaggcttgattaccacaacatgtctctggccattggaaagagatcattccgcgactaaaggagaaccggcaaatgtttgtttatgaatgtttttcatgttgcaactaagattatcgtcgttgatagagagaagttaagatttggttgcaactcatattcggctatatcctttgtctcaggatcaacaaaagttaccgtcctacgtagattttttggattcatgaggtgcttcggctcttgtcattggtttaatatgtaacttggattcatgtaaatttaagttgctaagtttgtgaatctagtgacatcggtccctcttctagtcttcttaaatcttaaccaacaaattacagaaaatggtcgattacaactatatatgtggtggctcatataaatttttcgtacctaacaaataacaatcttcgacataaacaacatataactagtctaaaatattggatattatatgagaaagatagcataaacttgagtacatttcaaatcaaatttaacttctacctgaaaattcgattcactagtttcaactgtagatcgattagaatcaatgttgtaatagagtttgacaaaatatgccatgcgccaaaagaaaggaggatcatgtataatgtaatatgaatataaaaggcaaaagaaaacattatgagcataaatttttagtcttttagatgtacaataaaggacgaacaagtttcatcttttttgctttatgcaatacaacaagttcttaatatcttcagctataagcttcgaagattaaag

SEQ ID NO: 30775 - DNA, 3315 bp, Arabidopsis thaliana landsberg
ttaaacattaaagtttaatatgtttggtttatttgatcaagtttgtttcggttacagtaaagttggtttatgcgtctttatgtttggtatagtttgagaacaaatttcaatctggttatgctttgatcgagttagattgtttcgattcaattacggtttactcggtcctcccctttatgagtccttgaatcaaattttaaaggctctcttaccaagaatcaaaatttttgaaaacagaaaaacattaaaacaatatgtaaatgaagattaggattagcacaaattctcgaagttttatttgcatcttacttcaacatttgttaaaatataaaggacgttcatcatttgcaaataaagcagatattttcttaaccaaaaccaaaagaaacatttctatccataaatttagaatatatgtttccttaagattatttttacagtcaatgctaatctgcaacaaacaaaaaagtcttattttgttgtgtatccgtagtatacttccttctataaaaactatcaataaagatttgataccaaaattaacaaaagaagattcattgaaatactctactatatttcttcacccaaatgtctcaaattataactcaatctggtttcattcaggatctcaacaactagaggaagcaaaaacttttctctgtgagtaaatattttgttatttcctctgttttgtttcatatttttaattgcaaatcttaacaacggttacataaacacacgatcacacaaacacataacaatccgttttttatttcatgcatatcatagagacaaaaacagaacaccaatcctctgtttctgaagaccgatgaaagactttacagatacaatatcggagtcggagtgcgacgatgagataagtatagttccacaagtggaactaacggtgcccaaaaccgacgatccaacttcaccgacggttacgtttaggatgtgggttcttggcataaccgcttgtgttctcttgtcatttcttaaccagtttttctggtacagaaccaatcctttgaccatctcctctgtttcggctcagattgctgttgttcccattggtcatctcatggctaaagttcttcccacaaggagattcttcgaagggacgaggtggtctttcacgatgaatcctggtccctttagcaccaaggaacatgttcttataactgtgtttgcaaactcaggctctggggctgtttacgctactcatattcttagtgctgttaagctttattacaagagaaggcttgatttcttacccgctttgctcgttatgatcaccactcaggtaaaaattgatagctttgcaattcgtaatttgtaggtttagggctatgtgaactgagagttttattttccctgtttcttgtgctgcaaggtattgggatttggttgggctggtttgtataggaaacatttagttgagccaggtgaaatgtggtggccaagcaatctcgttcaagtgtctctcttcaggtaacggttctttctaatgattctcttatatgttttgattaagcatttctaaaagtatctgattttgattatacacagagcattgcatgagaaagagaacaaatcgaaatggggaattagtcgaaatcagttctttgtcatcactctcatcattagcttctcctattatctcctacctggttatctcttcacggtcttaaccaccgtctcttggttatgttggattagccctaaatcgattctagtaaaccagcttggttcagggtcagcaggtcttggtatcggttcctttggtctggactggtcaaccatcgcgtcataccttggaagtccactcgctagcccattctttgcctctgcaaatattgcggccgggttctttcttgtgatgtacgtaatcacacctctctgttactatcttgatttgtacaacgccaaaaccttcccaatctactccggtaaactctttgtagccagtgggaaagaatacaaagtaacgagcatcatcgatgccaatttccgcctggatcgtcaggcttacgcagagaccggaccagtccacatgagcactttctttgccgtgacctatggactaggtttcgcgaccttgtctgctagtattgtccatgtcctgcttttcaacggcaaagatctctggactcaaaccagaggagcgtttggaaaaaacaagaaaatggatatacatacaaagatcatgaagaggaattataaagaagttcctctctggtggttcctttcgattttcgcggtgaatcttgcagttattgtcttcatatgtatttactataagacacagattcagcttccatggtggggagctttcttggcttgtttgatagctatcttcttcactcctctcgttggtgtgatcatggccactactaaccaggttagaagagagattcacatgcttataacttggcttcaaaaaccggctatgattaacaaaaccatgattctgttctttgttttgttaggctccgggtctgaacattatcacggagtacataattggatatgcatatccagagagaccagttgctaacatatgcttcaagacttacggatacatcagcatgtctcaatcaatgactttcctctctgatttaaagcttggaacttacatgaagatcccaccaagaaccatgttcatggcacaggcaagtctaaatagtttatgtgtgtcacataaatatctctaaaacatttgtcaaaattgttgttgttttcacaggttgtgggcactttagttgcagttatcgcttacgcaggcacggcttggtggctaatggctgaaatcccaaatctctgcgacactaatctgcttccaccgggaagtcaatggacttgtccatcggatcgagtcttcttcgacgcatcagtgatttggggactagtaggaccaagaagaatgtttggtgatcttggagaatactcgaacataaactggttcttcgtaggaggtgcaatagctccagcattggtatacttagcctcaagactcttcccaaacaagaaatggatctcagacattcacatccctgttctgattggagccacagctataatgccaccagcttctgcggtgaacttcacgagctggctcgttatggcgtttgtgtttggacatttcgtgtttaagtacagaagagaatggtggcagcgatataactatgttctgtctggaggaatggatgcaggaactggattcatgtcagtgcttttgattcttgcgtagcaacgtagtgagattgctattgattggttgagaaattattttataaggtttattttttgattata

SEQ ID NO: 30776 - DNA, 3801 bp, Arabidopsis thaliana landsberg
ctctctttgcttaatataaaaacaaaaactgctttatttcttattttttctagtcacttgtaattgtgaaatgaccagcttaatacaagtcaactacggttgacttgaacaaatgacaatattcaatatcagtaacggataacttcttttgttatatctagctgaagtctctttaagataaacgaaataaataagaaaacattggatcataaattatgaaatcatttataaaccattaatacataatacagtctattatacatggttgtggacaaaaagtattcacaaaagaatgattcacttttatataataattaaaaaatttgtatatacatacagacaaagagattttttggtactcaaggcaacagaaaaatgtatttcagaatgtttacgtggcccaatgacattggatgaaaaatgaaacgtactccgataaatgcggctctttgcctatctctttatttcccaatcacttgtttttttttcctttctcaagtgcaccatctcattatgccctttcagtctttcacattatatgatattgtgatatactagtatataaagaaaaataagtacaagacttggccgtatttctcgatccatgaatttctttttaaaaaaaaattatatcacaattcacctccttaagatatacactacttaatggtttattaatcagctcattatataaaagagtacataatttgatctccctctctctctttaacttggagaagttgtcgaagatattctcattctgaaaagtcagcgtctctttctcgtttcatcaaccattcatcttcttttccccaataagatcaccaaatttccccaagtaaacaatccaacatcactgatcacccttttcccaaataactacaaaacgatcgagaattataatcagatttctctcacggattcctaatcatttttattatatttggatatttgctaattcttcccgtgtataaatctcatataaacacgcatcatacatatatattatgtgcagcgtctttgagtttcaagacatggacaacttccaaggagatctaacagacgtcgtacgaggaataggatcaggccacgtgtcaccatctcctggaccaccggaaggtccatctccgagcagcatgtctccgccgccaacatcagatctccacgtggaattcccctccgccgcaacttctgccagctgtctcgcaaatcccttcggagacccgttcgtaagcatgaaggatcctctcatccacctcccggccagctacatctccggcgccggtgataataaaagcaacaaaagttttgcaatctttccaaagatttttgaggatgatcatattaagagtcaatgcagtgtcttcccaagaattaagatctcgcaaagtaacaatatccacgatgcctccacgtgtaattctccggccataaccgtctcctctgccgtcgcagcagcttcgccgtggggcatgatcaacgttaataccactaacagtccaagaaactgtttacttgtcgataataataacaacacgtcatcatgctcacaggttcagatctcttcttcccctcggaatctcggaattaagagaaggtaaaaaaattcgatctacgtgatttaattatcatttttcccttcttgattaaacgagatcatttattagaggttcatgataaaataaaataacaccatgtgattaaattattttcccttcggagattttcatttattgacgaattacataatttttttagtctttcagatttacatatttgaaaacttgattaggttcctcgccgttctatatttttgaaaattaataaatgaaacaaacaaaaaaaacgagtggaaatagctagggtttcgttttgtgtaatgtattatatatgtatatgaaattttctgaattcttacattacattcgtcctttttctgctgttcaattttaattctgtcgtttgcttttgttaaacttattattttactcttttttttttgcttttatatgattttttttgtagacatatttatcttttcaaaactgaaaaaggtatgcgcagtacgtagttatgtatgaagtgtaaacatcataaacaaacaatgaacatctacattatgcaccatatctaaaactgaactcatcatgtcccacactaaaattgacctcaaaatcagctttacattacaacagttagacgtatacttacatatatatgtctcaaactctcaatatactgatggttcatgcaggaagagccaggcaaagaaagtggtgtgcataccggctccagccgctatgaacagccggtccagtggagaagttgttccgtctgatctatgggcttggcgaaagtacggtcaaaaacctatcaaaggttctccttatccaaggtatatatttactcacatgtgtttatataaccctatgtctgtgactccgtttctacatattaattagaaacatgaaatttatatagatataaaatataagtatgttctttcaataggaatgttttctaacaaattggatataactattttatattacaaacgtatatataatatatatatgtgatgctaaaaaagtgaattttagtaagcggaaaagtttttttttttttttatcaaccattgaaaaaactcacaattaagtaggatctacaactatgcttttcccttgacaaacaatattgcaggtgcaatcattagcatggaactacaaaagtataaagttccttcaattttctacggcgcacattaagccttttatatgccttattgtgacatttgatgcaaacttatcttataaatcataatatatatatatatatcccatcggaaaagctaagatatcattaagattcgtttattccttgatccaattgagcgtaagtgatcaaatgggcagttacttcttatttgttacacatggttacctaaaatatggttaatgtaagtctttgataacttggattaggattaattatatgtttcgcaggggttactacagatgtagcagctcaaaaggttgttcagctaggaaacaagtcgaacgtagccgcactgatccaaacatgttagtcattacttacacctctgagcataaccacccatggtctactcaacgcaacgctctcgcaggttccactcgttcctcttcctcctcctctttaaacccttcttccaaatcctcaaccgcagccgccactacttctccctcatccagagtttttcaaaacaacagcagcaaagacgaacccaataactccaacttgccttcctctttcactcattcttcttttgacgccgccgtaattaaggtggagatcgtggattatcgtcaggaaaagatggagttcgattataatgacgttgaaaatacctatagaccggagttgttgcaagagtttcaacatcagccggaggatttttttgccgatctcgacgagcttgagggagattctttgactatgttgctctctcacagtagcggcggaggcaacatggaaaacaaaacgacgattccagacgtttttagtgatttctttgacgacgacgagtcctcaaggtcgttataaatattgttgttaatgtatacatagaaatgaaattattcatgtaattcgttttgtgttaaaagacggtatttgcctttgcaacctttgcctgtggaagccgatgaagggtaaccttgttatttacactacaattattggtggggtccatctatagttgaaacataaaaccccactattttattaaaaattaatttctattaaagacctttattaaaaaat

SEQ ID NO: 30777 - DNA, 2909 bp, Arabidopsis thaliana landsberg
tcagcaaaatcagtgtgccttatgctctttttactctcgagaaaaaatgattaacattttcttgggatctaacctcgttgtcttcggtttctaggatatatctctgttattgagcacagaggaccatagtgaaactatgaaaaccatcgcagcaaagagtggtgctcgatttcatcttattcctcctgttgttaactcaacttcggaaactgttgcttgcaatcagtttcaggatgacagttttgaagcagaaggaaagtttctaggtaagtttttgaatatacttgagatggtgaacttataatgaaggctgctcttttaatttttgccaccttacctcaagcaattattggtctggattttctgcatcacttcagcctttatttgtgcagatgatccagcattgatcgtctacactagtggtacaactggtaagccaaaaggagttgttcatactcacaacagcatcaattcccaggtatatatccgacctccttatgtaccgcatgtcatgtttcgaatctacccaacctgcaatagaatggtctgcatgtatctaaattatgatgtaccttataacctagaagcttgtatatgttgcaggttagaatgctcactgaagcttgggagtacacatctgctgatcattttctccactgcctcccactacatcatgttcatgggcttttcaacgctttatttgctcctctttacgcacggtctttggtaacttatactattgagatttgctttggctagctctttcaaaatacattaccttcggaaaacatcaggctagttttaggtttttaattgattttcacattcctttttcaaggtggagtttttgcccaaatttagtgttagcggaatctggcgtagatggcgtgaatcatatccagtgaatgatgaaaaaaccaacgactccataactgtatttactggagtaagtcttattttttgttacttgtattccagacaaatcatactagtttatgcttagctgtccctgcctcaagttaattgtttgatttcttgttgcataatccttttcttaagcctgatatagcaagcttattaattgtttctagtgttagttagtatttgaattgagggaagtattcactattcaatgtgagtttactcaattttactatgtaacaaaatgatactcttggctgagttgatcagtttccagtttgcttcttgcgctctagatatataaacaaacatgctttgctttagagaaatttagcctgagatgagaaatagaaagaaacagcgagagaattagctatttttaattggtaaaagttattgttgcgatacacaggttccaaccatgtacactcggttgatacaaggttatgaagcaatggataaagagatgcaggactcgagcgcttttgctgcacgaaagcttcgcctaatggtaagcaaccaaatatctcctagaagagccaatccagcttaatgtttatcattatctgcctagatagctattctattttcatattctgatgaaactagtgcttaaatgttagccaatgaaatacattttcagatgtctggctcctctgctctccctcgacctgtcatgcatcaatgggaaagtatcacaggtcatcgtcttttggaaagatatggcatgactgaggtaagtagattttcctgtctctttgagttaccataatcaataccttagaacaagcttaacacaagcttgttcttagtagttacatctactgaattaaaaaaaaatcttcaatattcccagtttgtaatggcaatgtcaaaccccttacggggtgcacgaaaggcaggtactgtcggcaaaccgcttcctggtgtggaggtcagtgacatcttctttctctttcgtcctcactcaataccttttaactaatgctacacagattaagtactagtaatactgtgacatgaagttatgatactgaaaaagtgtaaacatgataggctaaaataaaagaagatgaaaatgacgcaaatggagtgggtgagatatgtgttaaaagcccatctttgttcaaggagtactggaatcttccagaggtgactaaagaatcatttacggaagatggatacttcaagacgggagatgctggaagagtggatgaggatggatattacgtgattctaggacgtaagcagaacctataagtacattcaaacacaatttaaaagtactttgtgttccttcatttaacatcttatcttctcttctctggtgtcgatcaggtaatagcgctgacattatgaaggttggaggatacaagttatctgccttagaaatcgaatcaacccttctcgaggtaacattaacatccatttgagtttttttttggctctgtaaagctatcagaagcttttatctccttgggaaataggctttagataactgaaccgagagaacttaatcgttgtatgatatctctgggggatgtgttatgcagcaccctactgttgcagaatgttgcgtgttggggttaacagacaacgactatggagaagccgtgactgcgataattatagcagagagtgcagcaaagaagagaagagaggatgagtcaaaacctgtaataaccttagaagaactgtgcggttgggctaaagacaagcttgctccttacaaggtactaaaaatctgccaaagtgttgtcaaaacgcgcaacagtcttgtcaaactttttttccttttttttcttgtccataatattctgtcttttcagctaccaacaagattgctgatatgggagagcttgcctcgcaacgccatgggaaaggtagctatatttctctcaaattttttcttttttcttgaatgatatcagagatagttgttttgttgtaaccaataagaatcattctcagtgtatgagtattttgtt

SEQ ID NO: 30778 - DNA, 6506 bp, Arabidopsis thaliana landsberg
tagatttatttatccggcctgggacggacacaccagccattttttaataaatatgcatcttattccattgagttactgttgcctgcatatgcttgatgataatcattttgctgcaaatccaggctgacatatcttctattatcaggacaagtaggtcagagtttattgtgagcgtcaataggtatctcgaagctaagacccagaagctgtctgtaggcatgcgtttcaagatgagattcgagggggaagaagctcccgagaaaaggtatcaaaactaactatattgttttctttttgctgataaagctgaatataacttctagtctttttttttgtgtgcattttaactatgcaggttcagtggcacaatagttggtgttcaggaaaataagtcttcggtctggcatgattctgaatggagatcgctaaaggttagaatattctactgctatactttgcagtggagcaagttgtggatttgtattttcttagttgaatgaatagagtgatgcatcttaatatgcttattggcaatctgatcatgctccaggttcaatgggacgaaccctcatctgtatttcgtcctgaaagagtttcaccttgggaacttgagcccctagttgcaaatagtactccgtcttcacaacctcagcctccgcaaaggaacaaacgaccaagacctcctggtttaccttcaccagccactggtccatctgctcctggtattctgtgttcttttctctttgaactgttcttctttgtggcggctcttgctctttttattgatgctctcttcagttactccagatggtgtgtggaaatccccggcagacactccttcctcagtgccattatgctctcctcctgccaaagctgctacgtttggtcatggtgggaacaaatcatttggagtatctattggatcagccttttggccaccaatgcagatagtgcagctgaatcctttgcttcagcgtttaacaatgaatctactgaaaagaaacaaactaatggaaatgtctgtaggctttttgggtttgagctagttgaaaatgttaatgtggatgaatgtttctctgctgcctctgtgtctggtgctgtcgctgtagatcaacctgtcccatccaacgagtttgactctggccagcaatctgagccattaaacatcaaccaatctgatattccttcggggagtggtgaccctgagaaatcctctttgaggtctcctcaagaatcacaaagtagacagatacgtagctgcacaaaggtgtgactattagcctcttgtatcgctcgctctttctttgaagatcaattttttttgtcacaactccaatattggtcttaaattggtggaccgtgtctgcggcttgcttttgactaaaacgcaatgtttttggcaatttgatttaggtgcacatgcaaggcagtgcagtaggcagagctattgatttgacaaggtcagagtgttatgaagatctgttcaagaagctggaagagatgtttgatatcaagggtgaactcttagaatctaacaaaaaatggcaagtcgtttacaccgatgatgaagatgacatgatgatggttggtgatgatccatggaagtaagtgcatttgctgtctaatactcaaaattttgtttggtgtcaacaaataaagcagtgtttaaaattgcaaagcatcatctgctgtaatgtgtccttttgctttaccgttgatgatcattttggtcttctcttttgtgctgcagtgagttctgtggaatggtgaggaagatattcatctacacacctgaggaagtgaagaaactttcaccgaagaacaaactcgcagtcaatgcaaggatgcagctcaaagctgatgcagaggaaaatgggaatacagagggcagatcatcatctatggcgggatcaagatgagtatatcactgtgttatgttttaaatgtacttgccacgtaggaaatatgaaagcagaagcaagagatcgttagacaatatgaaagttgagatgtctgtgtatagcaatgaagttttatgtcttcaagtcttatgaattcacttagatgcaatgtgttttgaggagttgtgtagcttttgtacgggaaatatggaaattaagtttcacgtcttgttctaccttgaacaatggtcatggtcaaaaataaaattatgataaatctcctcttgctttatagttcttagtacacattataagactttaagaataaatgatggtacaaacaaaattcgttgcttttgttataatcttgttgccaggatgaaataagcacgacatcacaagtagagagacgccgcgaatacaatgtctcttttgatcttggaaacagcttcttctagtttagcttcaagctgtgtttctcctatagattttgcagctactatgagctgttgcagaacttcctccattctccttatcgctctgatcaagctcccttcgaaaacacgagcaatctccatgacctcatagaatttggacccttttgcccaagcatacaccgcctccattatatcaggtctgaaagactgcacaaaactctccacgtcgatttcgacctgtcaatgtcataaaagacagaaagttatggaccaaagcctcttcaaatggtcaagttcacttttagctgagcagagagaatatgttagtgaataccttgcagtcaagctgaacttcagctacacgcctggctgtgtcttgtaactgtatgaagagcaagtcgagttcttctctgggtttagcagcgtcggggagtctttctcgccacacaaagcaagagaggagcgaaaccaacttcttcacctttgcattcttgaagataccactgaacattaactccgttaatgtcaattcttctgcactactgatttcacatgcaaccttacccttcaactccacgacattatcactagtgatgtatctgcgttcaatagcataatgataaaaattaagctaatagaatcatcaatggaacatacagtcccataacattaaaaagagcatgatagaatgatgtagctgacgcataagattgagttggtttcacaagtatattttgaaagtgaatgaaataaatttggcaaatatttaccctagccttcgtaaaacacgctttctggccttgagttcatctttaaacgccaatgctgttgacgatcggacagttttcttaagtgacttgatcttggctattagctcttccttcatctgtagaactttcaacttttctgttatgagtggagattttgcaattttgtgtttttcaaataggttttccagagcctccagccgccgaactgtctttttgtaagagctgctcttaatctaatgaagtaaaagttgtattcatctcttgtgacaaatgacagagcagaagcagaaaggtactggggaaaaacaaaatacctgcatatcaacttcaggatctagggtattccatcgggatgtctagagagtaactcagaaaccttcttcagagcattctctcgagcttccaaaggtacaagatcttttggtatattcatgattgcactgcttaaactctttatctgtcaatgataataaagacaaacaataagatcatcaagagcagaatttggggaggatagctatacatgaatgtgtataagattatataggactatgaagaggagaaaaggaaaagaaaacggagcagtcatgatacctgcgataaaggaacagtgaccacaacaggctcaccacgttccttaattggcacagccttaactttctttttgccaacgccatctttgctaaccatacatctagtcaacacatctacggtgtagtttgcatcctctggtcttctactatcatcatctgaatgaattactcatgccaagacaataaacggattacattgtgtgaacggattaatagcgctatacgaaaaaataattctcagagttccaaccttcagataaacttttgactttgttaaatttcatgatcactccccatgtatcctggtcttcaatgctgaatgattgtggctcttcatcatcatttgtgcaatcgagacaaacagctctgtttggcagcaaaaagggtaagcagtactttggagtgaacacaatttcacgtatatccttcttcagactcttatattgcaaaatcaggttatagtaattttttaagctttcttcttcttcaatcaccaaagagtctctctcttcttccagagattttatttgcttctgcgaagatcagaccacaatcaaatcatatacataaagtgaacactatatcatcaggaaatctaacatttagcattttgcaacttcacctcgagatcaggtatagcacgatcagcttgaaactgaaagaacgaatttcgcagaagattctcaggatcaccttcttcacaccgcaattgatttagaagcatgttatagctcaaatggaaggcactggtgaataaaggaaacaaaacagtcttggtgagtgaatatgtcaagaactctaaccctcttaaagcagactatcaatcaggttgataataaaataaatatcagaaatacttaacaacgtacctgttcaaagaatcagcacttcctttgagcattgatttagcaacagctggttccatcttctcgtcaaccatgaggatgcagatacctcgtttgtcaatacctcgacgtccggcacgaccactcatctgtatgtactctccacttgatagccaccggaacttgtctccatcaaacttacgtacattggtaaatacaaccgtctttgccggcatgttcaatccaatactaaatgtctctgttgcaaacaaacactaagagaaaatacttcaaacttcagtggcaatacttcaaactaaaggaaaacatcacaaaattacataacaaaaggtagcaagaattgacaatatgaaaattgtagttctacgccttcacctaccttaataagaccttcctgaaataatatctcaattacttctttcaaaattggaagcagtcctgaatgatgaacgcctataccacgtttcaagatgggtaaaatatttgacacctgcagtacatgaagccatgaatcatgtcaatttcgctgcaggacaaatatatttgccaaatcgcatctgaaactagatcaactaaacaagcaccaagatgaccctttatggaacatcagatgtaaggaatataagctattacatgttacatgttagagaaaagattaatatctagggaaaaatcaatttttgtgcaagaggagagccggctacaaggcaaacaaaataaaatataaaatttgagataatagaggcgagattggtgggaaatctactacttataagccaataatactagccatttcctacagagatgtgcacatgatcatcctagcgcacagatacctcacaacattaaaacatgacaatatgtttcaagaagttgtgaaaagtattcacaaaagatataggttaaggtgcattatacaaacactcaggcatcttagaaagagctttaatgaatgcttgcctgaggtagctttttatcatcatctgaaagcatatcaactgcactagcaaagattgtctccacagcgtctttctcatcatcgctgttcaaaaccatcttagacatctgtggaacaaacagacaggtattagactcacgttttaacagtaagacccacagtacgcagacaatgaacttcaggttgtaaaatacacataaataaaacacaccacagagtacgcactacaaggtggaggcaaacacactagaaaaatcataaaaaacaaaatttgaacagtctatacaaacaaaaaatatagagattgaagagaccgttgctgcaatgtaataacagactatcaagattaagaatgacgaaagttttttaattcagtggtgggaacagtactatagaaaagtcttgattcaagtgaggacttcttttgcgatccaactcatacagtataatataggtaccgcatcttcacataagactccaggagcttatcacagtcactccaacccaatatcaattttaaaaggataagactgatcccaagcataagaagaagacaaactaaaaaaacacctaactttctggaccaattttcttatttcagcagaaacaaattcagattcatgtttggctaatagttacaaaaaaataacatccccaaaatgagatgacattctcatatgacagggtaaagatccagggattttgaaagaagtcaaataaaaaatttgtcggtaaatgatttatttacttgcattagacaaacagaagaagaggaaactaacctgcatagcaagtgcctcgcattcctttttgctgaaactgaacaaaatcacgggatcatattgccgctgaattatcattttcgccaatttgaaaatatccccttcatcgcccagttttccaatcgctaatcactttgaacaatccattatctcttttcttgtcactctcattagtcggaaccagtgcgtagagagattt

SEQ ID NO: 30779 - DNA, 1661 bp, Arabidopsis thaliana landsberg
  unsure (1)..(1661): unsure at all n locations
tgatccgcatgttttgtatacactcagtgctgtacatatctttgccctcttcgacaaactcaacattcttgatgttgaaaaagtttcaaattgtatcctttacgcattcagcttcttgtcactgtgaaaataaataaactcggtaattcgtttgttgtagatacaattatgctttttctaaatgcaaaaactagatattgctgggttacagaatgaagatggatccttctcaggagatatatggggcgaagtagatacaaggtattctttcttcatagctttttgtttattccgatttgtgagtttcattatgtttatctgcaagcttgtttaatgtaggttttcttacatagctatatgctgcctctcaatattaaaatgtcttgataaaatcaatgtgaagaaggctgttgattacattgtgagctgcaaaaacctggatggtggttttgggtgctcacctggagcggagtctcatgcaggacagagtatgttcatgctaatttaactttctaaccctgggatcatcattcaatatgtgtctagatgactttactgaatatcattgcagcatcatatggtaattaaagggcattgattctttatgttgctgcagttttctgttgtgtgggtgctcttgctatcaccgggaatctccatcgtgttgataaggacttacttggatggtggttatgtgaaagacaagactacgagtctggaggtttaaatggacgacctgagaaactccctgatgtaagcggtaaacgtttccaaatcgtaacatgattctgattgttcttagcgtgcttttgattattcctattatcaggtttgctattcttggtgggtcttatccagcttaatcatgatcgatagagttcactggatcgagaaagcaaagcttgtcaagtttatcttggactctcaggtttgtctccaatattgttgctattggttttaaaggtctcatcttttagagccttccctgaggttcaagtgaaactttgaataggacatggataacggaggcatctcagatagacccagctatactgttgatatcttccacacctactttggagttgcgggtaactaaaaatgtctttctttagcttatcttgttgatgtgaagcaaagaattatgtgtcaatttaatacaaaattggtgcagggctctctcttctcgagtatcctggagtcaaaacaattgatcctgcctacgctttgcctgtccatgtcatcaaccggattctcttcaccaaatgattcttcatcagaactcagatttaggttaggcgttggagttagacaaattctggttaggtcttcgattctaatagtctggttctgttcgggttaagcatatgtttactattacttgtagtcacaaaaccatttacaatctctaacctctcccatgaattaggtttacaaccaagaaaactaacatggcactactctgattctcatctacatcagtgtttcttttctttttatccctttaaagttctgtgttgatctaaaatgatgcagattcaacttctatgatcttttagggctttccgccgtcttttgccaccaagctggtcacgctctacacgtaactcggcatagaaaatttcgttccaagaatcatgcaccccanggagacaccagtggct

SEQ ID NO: 30780 - DNA, 2699 bp, Arabidopsis thaliana landsberg
caggtgtctttgacaattatgagaaaataatcattggctgtgattgctatataagaactagcaataagatctatggggacctttaaagttgctgggtggtttcatattttggttcgtattcataagatgtcgccacagtcgaagttgaaaacaagttgttcttttctgagcaggtggctttgccggtaacactggacacgatccacatatcctatatacactcagtgctgtacaaatcttggccctatttgacaaaatcaacattcttgacattgggaaagtgtcaagttgtatccttttgcacttagctttttgtcaatgtcactaactcgttcttcttcacaaatagtcatggtggaactttcatatgttaattaatcaatgatgttaaacaagaaggaaaaaccctgccttatagtagatattattatgttttcctatatacaatattagatgttgctaagttgcagaatgaagatggatccttctcaggagatatgtggggagaaatagatacgaggtgtttttccttgccatgtattacaaagacatttatatatttcctgttggtgatttcactatgttgaatcttaacagcaagctgtttatgcaggttttcgtacatagctatttgctgtctctcaatattgaaatgtcttgacaaaatcaatgtggagaaggccgttaagtacattgtgagctgcaaaaacctggatggtggttttgggtgcacacctggagcagagtcccatgcaggacaaagtatgttatgctatttgagtatttttctgtgccatcttcccaattgttacttgcaattagtgttataggtgactttacagaattaacaaggccaaccgcatcactgccgtttaactattccaatgactagatactcagatgtttatttttctgtagtcgacgtgctattgatacatctttatgtaaattgtataggacagtttcatggttgggagatatggtaaaaagacggtattctttatttgtttcttctgttactgcagttttctgctgcgttggtgctcttgctatcactgggagtctccatcatgttgataaggactcacttggttggtggttatgtgaaagacaattaaaggctgggggcttaaatggacgtcctgagaaactcgctgatgtaggcattaagctcatctccaatgagagagacctttgtatgatttccttggttcttacacattttttactgttcttatttccaggtttgctattcttggtgggtcctatcgagcctaatcatgatagatagagttcactggatcgacaaagcaaagcttgtcaagttcattctggactgtcaggttcgtctccaacaagaaaattcatatcgttactaataagccagttttgattgaaagctctcatctcatctatctaaatttgaatttgaataggatttggacaacggaggcatctcagaccgacccgaggatgctgttgatatcttccacacctactttggagttgcgggtaactttcatttgtctcttcttttagctcatctcttgctgtgaagccaaaagtggtcttatttcatcaaattggtgcagggctttccctccttgagtatcctggagtcaaagtaattgatccagcctatgctttgcctgttgatgtcgtcaaccggattatattcaccaaatgactgcaatgggtatatgatcttaatggtcaaacaatatggccgcaaggctctctatatgatttgttcattgaataatttacttggcggttttagaagttatgtatgctcaaggaggaggagattgcaatttgggtatgggaacagtctcaaatctcaatgttgtataacttgctacattattgaggtttctgatgtaatggaaacgaagttgtgttgctgctacattatataaatcacattaatgtgttttttctccacacttttcattctgatttacttcttgaaaaaagtgaactaatgtgtttaggagtgctcaatacttatagaccgaaccaatttaattaacaaattgaacaatttagagaaattgcaaagattatagtacacaaatcataattacaaataaattttatttccattgcagtaaactaaaaattaaaactcttgtatcgaattttgcaaatatatttccttttaaattttttaccttggggtttaaaaaaaaagagtaaaagaaaatcaggatgtctaaaccctagtacgccattagagagggttcagctcaagtgctctgtttttgtttgtttggtaaaaccctaaaagctttcgagccgactcttcaatggaggcgctagcgggaattgaagcagacatcgaatcgtatttcggagagcaggatcaacagaaatcgtcaccggacggctgcaaacaggtcccgtggctgagctgggaagagtgggactctgtgagagagtctctcttctcttcttctccggatagaatcgcttctgcattggaaagggtaatgcttttcttcacgtgtttccaatttgctacagaaattggatcaagtttactgctttatagaccagagagcttaaaattagttgaatgaagcttgctgcttcagaccagagagcttaatggttgttactttatatgtgtaaagtagggatttttaatctcttttgcggattttttcaggttgcaacatggcgaagtagaggatctc

SEQ ID NO: 30781 - DNA, 3056 bp, Arabidopsis thaliana landsberg
  unsure (1)..(3056): unsure at all n locations
caagccggggagctacaccatctcccttcggagcccaagggtctctagctagtcctatgcaattacaaattataagtgaaagttcgcacccgttaaatggtaactaagtatgttcacatgttttgttttgcaggtgcacaggcttcgacttcaacatttgggggtcaatcaactatcgggggtcaacaaggggggagtagggttattccttatgcacctacaactgacacagcgtcagacactgaaagcaagtctgaaagactacaatctatatctgccatgcctgcacacaaagggaaaaacatggaggagcttaggtgggaggactaccagcgaggagataaaggtcatatgccaaacaaatccatgatattcgttcgtctaaaggttagatgtttgtactttatttaccaaaatattgactctcttgttgttcaattttcaggaggacaacgttctactggtcaatcnnnnnnnnnnnnnnnnnnnnnnnnnnnnnnntctcagccaagtatattctctacgtcaccagcgtttagccagacacctgtgaatccaacaaaccctttttcacagacgactccaacaagtaacacaaatttttccccctcctttagtcaacccactaccccatcctttggtcaacccactaccccatcctttgggtcaactgtatcaaatactacatccgtttttggattatcctctagtttaacaacaaacacatcgcagccacttggttcatcaatatttggttctactcctgcacatgggtcaactccaggatttagcattggtggatttaacaacagtcagtcatctccgctgtttggttcaaacccctcatttgcacaaaataccactcctgcattcagccagactagtcctttgtttggacagaataccactcctgcattaggacagtctagttctgtgtttggacagaataccaatcctgcacttgtacagagcaacactttcagtacaccttccactggctttgggaacacgtttacaagctcttcatccttaactacaagcatctccccctttggtcaaacaacggttagtttttttgtaactaatttaaatgccagttcacttcagagttgatgtctctttcacttccgtttgagttatgtagggatttctaatatgagtttatttttgcagcctgctgttacgccctttcaatcagctcagccaactcaaccattaggtgcttttggtttcaacaactttggtcaaacccaaataggtatgtgaatcagtcaaaggcaccctgaatattatcatcttgaatactcgaagccaagtcttgtatgtttatgtttctgaagctaatacaactgacattgcaggtgcaatgggaacttttagccaaggaaactttaagcaacagtatggtctctctgacctcagtgtttccgactcttatttccgactagataccactagtttaattgtactttggaagttgcgtctctggagcttaattcttttctttttgttttgttttgttgacaggcctgcattgggtaactctgctgttatgcaaccaactcctgttacaaacccatttggaacacttcctgctttgcctcagatttcaattgctcaaggtggaaattcaccttcgattcagtatggtatctccagcatgcctgtaagtttttctgcctttttcaacacccacacacaccaccgtttttcttcataacttctttccaaatttgaagcaaataaaatatagatattctcaaagatacaatgttacagaaacaaatgactactccatgttattaccctgaatattttcctttcttctcaggtcgttgataagcctgctcctgttagagtatcaccactcctaacttctcgacaccttttacaaaggcgggtcaggctaccaacaagaaagtaccgtcctagtgatgatggtccaaaggtatgtttttctattttctgaattttggctttgtcttgaatatttcagtctttagtgatgtttactgaaggtctttctacctgtttgtttcaccaatgtttgtccaggttccattcttcagcgatgaagaggagaattccagtacaccaaaggctgatgcgtttttcattccaagggagaaccctagagctttatttatacgcccagttgaaagggtaaaatcagaacatccaaaggatagcccgaccccactgcaggagaacggtaagcttcccttttttttttcattcattggcttatttattgcaagatttagagctttgtttcaattgcaaaaagaagcttttcattgtcccaatagctcggaagatgatctgcttgcatattaatatagtggctgaatttgatcatatctgaccccttattacatttgaaattcaggtaagaggtcgaatggggttactaatggagccacccatgagagtgagtattttacatatgcatttgtaacaaaattgtgattaaagtttgtgnnnnnnnnnnnnnnnnnactgtctctactgttaatatgtgcagctaagcataacggtgcaattcgtgaagctcccccggtaaaagtcaatcagaaacagaacgggacacatgaaaatcacggaggcgacaaaaacggttcacacagttcaccaagtggagcagatattgagtcattaatgccgaagttgcatcactctgaatatttcacagagcctcggatccaagaactggctgcaaaagaaagggttgaacagggttattgcaagcgggtaaaggactttgttgttgggagacacggttacgggagcataaagtttctaggagagacggatgtgtgtagactcgacctggaaatggtggttcagttcaaaaaccgggaagtgaatgtgtacatggacgagagcaaaaaaccgccggtgggtcaaggattgaataagcctgcggtggtaactttgctgaacataaaatgtatggacaagaagaccggcacgcaagtgatggaaggcaagagattggacaagtacaaggaaatgctcaagaggaaagctggggaacaaggagctcaatatgtgtc

SEQ ID NO: 30782 - DNA, 661 bp, Arabidopsis thaliana landsberg
gtgcatccctgaactccaacactttgcaccaggagtccccattgtgcttgttggtaccaaaatgggtaagatagctataagagtggagccaacatatttccttgtgtaatgcttgagaatcacatatatgtaatgtttcttacaatgttccgttatctagatcttcgtgaagatagacattacttgtctgatcatcctggactgtccccggtaactacatcacaggtgtgctttttcaacctgtagaaaccgaaaagattgttgtgacattctctagactctctcttctctaggttttatatgatttaatcattcatgtgttacagggagaggaactccgcaagcatatcggagcgacttattacattgaatgtagctcaaaaactcaacaggtacacttgttcatgtgtgtttggaaacttaggagtcattagtgttaggtgactctttacttgcaaactatatgcttttctttggttcatggcttttgcagaatgtgaaagccgtatttgatgctgctattaaagtagtaattaaaccagcagtgaaacaaaaggagaagaagaagaagcagaagcctcgcaacggatgcctctcgtaactggaaataatcttcactcttttaatatataactaagatattctgaaatactagacattg

SEQ ID NO: 30783 - DNA, 786 bp, Arabidopsis thaliana landsberg
gaggggaaatgcaaacgcctttttgtaaagcatgaaaaatgcattgacgccatttagtaaagcatgaaaaatgtattgttattttttgtattttcctttcacatacaataaactgagtttgacaacaacagaagcctgcagagtttaaagctcattcaatgctcatcaaaaatttacagactctcttatcatttgtcaaaagagaaccaaagagtacaagcatgaagaggtttctccaagtgacttattaccaaatttgaacattaccaaaaaatagggattcaactcaaggagaatcttaatcacacatgttttttcttctacacaagagatataacagcaaagaagtgtaatttttatccggaactttgaaaaatagatcatagaatgtatagactatagagtacaagtccataagttaccagtttatatatctctattttgtaggccatgtagcttgagctgacataataatcccaacgataactccaaataacccgagagcactcccaaagatctcaatcacaagaatcttaacaaagagcgtcgagttctgagcatcagacaatgcgcagctgcttccaatgattcctacacataacctgcaacaaacaaacaaatccccataaacagtgagaatttcaatgtttacaaaggttcaggaggggaacaattagaggatgaagcaggttatacagacccgcatacaaggtttgagaatccaacaatgattccagaagcaaagattgcatatccagctcctagagactcagcatcatacatctt

SEQ ID NO: 30784 - DNA, 1390 bp, Arabidopsis thaliana landsberg
  unsure (1)..(1390): unsure at all n locations
taacattttaatcgtattctttactgttttcaccatcttccacctctaacttacttagacagctcctttctacctgtttcttctctctctgtctttcttttttctcttgcttcttttatattctccgacaaaagaaaaagttcaagatacccagaaaaagagtgtaaaaactacatttgttcttcttctctgttctgatacgaaattatgggttcctctgtttctaaaaccgcttcctctgcttctgcttcttctataacatcgattttgaattcacctccggagacggaattcaacatcccttcttcatcggtacctaaagctttcacatttccgatgccgtcgattcatcatccacctgctaaaaaaggcgacacacaccactttgtctctcttacatcgaccacttacggttctcttgttctcgacgacagacaaacattgcctcacatctccgtttccgggaagagtaacaagaagatgcctgaaacagaggaggctcgcgactcgttctctcctgactcagtgatcaacacatgggagctcatgaacgacnnnnnnnnnnnnnnnnnnnnnnnnnnnnnnnnnncaagtaagagtaattccgtcgtaaatttggattccttttctaaacccatcacgaatcgagacgtggttattaatgggtctgcgtatggatcttacgaagatgaggaagattggagattattgccttttaaacctaagcaacctctgtggaaacatatgtctgaagaatcatttctctctgatttagatcctaacattatctcatcttacaaaagagcactgtcctccaaacagctaggcaagaacagtagcaatggccactcaaatcattcggttttagtcagtttaccagaatatgtatcttctagtccattgagttctcagacttcggaaaaagaccaagagaaaccaagattgcttgaaaaagaagataacgagaacaagatagtagtatacttcactagcctcagaggaattcgaaagacgtatgaagattgttgttgcgttagagcgatattgagagggtttcaggttgcggtagaggagcgtgacatctcaatggactccaaatacaggaaagagcttcagaatgcactcggcgaagagaaaccggtttgtttgcctcaggtgtttataagaggcgtccgcattggtggaattgaggagatcaagatactcaacgatggaggtgaactggcagagatgttaaaagattttcctgcttgcgaatccattggagcctgcgatagctgcggaggtgcaaggtttgtgccgtgtactaactgtggcggtagtactaaagtgtttgaggaacaagaagatgggtttaagagatgcaatggatgcaatgaggatggattgg

SEQ ID NO: 30785 - DNA, 1719 bp, Arabidopsis thaliana landsberg
cagaaaatgtcaaagccccaacgttaaagaaaaagaaatagacaatatatgcataagtaacacacttttctgaacgttatcttcagcatctgctgctccaccgtctttaccaacaccatcacaagaaatataaatgcggcagaaaaaagtcttttatctaataagaatcgaaacataaacttagaatgaaacacgaaatccattaactttccaattttatgtggatatgtccacactttgtttcacgtcaccatcatcattgtcttctttttcactttaaatggacggctttgggaatcccatggtcattgcgataacaggattattaatgtaagatttagaaaacgtttagaatatttacttattcatatttctttatatcattttctaattaggctgaacagatattaaggtattgtattaataactcaaaacaaagagttcaccccaatcttgtaataacttatcataatatcaaaacattcgatccatttctaataggtcggagttgaaaacttccgcactagaagtcttgtgattttttctctcagaagagatcatgatataacagttccatatcatttgtcaacatcacttgcatatatgtataagtgtaatcataaaccataaacataatttatttgtgggatagtggagaatacaaagacgctaagaaaacatcaacaacaagaagaagacgacaaaagccactagaggaaagaagagaagcaacaatgcatggaggaaacaaagattcacgatatatttggatgatctcatcagttcttgcgaagtacgatgaggtattgcattgtgggtttggcattctggagacgaaaaaattcttggtgtgccttggcctcgacgagctcaaaggctttcatcatcgcttcggctccaaaatgtgcggagaggatacctccaaaggcagacttcaaggagacagccaagattttggggtcaagcgactccccgtttggctgaatgatatcctcgaatgcctcaattgtgaacttcccgttctcttctatgatttgcctcaactcgccttcttctgcaatgtagagtgtgatgttgaaagactccaccttgtctttctcaatgacaccctttttgttataaaaaaaaggttaaagaagataatgttagttttttcattgtagatggtttgttaaagattaaaagataacgttatttatatacctgctgagcaagatcatttaaagaggctccgattaagtccaacactattcctctatatgtttccgacatcttgataccgtctcttagacacgatcctaaaagcaacattaatccctcgggcacaagctcttcagctcgagcatccaatatattcttggagtcgagcgagaactgatcaagatacgctttcttgaccttgttgttaaatccggtgcaatgcatgtctctgttccagaggggagagttgcggtctgagatccctttggggattttggaggtgaattgaaaagcataattcatgactcctatgtggatactatgcttaggaagaacacggtcaaagaaggaaccaggaatggcagcactatagtatctcctgccagaaggaagtccctggaagagagtgttgaaatcgttattgcttaagtcgttgaagaggacctggaactcgatgttatcgtccgggttttgtccggtttctctaagatacttctcttccacggcatctattatgtt

SEQ ID NO: 30786 - DNA, 647 bp, Arabidopsis thaliana landsberg
atgcctgcaggtcgacatcggatccctacattgcaaagtgaaggagtttaacagccggttaaagtgatctacgaccatgacttgaaagggtcgatctttgtataatcctctagctgaaagtttgatctcgagttcgaattgaaagtgaccaaaagtaagcgagggcttggagtgtgctggattgaaaaggtgctccccgagctcaccaaccaacgttattgatgtcctctaaattaaaggattatttcaggctcatattaggtgaacctgtcagaatggatatgcacttgtcagctacaaataacttttggatacggtgatgccatcacccacggatatgggtggtaatggatcatgaccctaatacttccttcacaaaccaacaagacccttaattttgttagttcaaaattgtattgttttataatccggccctaacttgacccgatccttaaatttgctaggctaaattaaatggcccgttaccacccctacccacggagcaggtggcattaggattaatacacacagtcaccttttggcatctaaataatggaacagcatgctcggccctagctaatctgtaccattgcagggacttcttctaacgacaagcttcaattagaaacattttcttggttgtaatg

SEQ ID NO: 30787 - DNA, 2322 bp, Arabidopsis thaliana landsberg
acagccatcggacggacccggagaagcatagggagaagagactgaagcctcccgactctcccgagctcccaggcaaccgaacctagctgagggcctcagaggcgacgacggacgggaccggataaaaagaaagagtacgggccaagaaacgagaaacaggcgcggacaaaagcgacgaaaccccaagcttcgccgggacgggaatgaccatccgagaaacccgagagatcgaaagggaggcgacgaatttctcgaagggacgcgactttgcagcaaagcacaccgtggacaagcacaaaggcgctcaaggccacaacccagcccgtcgtgcggataaccctagatgaaagagcatgaacaagcggcttgagattggcgggagaggaccggatccatttgtagacacggtgagcattgtggtaatcgacagatgagtcatcgtgagaggttgcgtggatgatggcagaatcaaggtcagggttgcggaaggaggttttccgggagaagccgatggtaaacaaggttttccggtctttgagagcaccggaagcccgtttccacagcttcatcatcagcctcctcctgctgctcctccttcttcgctttttcttctcttttcttcctctaaaaccaaagcttacattgttttctctattttaagttttaattattttgccacccttgcttttgaccgttgtaaccggtttttcgtttagttttaattttaaacaagtatagaaattaaaagctggcacgtgtgatcaaaacacgtttacttagttttgggcacgtcggcctgaccaccacacggtttcatgcatcatcttatcataatttatctagcttatgaaactaattaagaaccgaagctaggtagtctacaagccttggaacctttactgataagtgataaatataaactgttaagactaaacttttttttttttttttttggtacaagaaagaagaaggtgaaatgttaagactaaacttgctaatgtacaagttcttttacgctgaaacttgttctcactagactcgcaaaacttaagctagtttagctacaccaagtattgggcttcaaaagagattcaaaaagtaagacaataaaaatattaggttttagctaaaagctcgaaggtttttaaaaaaaattaccatttactggttaaaaaaaaaaactaattatgctacatgatacaattgggtttttttaagttgtttaattgtttttttagaaacttgaaaaaaacagcaaacaaaataaagaacagcaaatgaaataaaaaaataaaaaacgaagggaataataaatagaaacaaaaaaaaaaatttaaaattaattaaacacttaatattttaacacattatacaattatcatacacaacttataagatatttgtcccatgtgattatattcaaatgaaaaatatctacatacaaacactcaatttaagatagaaaatatgagatcttctggctactggaatataattcgttacaaaattgtaaacttagcgacattttccaaacaatagtaccaataactgaagcctgaatagtgaatagacacacctcatcaatttttctccggacccggaaaataacggcaaagttggaaatccaacggatcaaaaataaatttatgtaaatttgctagatgaagaaataagcaagagttaaaaaagtggattcagtaagaaagaaacatcttatctagatgaagagcggcgcatgcaagtggcttcaatggtgatgaagcaaacgatgcagaagaagagaatgataagtccgactatgattccgaaagtcaccacatccattttctattcaccttgatcttttggcacacgaaacaaagaaaaaagttatccttggggccgcagatttagtgttgtccaccgcttcggcttgagtcaaggtgtcagatcttgattgatttgcttccaatacttacacagcttttttaactagtaacaatttcagattaaatttcaacttgtagtgattttaactgagacccgtcatacaatggagctgtcattcggatctaattgcactcatatctcggatcttgtttctatatatagaattacaaaccttaccagattaatattcagtctgttaatcctaatgcctgttaacttggttagtcttcacacttggtttgttttagtattctggttttgtattggtttatgaattgtaatttgttttacattaaatattcaaacagcttatgattattctgacttcccttcatctgaaataagcataagcagtgtgtatatcacttgaaccccttatgttattcgccctcc

SEQ ID NO: 30788 - DNA, 4253 bp, Arabidopsis thaliana landsberg
  unsure (1)..(4253): unsure at all n locations
ttcacaatgtacatcacatgaagtgtgcctccctttgcctgcatccactaacatgtactggttctgtcctcatcaagatggttctaatcaaaacataggttttgatgtttgcgttgcgaggctgcatcttcttggttttgatgtacatagcttacaaggggaagatcattctacggatgcctctgaacaacttatgggaccactacaattagctaaaggaggaaagttactcacccgaaaatttgccaacattcttcatgctcttcaggtacttttctctttgacattcacatgagtttcttcgaggtcgttagtgattagttgatatagtaaatgtcttgttaaacgggcttcctttcatcatatataatcaaatgcttatttcttctcttttgctggataataggttgttcagttctaccattggaaagcttctgaactcgtaacttctaatgtcgaaaatgacacattagaagaggtgaaagctatgtcccactctcagttggaaactatcaatgccctgaaatcagttttcctgctagatgagaacctcgtagccacaacttttggatattcgtgctctggtgaggatcgaaaggattcactcgacttgacgggtatagctctcgcggttacctcttgggaagagtatagctgtaagttactcaaggagctattatcatccttgcctcaatggaaaacttatcaaactatacacaaagtggaatctgattagaaatgaattctgagttactgttgaattgagtagttaacaacttgaaagtgattctcttggcttcaaagaacagcttctcaattatctctttgtttgatcttacacataatcatgttataatatccttcaagattgttgcaagtaattttgtaagatacagagaatcaaagttaattttgggattggatacagaaagagatctcaaacgttggggcctaaaagagagaggagaaaagtcctgtaatgactagttgtatcagaatgaacagcattgtacaaagtcttcttgtatctcttacggtattctgtgatgatgaactgcatatccacctctgctctcgtcaccacgattcttatcaacgccgtgtcatctgttcctaatcctttcattgatttcctcaatgcctgcgctttcagttttcgttttgtaaactcgaaaccctacattgttgtctaagaaaggttaggttacgttacctttgcgaaatagaaacaagagttttcagcacattgtaaaattgttagaaggacatgctcgaagttcccgcgagtctcatctcttatggcctatcaagattggagaaagagaagatcaagattttggaaattttctgattcttgagtaacaagtttctggatcttgattatatacctttccaagttctttgccgtacatggaacggtaagtagatcttacagcgaccaaatgagtcctgcttcggtcagtgaatatctnnnnnnnnnnnnnnnnnnnnnnnnnatgcttccttgcaaccgcgctcttgagagtcctagcatcgttctctacactcgcattatcgatctctggtccttcatatcgcgtagtgttcaaatacgcgagcaaaacctgttacatattacaatttctattactatttgaaccaaaagcatggatcaaatagagaaaacatactcttttgtgattgccagacccttcccattctatgtcctcttcaagtttcacaccgaaagtgtttgagtagacctgtttgatctgacgaagctgagagccagatcgtgtgcatataatctcagcaatcgctttatgatcagtcacggctcctcttaaggagcgtttcagtattgaagcgtctcgctccactgcttcaggcatccacaaaagaacggctttctgaaatcaaaaacgttttcaaaatgttgtctgctaaaatcatgaataaaagtttttttgtaaggctaagatttatttaccttgagatgaccatgaagctcagagtggagacgttttcggaggtcatccgagaatttggtttcgtattcttgttcgatgagagctcgttgtgttgcattgcgatgagctaagatgttgatgatcaccgaagtatcgcagcctcttcctgcaaattgcgaaaatataaactaaaatgtaacaaaacaagttgttataaactacataagaagcgaatgcgtacgtacctttgaaggccttaaagagttggtcagcatcgactcgaggagaaggtaccgtcattggtattttcattgttgccattttttctttcttcctctaaagattccgaagaagatattgtaaaactctatacctttcttctttcttttttttgttgtattctcttgattttgttttttcttttgttttgttggtgtggtgtgatttgtggcgattgggttttgggttgaaatatgcaaaggaaatggacattagaccttgattttaggagttgaatcctctgtttcattcgtgtaacgatggatgctttgatgcataaaatttaacggataacattttttaggatccgatagatatctctatgtttcatgattatcatcaacataaagacttttataagagttgtgtagagtctgtagcctagtaaaagggggttttcgacttaatttcgaaacaatgggccaaaactacaaattataaaaagatctcctaaggtttattactttccccaaatggatgttgtcactttcggaatcataatcggaattatcattctcttcttctgcatcgtctgcttcatcactattgaaggcactcgcttcaaccgtcgctcttcttagctcactcagagatgtcgttctcgctgagaaagctactggttccgattctggttttggtactgtttctggatctgtgcgttgaatccggattctctcagtcaacgccggcgcgtgacgatcacgtgcatcatcacggtggtgggtgtagtcattctcatgaccacgaccacgaccacgatcatgatcatcatgtgaagaagacgacggcgaaggtggagatgaagttgccggaggagcttgctgaagaggaggatatgagattatgtgggtttgggccttgtcttcatgatcacgatcacgaatcaagttccactcttacggggtttggtaaatttggttcctttagctacattcttcattgggttttacaaatcattacttgatgaataaaatctcttcttcttgttggtttttgtagctctgtggcttaatgcattgggatgctctcttttagttagcttttctctctctcatctgccttgttttgcttcccattatgtttggtaagcaattttttgtatacctatgaaaaccaaaaagcattgcttttaattgtcctggagaaaatgctctctttcgtttattcatgtgctataatgtgttcatgagagtaactgtttcaagtcttatgttgcaactaacagttcaagggaagccatcaaaatggttcgttgattctttggctctctttggggtaagtcattagactgactacagtagctttttctttggcggtggtggttctgaatgcaagaaaaatattttagcaatatctatacactgtgtttcgtcgcaactttatcacttggatgagttggaaatgttaataatatatgatctgttgattcagttaatttgtttaccaggcaggagctatgttgggagatgcttttcttcaccaactgccccatgcttttggtacagtaatggacacaagtttctgatctcttttttagtatctgcattgtttcataatttggcttttatgccttctcattttgtttgcttttatatcttcctgaagtgcaaaatatatttatggtttggcaggtggtggccactctcactctaatgatcaccatgagaaccatgaccatcatgatcattctcattcggattcgccttcacactcacattctatacaagatttgtctgttggattgtctgttcttggtaagtatcataacacttcctcttgtgtttattgaacaaaatattttgacagaattgacactttcaatcatcattcttaattatccagctgggattgtggtcttccttcttgtggagaagttggtgcggtatgtcgaagaaaactcatctgggtccaatacttggggtcatcatcaccaccaccaccatgcatgcagtaagaaactgaaagatgaaagcgatcataacaacttgtaccaacaatcttcttctgatgcaattgaaattcatc

SEQ ID NO: 30789 - DNA, 3830 bp, Arabidopsis thaliana landsberg
tggctacaatatcgtggacaccaaattattatttgcacattgtagtttgaaacagaaaaaaataatatgcatgggattagcatttagatttgggtttagtgttgaggatttaggacttggagttaattttagccaacaaagacatggttgtccaagcggtgcagaccatagcgtcattttgtgatgcatgacgtcgtttcatatcaatacaaatatgcataagccatagtcatcaattcaagatacagtgtccattttttcttgaccatccatctattttcgcttggaagaagaaaaagacgtacccctattgatggatacataccactcgtttgtgattaacttttaaggtgggacatgtttgttcagggtacgtaactttacaaggtttagggtctcaatataaacccacgatgcagatataagaagcaaatcattcacaatcagacaatgacatctctccatgtgttactcttcatcatcttcccaaccttcacgttttcctccaccttgcttctttacatacacagactctacacaactaacttcttgggtttgttttgacgatatagccaactatgtttgagcttgtgttgatgttctgctctgagcccatttgtttgttgtaccttctcgatatatttcaccttcagttaaacaaagaacaaagcaaacaaaagcattttttcatccgacaacagaagaatcatttttaaggttgtctttgattcataacatgataagattcaatgcaatataatcaataattgattccattcaatctgacccagcttcaatgtaattaatcatttcgatttaacaaagcttcgatacaatcaattcatccaacatgacaatcaaacacaccataaaaaagcacttggtaccatcatcgaatgtcagcaaagctcccagaacgtatagttgggataaactcactcattgattctctaatggtagtagttacacaactacaacaaatgtacataagaagattaatttaagattcttgaacttcgcacagcgaaagaaacagaacaacgagaacagagcatcagagtcgttcctctaacaatgtaaaattgattcatgaacacctaaactaattcttcatgcaaaggtataaactttccaaagcacaacactaatcttatcattttccattgtctacacgaacctaatcgaagagggtatgtaggattcaacattattatgcaatagagaacaaaaagaaacccaaaactaatataagccctgatgcagaatcggatcattatcagaatttcaagcaacggtctaatctcaaaatcaaattataactcctaatctaaaccaacaaactcaattacgagaaagaagaatccacatgatctaatttctaagggaaatttctaagaaacccaattaataaaaatgagcgatttttagaacaagaaaccaaaaacacataccgatccgaatcgaggcgttttagcggatcccaaaatctcagcacggacagactcagaaacacgaacttcgtcgatctgaaaattcttctgatctttagcagcggagatatggcacttaacgtcaagaaccctgatctcagcttcatcaaccattgtttgactcaaaatcataacttggttataatcaacggggtaagaggtggtgctttgcttggacgcaattgaaatttgcctaaaagaataaagaagacagggaaaggggaattagggtttgagtttttgtgttggatgtttatttgcatatttctgaaattgaaccatgccatgacgccgcatatttcaccgaatttaagatctgagacatttcatcgctcacttccatggcgactagcaaaaaccttccgtaaatcgaaaggtccttctgttaggctagttagctcttacgcagatctcaaccgtctgttatgctctgtttggcacgttttatttttgcggaaaacaaatcaaaacggttaagcatttgatggtttaattggaaaaggatagaattgtctttttctcttacaaaaataaggaaaagtgcttcatccctgtaaactgcctcaaaaggaataaaattctctaaaagtgcctaaacgtgtcacattcccgcatttcaggtcgagtaaagtcacatcgcatttgaactacacttgtctaagttctggtaagtatctatcctaacttatttctaatttcccgatattaatccgacatctaagttcaatagcaagtgattcccgtcactgaaaccgttttacgaaaacattcacgatgttattgatggtttttaaacatgctaactccggctggttttcgccgtcgttgattgacatatggtggctgattttttagatctatttgatttgacggctgagttactgtttgtttgccgactgatttatgatttatcaattcctccgtgtctgagtttgttttatgttgtgactgagttatggtttaaccttacatcgatgactgagtttcttttatatgacggctgagtttgtttatgttatggctgagtttctgttttgatatagctgagtctggtttatgttttaactgagctgttgttatgttatggtttgactgagtttctgttaagatatggctgagttagatttatcttatggctgagttatgttatgtgtggctgagattggtttatgttatgacgcagttatgttatctatgcctgagttagatttatgttttacctgagttatggtatctgtggatgagtttgttttatgttatggctgagttatggaatgcttacggctgatttatggttatacaaatgtctaaagaccaagcaagggagtaccctccaagactttaccaagaggaggattctaatctggagggtaaaggcattaatcacaacataaagctgggagagttccctgcaattagagaatcaataggaaaagatatatgggcagaactgaaagagacagagcctggattaattgctaagcttgttgatagtcattttctatggtctggtaagaccgtacattatctactatgcagacagctgagaatactgaagaaggtgctttggtgtatcgtggctggtaaacccatccggtttggattgaacgaatttcatcatatcacgggtttaaatatagatcaactgcctacagaaaagtttgagcctgaagctgactacaaagtgttcttcagggaattgcgtgtgccaaccggtgaaggtcctaatctagatgaacttaggcagggcttagtaacgtttagagcttggcctcctgaaaagcgtagatggtttgggttattgactcttctagccattggactttatggcttgcatcctaactctagcataccatttgatagtaccaaaagatttttgatgacgaagccatgaagatttatccatggggtcggtcagcattttaagcccttgttgtttctataaagatgttgaggcctattggcaagtcgtacaccatcagggatacgactttcgtgttacatgcttgggcgtatgattcaatcaacaccattggacagcgatttgggaacgtagtcaaagaggatgagattctgttgcttacatagggtggcaaccgtacccgtgcaacaatagaatcggccattactgaagatatcacagcgtatggtgctgaggtaaggttttggctctgttatgatagttattgactgagttatgttcagtgatggctgagatatgttctgtgatggctgggttatgttctgtgaccgctgagttatgttctgtgatgggtgagttattggttattggtagctgagttattggtttttgatggctgagatattgcttttttaatt

SEQ ID NO: 30790 - DNA, 2220 bp, Arabidopsis thaliana landsberg
tttaaaaagaaaagtttgactaacatgccatgacggttctgttggcacaggctttgttctattccgctctactgtcttctcgtgagatgataactgtaaatgatagctccaaaaatataataaagacaattagcaacaggctcagcgcattatcatttcacatcagagaaaactattgggttgacaaaaacaaaatcaatgaaatttaccgttacaagacagaggagtactctatggacgccaccaacaagttcaatatctacccggaacaggtttctccatggctaatggattgggttcctgaaagtcctgagtctggattcctgataggaaacctccagcctgctcacatggatttcaggttcttcaccttgggaaacctctggtcaatcatctcctcactaggaacaccaaaacagaaccaagctatattaaatttggttgaagagaaatgggacgatctcgttgggcatatgccgcttaagatatgttacccggctttagaatcttcagagtggcatataataaccgggagtgacccaaagaacacgtgagttttcttctcttccgctttgatactttttgctgaagtagcttacagtgatattttctacatgtatgtgttctgtaggccttggtcttaccacaatggtgggtcatggccaacacttctctggcaagtaagtatgagcttttaatcagacgacacatatatctgtcttccattaattcacatatgtatttaaatttttgttagttcacactagcatgcatcaagatgggtagaccagagttagcagagaaagcagtaaccttggcagagaagaggctccaagctgatcgatggccagagtactacgatacaagagacgggaagttcattggaaaacagtccaggctttaccagacatggacaattgctggtttcttaacttcaaaacagctattgcagaatcctgaaatagcatcatccttgttctgggaagaagatcttgagcttctagagtcttgcgtctgcgttctcaccaaatcaggccggaagaaatgttcacgagccgcagcaaagtctcagattcttatataaattggttttgtccagaaaatagacataggataacaacttcctgttgcaacaaatgtgttatacaggttaaccaaattaatagtgcaacaacatctgtatatatatactatatagtagttcttttctacaaattatgtcatatctctgacttacttccctaaccagatgaaacataactaaaaatcaaatttattattattactaacttgaaaaccaagcaagagtgagtacttagtgctgcacttaatctccctaatgggcatggctaatgataatccaacgagaaataagcagagtttagcaggattcttaaaccatgtcatcagtttcaacagaaatctgcaattaaaacttaaataaactcctcttagagctttgttttcagcgagttggagaaagcttactctcatgagtatttccctcgaacactttgcaagcagattctgccaccattttttttcttaccaaacaactaaaaaggtatttgacaccataatatactcgtcttcgagatcttcttgtatgcatgaaccgcttcctccgcttcagcaggaaactgaatagcattccacaaaactgaatcccatacaggaattttgacaaacactttgcgagcgtataaaaagttcttattttctcaaaatagtgggttaatgggctaggcccattcataaatctaataattgagagaattattgatttatttcccacaggaacgacaccgtatcgcatccttatttaagaaaaacccaaacggccaaatccaggttttggctcagacgaccagaggaagagcaccgacgatggcgtggacacgattgattcagagcgcgagagcagctctagggacagcgcaatcgtgctcgactcttggcctccctagattccactcctccaaaccagccacttatttcggtgcgtgctctctattcatttggatttgcctcttcctatgtatctctagtgctttccgagaaataaagatgggaaatttgcgtgtatctctagtctctatgaagtttcagtgatctggaggtttttatgagtaaagcttaggctttgattgcttggattatatcaggagaacttagtaggtttcgtttggttttcagtgcttagagctttagcagtacctg

SEQ ID NO: 30791 - DNA, 2504 bp, Arabidopsis thaliana landsberg
aattcatgtgtgcaggctgtaggctcccaaggagatacccaccttgctcgggtattcagaccagtagcctttgtggaattcgctcaggatagatgttgaacttgttagtcgcatccgtggaatactcttctgtcttgtaacggtatatctcattgatcttttttatgtccacccagtagtattctctgatatgaaaggacagagcacttaatctattgttaatggctcttacaagatccttagagctatcattaacagaaagcatctcacgggagcatcttagtgctgagtagaataacgactgcaatgaatccaaagaggaaatcatgaatcagtctcataaaaagatatatatcaacgctataaacagaaaatgagacaaaagagttggtacttggatttcgagagggtggccatggatacccatacgacgatcaatcatacaagaaccatcagtgaccaaaagtgttggaaacatatcaaacccatctgctaaacacaggtttgcaatcatctttatccctgtctgcacatctatcctctcttgaagcgagtaatctcctgtgattttcccgtatgccctcaacaagattatccaccataaacctgaaaattttctatttagaccagcatgtgtgaattaaactgttcaattatatgttccaagctgaaagaatcaacaattatgtatgacaatgaatcaacaattcaatcttttcttactctatttatggaaaatgcagattgaagaagcagaaaagtactgaccagaatcaacgggagcaacacgacctatagctgcttcgccaaaatctggatccagaacctcttcgaacttgtcctcttcaagcggtaaagttctgactttgaaactcgcaggcattaacccttgtcctggactataacaatcaactgttttctcccaactctggaaccacaacacagacaacaacactaattttcatatctttgattttacttaaatgtttaacttgcagtaaaaaaaattcttagttatcctttcattcaaatgcaaactctttgcttttaaacaacattttgtgttcgtttcagtgtataacatcgcgaatgggcatcaatacctgcaactgcaacgtgtggagaaggaagtttcgaacaatttcgctttctcccttcaggagaaaagccaaagccgaaggtacaaaatccctaataaagacctgatcgtagtttgatggcgttgtgtcagttggatctttagcagccaccgttcctacaggagaatcgcagtatgtcactattgaatccctcagcaatctccatgcctcttcctcgacgtcattacacttaacaccctcgaaaccatctctctttacgcctttttcatcttcattgaccgcctcttcatctttctcatctctttttaacctctcgacaactaaaggtttcacatttaagccgttcttggtgtaaatctgatccaaggtcgtgtcatttgcgcatgtggtggaagcagagtgacttcttgcctcagaaacaacctgagctgtaacagagctctgcctgtcggtacaaaatggcacagcatttgtcggtctgatgattctatctgaatctgcattcctgtattggttgatgcagcttgagaaccgagaaggataggatcgaaacgaggtgtctcggatgtatttagatggagagattcttgtaaacgctcggagaatacattgtgaaggtatcatcgttgaatttccaagaaaagtgatggcattcataatcagggtccaagacctaagattgcaaaaggctttcttgtgttcgttatttatctgaaaattttgtgataccagaaatgggaaaatctgtattaggaagaaaatgtttgtggattatggaactagtttaccactaatttgatcgcatcaagcattatggtttctattaatacaccaaaacttcattttcgaaaattcctatttctgtacaagtttataattttaatcaagtatttatacatcgtatgtgtaactttatatgcaacgtagtgtccgacacgtggcagagatctaacggatagcaagcatcgtctttcacggattattacggcgttttggtcaaaagacgagagaacacggcttcggtttttgtctttatctactccgaaccaaaatccgaacgtggggagaccacttgtaaaagccacgtgagcgtccgaacctaaaatgagctttacatttgcatctttctctttgtctctttttcccatccacacatgtcccttaatcacaagcttaacttaccaaaatccaataaataaactaaattaatacgtattatacgtttataacattttgttaccaaataacaataatgatgcacatgttcttcttatattatagtttgaaacatgaaaatgtatcacatataactatgtgcattactatttacttaaaatcaaatgcttttgcacgtcctagttgtgtttgccgaggattttggagggaaagtttgattttttgaag

SEQ ID NO: 30792 - DNA, 908 bp, Arabidopsis thaliana landsberg
ccttacgactatttcgtttagttagatatgtttttactctttacgcaatgtatatgtataataatactaaagaagattagtactaaaatattactggtaaagaagagataggccataaataggtgaggtggcaaagaggtggggtggtgcagttttgttgatctcaaggcattgtgtttccctattttcctttgtactctttctcctctcttaaatcgccactccattattttaaatttcttatcttgataaaacacacacacacacaagtattagaagaacttaaaccctcttatgttctcttcctaagcttgagtttaattcaagcaagaaacagatttcgagagaagagtaagcacagagatagagagaaagaaggcaccaaaccctaaatgggtctaaacccaagattttaatcttcttttcgtattttgaggcaaatgccaacactatcattcccttcttcctctataaagaatcatcacttcttcttcttctcaatggatccttgggatacttataacataccactagaccaccaacaccgtctccgtaaccgccgtgaccaccgtcatccttccttctcctctactctcctcgaccaaatttaccgctccatcgacgattcctctactaactcctcatccatgagaaaaaccaaacatcagaaccgcgaggacacgcgtgtttctgctaaccgccgcgacgatttcaacagatccaagaatcttaaaaccatagaacctgttttcttcaaacattcaagctcaagctcctctgactcaagcggattctcgtcttccgagtctgattatttctacagacgatctaaatcctcgccggcgatttctcatcctaaaccgatacgaaccaccgtggaacgattcgaaagatctcctcagaatcac

SEQ ID NO: 30793 - DNA, 3501 bp, Arabidopsis thaliana landsberg
atagttgaatagattacagataagagcctaccttttggccaattttttatagattaacaaatcatatagtatttaagttataaactctctgtctctgagtgcgttttctactttaagcatgtgcacaccaaaccaacaacctgcgaatcacatattaacacgtgggtaaaaatagctgcattactaaagccaatctgatctttgtccaaacacagaccatcatcactcatttcctacagaactcagcacaattctttcaaattctctttctaatcttcaatggaatcagaaaccctaaccgccaaggctaccatcacgaccacgaccctaccgagtcacgacgagaccaagacagaatcaacagagttcgagaaaaatcaaaaacggtatcaagacctcatctccacgtttcctcacgagaaaggctggagaccgaaagagcccctgatcgagtatggtggttactggtggctaccgtctctcctcgaaggttgtattcacgcgcaagagttctttcaagcacgacccagtgacttcctcgtctgtagctacccaaagacaggcaccacttggctcaaagccctgactttcgccatcgcaaatcgttcccgcttcgatgattcctccaaccctctcctgaaacgtaaccctcacgagtttgttccttacattgagatagatttccctttcttccctgaagttgatgttctcaaagacaaagggaacactctgttttcgactcatatcccatacgagttattatctgattcggttgtgaaatccggttgtaagatggtttacatatggagagaaccaaaggacactttcatctccatgtggactttccttcacaaggaaaggacagagcttggacctgtcagcaatcttgaggagtcttttgatatgttctgtcgtggtctgtctgggtatggtccttatcttaatcatatcctggcgtattggaaagcataccaagagaatccagataggatcttgttcctcaagtacgagacgatgagagctgatcctttaccgtacgtgaagagtctggctgagtttatgggtcatggattcacagccgaggaagaggagaaaggtgttgttgagaaagtggtgaatctttgcagcttcgagacgttgaagaatcttgaagctaacaaaggggagaaaggcagagaggatcgtcctggtgtttacgcgaatagcgcgtatttcaggaaaggaaaggtgggagattggtcgaactatctgactccggagatggctgctcgtatagatgggttaatggaagagaaatttaagggcaccggcttgcttgaacatggtaaatgaatgactaactcttgttccgagcaatgactgatctttatatgctttgtttacaacataagtttgcttcttatgttagtatggctccaaaatgtattaagttatatagtggaagaataaatgttgcttgtgtttctatccaaatgcattggttctataaacggaattggctttgcaatgcctttgtttaacatcattcatctttgcctaatgtatgcagagtcaactcctttgattctctttttcttctgtgattaaatccaatgttttcggataggtattaaatcaagcatttaggatcataaatcgaaatatctttctcttgttgtaaataagatgatacagacaataatgagaatacagaaccaaacagagcaaaacagagcatcctctgtttcgccgcaccaaataacagaaggaccagaataaaacacattcagttatcatgttgaagcaagccagtatctttgaatttctcctccactaagccatcaatacgagcagccatctcaggagtcaaataattagcccaatctccaacctttcctttcctaaaatacgcgctattcgcataaacagcaggacgatcctctctttctttattacctttgttagcttcaagattcttcaacgtctcaaagctacaaagcttcaccactttctcagcaacaccattctcctcttcctcatcagtgaatccataacccatgaactcagccaatctcttcacaaaaggcaaaggattggccctcatggtctcgtacctaaggaacaaaatcctatctggattctcttggtaagctttccaataacccaaaacatgatccagataaggaccatacacagataaacctttacaaaacatatcaaagctgtcctcaagactcgctaattgaccttcttgagacttctccttgtgtaagaaagtccacatggagatgaaagtatctttcgggtctctccatatgtacaccatcttacaaccagagttcacaatcgaatcgggtaataacccgtttgggatatgagtagagaaaagtgggttctttctgtcttgaagaacatcaacggtggggtaaaacgcgaagtcgatctcaacgtaagggacaaactcgtgagggtttcgtttgaggagtgggtttgcggcgtcgtcgtaacgagaacgattgacgattgcgtaagttagtgctttgagccaagttgtaccggtttttgggtagctacagacgaggaaatcagttggtcgtgcttcgaaatggtctttagcgtgaaaaagaccttcgaggagacattcttgccaccagtgtccaccgtattgggttaagatctcatctggtctccagcctttgctctttggaagtgtagcgatgaaatcttgatacttcttctgggttttctcgaactctgtgagttcgacgacttcggatccgttttgggttgtctttgattccattgcggatgagatcgagtgaagggagtcaaagaggatgaatcgggaaggtttgttagagttgtggaagatgggattgagattcttgagagatgagaaaatgggttttataataggaagaaagatttaggtaggtgatgatgatggctcgataagggtcgcatcagttgaataaaccaatgtaaaattattgaatttagttggtaaaattgaatttcatttttattagcaagttatattgaaaactctatataacactaggaagtagattttagatttatttacaagactttaacaaaaaaaaaaaaattaaggtaagcaagtgattgtatgaaaaaaaatttgtaagtagagaagaagtggttgttggtactaaaaaaatcacgttttagaaatggaagttagcaggtagagagaggcttggttggtttggctacgttattgtgttcggtccacgtttatctctaggccgttgctgaatttccctgcagcttccaagccccttgtacactttatttactaattagaaaaggctccacttctttgccaaaacaaaaaagaaagaaaaggctcctatctattatggaatgtcagaggcctatgcagtcctgtccattagaaaagcccatatatgtctacatgtaaccccttcgtggaaataattttaggagtgtgcaatttacacattgcatagcaaaaaatattattacatcaaacatata

SEQ ID NO: 30794 - DNA, 1278 bp, Arabidopsis thaliana landsberg
ccaatgttcacatgagcatcgacagtgtcaatcatgggtgtgtccgaatcatctaaatctgcaaccttgttggtagaatcatcagaaggatcagtagaagcagcttgttggctactaccagctggatccttgctaaaagttcttggtatctttgctctatgatcacaatctccatctgacgtagcaggcctttccctgttatcaatcacaaataaaccatgctttagaacaaaggggacacaagagaaactataacctaagcaaaaaagagaataataactaacacttgcctactactaatgcttgaatctgcaattcgcacagagctgtgtctgtttgaaaacaaaacaccgcgaagaacctttccatcaatgatcgtttctatagtgtaacctagaggggcgttttcagtaaccctggcttgaaacatcggttttctttgatcaatatagccaatgttcaaagggacattctctcttcctacaataacaccatatacaataaatgctatattttttgttcccaagataatgtcgattaaagtaagagttcatgttagcacaccatggtcaatgttggttttggccacagttaattcctgcccttggcattttagcttcatttgtttccttagagacgatctccctggattttgatgaaaccggacatcgtatctaccttctattctccataagcaaagaagattaggagaataattagcaaccttgcacaaaagcaaatttgctataaccaaatacagaatattagctacagtactgaagaatcagagaaaacccgataggtcctaacaaacctgtctgtaagtagaacatgtcatccaacgcctcgagattcttattgcagccaccaacaatgacaagaaaaccagctttgtgaggatctagacaagcccctgcagaagagaacctagcagatggtccttctcccatggtgagaaccttggaccatatacacgtatctacaggtacaaacaacaacaaaacaaaaaacaatgagaatatgcgtaattacaaagaaaccaatattatgacactaatacactttagaaagccttttacaggtttccttctcatggaaattggatacaatggttcatcttaaaacctttaaccaagcagattttgtttggacaagaaattaggaccaaagcctatctaccacataagtcataagtattatatatggctattaaatgatgattcagttacataccgacatcaagcacatagagatcatcgtaaagattctgagcatccg

SEQ ID NO: 30795 - DNA, 1447 bp, Arabidopsis thaliana landsberg
aaaaattccgatagagacacgagccatgtcgatcgattcattaacacagtccctgtctgtagactcgatccttgggagttaccttgtaagtcattcatatcaccgagtgtcgtccttctcactgttcaatcgaatcatccgctactttctgattttagcgttttctcgttttggtatggtaggccagtcaaggatcaaactgaaagatgtggcttggtgtttcttcagacctaaggagaacaaatatggcagaggtgatcagcagatgagaaaaacgaaatctgggttttggaagagtactggcagaccaaagcctatcatgcgtaatcgccaacagatcggtgagaaaaagattttgatgttttacacgagtaaggaatccaaatccgattgggttatacacgagtaccacggtttctctcataaccaggtactctctgttttttttttgtgttacttactattgctgcgattctgagtttttttatcgaatttttgcagatgatgatgacatacacactctgtaaagttatgtttaatggtggcatgagagagaagtcttcctcttctcagtcttcttctggtgttagtggaattgagcagagtcgtcgtgactctttaatccctcagcttgtcagcaattctgaggtgggttcatctcaaaacttcttttctgttttaaatctgacaacgacttcttttgcgttctccccctttttcagggatcctcacttcacagagaagatccaagtcagtttggtgatgtgctgcaagaagctccaatcgaggatgctaaactgaccgaggaattggtaaaatggctgatgaatgatgaggatgatgctcaaatcgaggatgctataccgattgaggaatgggaaacatggttgaatgatattgatgatgctaaggagaagagtatcatgtttatgcatgataatcgaagtgattacagacctccaaactcattaactggtgtcttcagtgatgatgttagcagtgatgataatgattctgatttgctaactccaaaaacagtaagcaaatttctacttttgtacctttataatcctctgttttcgtatttcaccttacaaagctcaagtttttgtttcattcatttgacagaactctattcaaacttcgagcacttgtgatagttttggtagctcaaatcatcgcatagaccagatcaaagacctgcaagaatctcctacctcaacaatcaacttagtgtcactaactcaagaggtgagctttcttatctctctatctttcactgaggcaaacaatccttaatgctactttgtgccatcactactaacaacacaaacaatcaatgatgctactttgtgccaacactcattacaacgactttgtttctttgttatgattcaaggtgagccaagctctaataacccagtatttgataccgccgagaagaaga

SEQ ID NO: 30796 - DNA, 2177 bp, Arabidopsis thaliana landsberg
  unsure (1)..(2177): unsure at all n locations
gtgaaaaagttgaaatgtaatttattgtgcgatctatagatatatatataaatggataagaaagctcgagaaattttgcagttaaattatcaaaagcgcttctgaatcgctgaagcagaaggtgcatttcattctgttcgcctccatagaaagcaatagattcagcattttccctcactcgtacaaggctgtaacgaaagtcagcctctttcttctcttgtagaaagttgagattcactagtccctgaacacaagagggaatgttaatgcaacaaagccaaaatctgaagcggaacagaatagagacaatcacactgcttaacgaggcattgttgtaccttgccaagaaagacactgatggctgtaccgccaaaggagtagagcaagagaacgagaaagagaggaggataaatggtgaagaggatgttgctaaaagagatgagatcaatggtggcattaacaagcgtcaaagagaaagacaaggcagttccagtgaaggaactcaaatcgtcaacaaggcgctgatcaggattgtcgatgatagactgagactggatcttgtaaaaggtttgatctttgagatagcgctgcaggtaatatttggtcatccatgatctccatctcagtgataaagtctcttttgtataatctcgtagcacaaagaactgcaaaatccagggaaagtgaacaacatcattcattgagattggatacagagggaggagcgtgaggaaaactcaccggaatgccgccggcgaaagcacagaggtaatagaacaactgcttggtgaattgctcttggtctttgtctattgaacacagagaaaagaggatcaacagagcaagttgtttttgaaaagtgagaaatgagagagagagttgaagaattcgtactggcgagagaattgtagaaatcacggccgaggaaattgaagccgacgctaatgccggtggtggcgagagtaagggcgaagacggcggcgagacgaagcctggcttggtctttgtcctcggaaaaccaataaggcgacgcgactttgtagaatttcttccacagagtcttcaactccgatgccttatccggacgaaccgacggttgcggcaacaaagaagaacatgatacggttctgaaacgtggatttttcttccgatgaaagtttccgatcgatgattcatggcgaagcaaagaagaatggcgtaggagaaggtgaggaggacaaacgggagctgttatcatcaaaatcatcctccgtcgtcttcttactaatcccacatagccatagcaacttgagggagcaagagggaacacttataactaaagctcaaccattcatttctttgccagataaataatacaaagggaaagagaagataatgacaacgagaacgtagccatttctgttgattggtagcttttacaacagagattatacagagaaagaagggctaaaaagattcaatttttaacgaatcaatgaggagtgagtctcggctttgggaaatctgagttcctcaataaattacccaattagtctatctccttttattcatgcaatagccccttttcaggctttaagttctacacctatgaaagagcatcaaatcaaacatcacgctgctgagactctttgcttttcagatttccattctttcttctcacaacctggagttgttgcctaacaatcttctttttaactcccnnnnnnnnnnnnnnnnnnnnnnnnccgtattcacaacttgatcctcctaaccctgttcaaatagtagacaaaaacttatctttaaacattttttattaagtgcatcaacctcatcaactttctctcaagttttagtcttacttggctccgtggatcagaagagctagatccttggtcattttgccagactccaccgtccccatgcaagctgcttctagtttctcagtatagctcaagagtgcggcattgctgtccagctttgccctggtaccatcacataccaaacatcttgttaagatgaactcaaccagttttcagagactttaaactcaatttatgccaaaggtaaaacggttcacatagttcagtgatcaattataaagagacangtaatgacaaatcttaccacaaacaatccctgatagactaactcattattgaagcaagggactggattttctccagagtagcaacacg

SEQ ID NO: 30797 - DNA, 1852 bp, Arabidopsis thaliana landsberg
aggctctattctgaagtgcgtctgttgaaatcattgaagcacaataatattattaggttctataattcatggatcgatgataagaacaagactgttaacataataactgagctattcacttcagggagcctccggcagtatgtatctctcttcctttttttttctttccctttcttcttattgaggagatcactgttatggagttgtgtttaaagcagcgaaatctttggtttcttgaaggtaccgcaagaaacacaggaaggtgaacatgaaggccgtcaagaattgggcgaggcagattttaatgggtttgagatatcttcacggtcaagagccaccaattatacatcgggatctcaaatgcgacaacatttttatcaatggaaaccatggagaagtgaaaataggagatcttggtctagccactgtcatggagcaagctaatgccaaaagtgtgattggtatgagcaatgctttttcttttatatagtttacaaattcgtttttctttggtttttttagaatctaaattgatagtgttatgttataaccaacaggaacaccggagtttatggcgcctgagctttacgatgagaactacaacgagctcgctgatatatattcgttcgggatgtgtatgttggaaatggtgacttttgaatatccttattgtgagtgtagaaactctgctcaaatctacaagaaagtttcatcggtaagttcgatattttcaaattgtttctaccattggttttatgatatcgaacaatatatgataatatgaatggataacttacttggtgagtctttttttgtattctttacttaggggatcaaaccagcttcactatcaaaggttaaagatccagaggtaatgaaatttatcgagaaatgtttattgccagcttccgaaaggttatcggcagaggagcttttattggattcttttctcaatgtgaacggtttagttatgaacaatccattaccgcttcccgacattgtaatgccgaaagaaggatcattcggtgaacgttgtcttatgtctgaaggaccacctaatgctcggaatagaacgatgtcaatgaatcttgacgaagacaataaccttcctattgttatttcaagcaacaattcaggaacaaagtgtattgaggttagacgggcaaagcgaggaaacttttttgtccttaaaggtgaagagaatgatgagaactctgtctcattaattcttcgtatagtcgatgaaaatggtaagagtcttttgcgtttatattttacaaaacatttcaccgaaaatgttagatgcatatacaatcagccaaaaattgcgtttggaaaattgcatattataccaaacttgattagttttgtcttctttttggcgtgtagggcgtgtgaggaacattcattttctattctttcaagaaggtgacactgcttctaatgtatctagtgagatggttgaacagcttgaattgacggataaaaacgtaaagtttatagcggaattgattgacgtgttactcgtcaatttgataccgaattggaaaaccgatgtagctgtcgatcatctaattcatccgcaacagaaccagagctccaaggataatcatcaaaacggtgcaagttctcaagctggtgaatccattagccactctttgtcctctgattattgcccacgatccgatgatgaggcaaacccgaccgtagctgcaacaacagaagatcaagaagcagagaaaccaggaagcttggaggaagaagaagaagatgagaggttaaaagaggagctagaaaagatagaagaacggttcagagaagagatgaaagagataacgaggaaaagagaggt

SEQ ID NO: 30798 - DNA, 1136 bp, Arabidopsis thaliana landsberg
taggcccctaaagttccctaaaaagattgagtttttattttggccctgttcggctcaaatttgttgtgacagctttaagcgaccagaattttaacatcaacagaagtaaaagaaatggaggataataaaaaaggagtagctgcgatcatttccacgggtatcgctggaaaaatgagcgatagttggaatggtgaaaaggagtcgatgcgactgttttaatggtgttacgtgtgttactcaccacagccacgtgtctcaagttagttataaatctggatcgctgatcgttgtcgcaacgacaatgaaaagaacatggcattcatctagcaacgacccacacgacataaagatctctaatcaagacattcatgaagtaattgtatgaacatgaaataatctcaaaaagcaataatgaacagagagttcaatatctatgagctcggtggaagattcaacaagcgatctgaaacaagatccatacctgcataatttgatgatcaattctacaccagtactatttagttttgtaacacgccacttgttgaagctattttaagaactgcaaccaaataacacagtccatgatcacatctctatttctctaactgcaaactacatacagtaaatacactactgaagcgaaaagtgaagttgtaggtttcacactgagatgaacaagctacaagttgcagttgctatataaagcattcatagtccaatatcgaaataatattgaaacacttaactctttaaaactgataagtatagatatgactaggaaaaagtaaggcaaagttcaaatttaccattggtgttttccatgtcactttacatgcacctagttttttctgcaacacattgcaccacaacttcttataaggttctattcttagttttgcaaggtttttcacctagcgtttttaaggcaacacactacatcacaacaacaattttgatctgcaccaaatatcacacaacttaacatttactggtaatcgtaagtcaactgctcccctttgtttatcacatccaagcaatatatttacaaaaaaagctatggatcaaaatttattactattaaagatggcagttgtaatgccccgtacgtggactatagacgggaaagcctaatccga

SEQ ID NO: 30799 - DNA, 4579 bp, Arabidopsis thaliana landsberg
  unsure (1)..(4579): unsure at all n locations
aaatcagttagaccaagctgctctagtagatcttcttataccaaacatgggatactctgaaacgctttacgaagttgaaagcgtttagagaatgatcgaacagtttgtttcgtcaaccgaacaagcaggcatcgtcccttctccttgcatcatcgaagaaggacatttggtgaaggatggagctgatttgctaactccaacaacgttagtggcaactcttgttgacggttatcttgctgaggaggcacccgatgtgaacctgaagctggcgaagttcgaagccattgctgctgcaatccctgactatgcaaggccactagatgatggagtttatcacgcaattgacgtgtacctgaaggtaataaagatactgtttctaattttaaccagtccatgtattaagattttgatgctggattgcaaattttgcaggcgcatccgtggattactgattcagagagagagcacatatgcagacttatgaattgccagaagctctcattggaagctagcacgcacgcggctcagaacgagaggctgcctcttagggtgattgttcaggttctcttcttcgaacagcttaggctcaggacatctgtatcaggctggttctttgtctctgagaatctagacaaccccgataaccaacatggcgctaatggcggtttacttaaacccagaggtgagaatgtaagagaacgcgtttctgagctggaaaaggagtgtatgaacatgaaacaagagctgcataagctggtgaggacgaagagaagctggaagaatttcaccaggaagcttaacttcaagaagaaatcagaatgctgcaagccaaaggatcaagcaacaccagcaatttgaagcaaaatcctctgttttaaggcagagctattagtattatcttcccgtttagattagctttgtttttctggttcttgatgctactctgttttcaaaagttttcaaactttctcttagtatctcgctaagagttttgatgcttttaagataaaaacaagagctcttttcagagaacattaatttcatttcttatacaatttcggggtgtattgtgttgtgcagccccataggaaacaatctcagacacaaatcaacagaagggaaatacaatcaacaaagaatatcatcagcgaaacttaacaaataaggacgaagaatcagagtagtattcccatcttagattcttaacaagacggatagtctttaggcggtggtagaacggaaagctcaggtgtttccccgttctcgacgacgaaagccatcttcaaaccccacattgtatggacttccaagtgacagtgcataaaccaaacacctgcaacaacacatgcattgatcagttgatctacttatcacatatggtcatcatcataatcatatatgtgcattgagagattgatttatacctggattatcagccctgaatctgatggcagcccaaccaccggtaggtactccaacggtgtttctctcaggcgggtcaacgagattgaacttagcaggatctttcttgggatcaaagtttccaacaccggttccaacgacaaagaaattgtagccatgaagatggaaagggtgtgactcaactggttaggagattggtgtcttgcaagacgagctcaattgtagtattgaacttaactcggctaagtcttgtccccgttgatgttccaaggttagccgtgagnnnnnnnnnnnnnnnnnnnnnnnnnnnngggggtcggtctgggaaatcagtcctgaaaacacccgagatgttggagtaatgtgctttcaagagtgcagttttgggcataatgaatgtgatattgtttatagaagctgcaagatttgtcccgttcacacaagtcgggcacgcgttaatccctagcccgattgtgtaaaacaatcgcctgtcgacttttaatggaacaagcgccggaaaatttggtgtgttgaggctcttgagctttccgttatagtccaaagcaaatgatgtgtcgttaggcaaaggaagttttggtaagattggtaagaccgtgtttggtacgcctttgtattgaagaatcgcggttacggttttgttgtctacggatacaggagcgtccataaacggactagctgccatgaagtagcggtttggtgagcggtcagttttgactagaacattagtggtttgacctggtcctagtaaaatggctttggttgtgaatggtttagtgtagaccgcatcgatttccaccaccgtcatgttgtgtcccgcaatcccgaagaatagctcgtcgtttaaagctgcgttgataatccttagaagatatgttttacccgcttcggcctctataacgaacgtgtctgaaaatatatatacgaaaaaatggttaatgatatccgagaatccggtccgatccgataacatacggtttaaaaaggtttagaacttttacgtttctcggaacatggaaatagcggtccaggttttccgttaatggtatgagcatctgacatcggaggtggtgcacccaattggttggcttggttaaccgcagtctcaacgtctttgttccaccattctcctacagtcaaataaaaaaccaaggcaatgaaaaaaagaaaaaattaaggatgggaccaaaccgaccggttttgttttattttcactaaccgaggattatgttagattcttggtatggctgtgggaatggatacggttttcccggtgcaggcaagataacaatagctccgtagacggtggctcgtagccagaggatgtgtgcgtgccaccagagggtcccgcgttgtccggtcacattgaaatcataaaggtaactctgtcctgtttggatcggacactgagttatgtatgctggaccatctgcccaaccgttccggtactgtttaagcccatgcctgttaaacaaaccgttatattttggttcagaaagaatgattaaaccggttgagccggtttaagacataggaaatagatgctttaccaatggatggacatgttgtattgtacatggttggttacgttgatgatgactcgatcaccttctcttgcgtaaaccgtcggtccagggaacattccattaaccgtgacaatcggtttagcattgcatatccggcttatgttcttcacttgaacctgttccaaatttcaaacgttaatacaacaaacctacatattttgggtttacataaaccggtttagttaaaccagtataatttgtattccgagttatcgaacacctacatcgaattggtacttcttcaccgccgcatccaccggagaatagccaagaaacgcaagaagataacagaatagaaagagaaaacccatctttatctccggttcaattttccggtttgatgcaatgatgagattttatttgtacttaatcttctattgcttttggttatacaaaatgttgtgaagaaatagtcgctggttacaaatgcttatatagagccatcatgaaaagaaaaggttggtgaatcactcaggatatgaaaataataatgtaaaaacacacataaaataacattattaagaaaagcttagagaaatatagaatcgaagaagaaggcttgtaagcaactttctgaaagacgttggcgaatcagcgtaacgtttgttaatattatggagtaccttcgaagttgatatctgagctttctatttatgtttttgacttttcgttaacaatgaaaaataataatttcggtgtatagttatgttatcatcacaaaagccctataaatcaaagatgaaactattcttataatatttctttttataccaaagaccctcaagttcgaatgaatcaatctattttcatattttttttctttcatataaccgatcgaattatgtatttcgagaactcaattagtatcagttaatatttctattttattttttatttctgaaaacttgctttgcagtaacatgttgcttagccattcgtttagtctgtaaatttattttctttttgagattatttggttccaattatatagtgatgttttggcgtaacggaaaatgactgctctttttgaccattttttttttgttttcggccaacgagatcatatgtataattttctaaattaaattctcaacaaatgtattttaatttacaggtacgaaaagtttggtcaaattatttaaaatttacgctgttgattagtcaaaatcataaacgttggatcataggatcaaacactttgagtccaaaagcccataacgaaaagcccatattttatcatttacaatgttttgtcgcgtataatcatattataactttttataatattttactttgtaagatcatcatttgttgtaaatgagtggttaagaatctactagaaagagaaatgtcaaaaaaaaaaaaaaaaaaaatccacaagtttttggaacttttgattgtttgttattgggtgatagttactattctatgtttcatcttggtttcaatagctaatttagatatgaaccaggggacccaacacattgctttggccaaaacgaaacgagtcgtattaacgtgtcttaggacataagtaatctaggcagttcccc

SEQ ID NO: 30800 - DNA, 3918 bp, Arabidopsis thaliana landsberg
tgaagatattttcgtgaactctaactgaaatgaaagccaaataaatctcatcaagagattcaatggttgtttaacaatatacaattgaaaccaagtaagagcaatcccagcaattaatcaacgcagaaaactttgttagtaccaaacaagtatacacgtactgcaagtcattggcacggcgagatgtcttcctctcaacatttctgacagacaacggctcatcccctaaagaaaactgcttaatctcaactctctgcacataatcaggctttttcaagtcatcaatcacaggctgtaacaaaccaacgagccaattctcaatacccgctctatacactttccagagcttccctaacaccatgttgacccactccacggactctttcctttgcaaatccttctctaggaacaaagagaagctggtgggaacctgtggccatggccctactcctcgttggtttccatctccacctgtttctctttgcctctttctccaagtccatagcttatcaaaagcaacaccaacgaaaaagaagaagacgaatagactaattacactacgattaatggtcggtgacggaagtggatggattacacctaactgggtcctaagcttatccactatcggatcttccctaaagttactgaaattggcttggtcattggactctttcgaactaccctcttcttcaaattcattcgtaaacctagcaattacaaacctatttgcagcctttctactagaatccgtcaatcttaggtttttcgaattcccacgaaatccacaggaaataaacctaaagttcgaaattttgacgctcggacgcagaacccgactccttgtaaaaaaaaccgcgcggagctcattagagcatggacagagcagagtgcaagacacatcaacaggtaatcggaaatcaaaattcgaagaagaagtttgtggaatcatctatgaatcgtatccgaagaagaaggagaaaaataacgcatatctttagggcaataacagtttctccaatggctcgtagcaaaatctgtagaagctaacaaagttagaaaaattgcagaagaagaagttcattttcttctcttcttacttctgtttttttctctggactgtttgacacgtggatcgaaccctcgtctccccctctacggctattaaaaaaaatatataaaaactaaaccgactgatattcagagtcagttcgattcgattgaatgggaattttggtttaatgtcggttcggttcggttcctttaaaatctgaaaactggaaaattcgaattgaagtattaaccaccccctctctctctcttttgcttacttctcaattcacatgattgagctcaaaacctttcttgatcttccattacactttcttcatctcaagcagatccattgcttactcctcacttctccgatcttctacactcgtcgccatctctttctctcacgtcttctccgtcgctgctgcaccgccgctactcaattccgctacgctcgtcgtttattatgtcaaatccaaactccgagcattcaactatgggattcgctcattggtcacttctccggcgaccgtcggttatcatttcttgcttatcttcatatgcggcgaaatggcgtcgtccctagccgccacacgtttcctccgcttctcaaaggggttttcaaactgagagactcgaatctgtttcagtttcatgctcatatcgttaaattcgggttggattcggatctttttgtgaggaattcgttaatttcgggttattctagttctgggttattcgattttgcaagttgtctttttgatggaactgaagacaaggacgtggtttcttggactgcgatgattgatgggtttctgagaaacggttctgtttcagaagcaatggtgtatttcgtggagatgaaaaagactggagtcgcggctaacgaaatgaccgttgttagcgtcttgaaagctgcagggaaggctgaagatgttcgatttgggagaagcgttcatgggttttacttagaaacagggagagtgaaatgcgatgtgttcataggaagttctctagtagatatgtatgggaaatgtggttgttatgatgatgcccagaaagtgttcgatgaaatgcttagtagaaacgtggttacttggaccgcattgattgctggatacgtgcaaagccgttgcttcgataaagggatgttggttttcgatgagatgttaaagagtgatgttgcacctaatgagaagactctaagcagtgttcttgcggcatgtgctcacgtaggggcacttcaccgaggaagacgggtgcactgttatatgattaagaattcgattgagataaacactacagttggaactacattgattgatctttatgccaagtgcgggtgtttagaggaagctgtacttgtttttgagagacttcatgagaaaaatgtgtatacttggaccgcgatgattaatggatttgcagcacacggatatgctagaggtgcatttgatctcttttataccatgttgagtagtcatgtttcaccaaatgaagttactttcatggctgttttaggtgcctgcgctcatggaggtcttgtggaagagggtcgaaggcttttcctgagcatgaaggaacgtttcaatatggagccaaaagcggatcactatgcgtgtatggttgatttatttggaagaaaaggtttgctagaagaggcgaaagctttgatagaaaggatgccaatggagccaacaaatgtggtatggggagctctgttcgggtcttgtttgttacacaaagactatgagttaggtaaatacgcagcctcccgtgtgatcaagctgcaacctagtcatagtgggagatacactctcttggctaatttgtactcggaatcccaaaactgggatgaagtcgctcgggtaagaaagcaaatgaaagatcaacaggtggtgaaatcgccaggatgtagctggatcgaagtgaaaggcaagcttcgtgaattcatagctttcgatgataagaaaccccttgaatctgatgatttgtacaagactctcgacactgttggggtgcaaatgagattgccagatgaattggaagatgtgactgctgaatcatgacttgggacgtttaccattttcctcataagccttctctgaaactatccataaccttcaaattatatcctcctttagtcttcaacctctcggctaatttctctgttatctcgagatgcaatactacaggcttcttcttctcttctgaatatctacaagaaaatctcttgtttgcaactttaacatctgaagttgtgtgttcttgattcccacatctggacttgagtgcttcaatggcgatttctggagggatcttagggtttctggcgagctgtttgcacgtctccattgttagtttcttgtagttgagacatcgacatatctctgttcgatcttggggtgttagattcggatgagactgtacaataacaaaacaacaaaaattataaaggaatcaatcatacactgacataataatcattatttctacaatttttgaaaatgatgaactattgttaattccagtaaaacatgtgaatagaaaagtacatgaataattgttagtcttttacatgtatttcaagtgtaactgatagtaccttaccagaattattcctttttaagatatttttactaatagtattacagagaaaaacatgaagaaacatacagtcaagactgttgtggccttgtgggtctgacatgaaccccacggcagtaacaagacagagtgaagaatctaaaggatgactccaaatcttcttaatcatatagtatatacatccatgtgtgtatattattaatacacattaatctcaaaaaacttctaatcatttctttgatacatttcggttatatatta

SEQ ID NO: 30801 - DNA, 4779 bp, Arabidopsis thaliana landsberg
aagacgaggttagttctttcgtcgaacacttggtgtgcactactttcgacttcatatacttgttcgaacattcagggggtatggattctttaacttcactttagtactttacgaatcaattaagatgggtctgagtttgaatgtctttgcatcgaaatgaatcggtgatgatgtagttagtataaagtctgaaactttacataatcaatcttgtttggaacaaaaaggaagaatctttttagtaatttgatctttgtggtggtaatgaacagagcgcaagtgagttacgagaggagctaaacagagttaattcagagaacaagaagctaacagagatgttagctagagtctgtgagagctacaacgaactacataatcatttggagaagcttcagagtcgccagagccctgaaatcgagcagaccgatataccgataaagaaaagaaaacaagacccggatgagttcttaggctttcctattggactcagtagtggaaaaactgagaacagctccagcaacgaagatcatcatcatcatcatcagcaacatgagcagaaaaatcagcttctttcatgtaaaagaccagtcactgatagcttcaacaaagcaaaggtttcgactgtctacgtgcctactgaaacatcggacacaagcttggtaagggattttgtctgtgaatcttttgattaaagagtcatatgtttaaaattgcatagaggcaaatgactaagcagagtgtaactctgcagacagttaaagatggatttcaatggaggaaatacggacaaaaggttacaagagacaacccgtcacctagagcttactttagatgctcgtttgcaccgtcttgtccagtaaaaaagaaggtaatttacacacatcgagtttattgtatttatagcttcatttgtaattgtttatctctgcttgcttcttcagttgtctaatgatctgtggtattactgttcaggtacaacgcagcgcagaggatccatcgttacttgtagcgacatacgaagggacgcataaccacttgggtccaaatgcttctgaaggggatgctacaagccagggtgggtcaagcacagtgactttggatctggttaatggctgtcatagactagcgttggagaaaaacgaaaggaataatacgatgcaagaggttctgattcaacaaatggcgtcatcgttaacaaaagattcgaaatttacagctgctcttgctgctgctatatctgggaggttaatggagcaatctagaacatgaacgtttttagtgaatgtattgtttttgtttgtttagaatgattcttcgttttcgaattgtgtctttcgatggggagataaaagatgtatataaatattataagtagatgaagaaatcgtataagtattcgagaaactttaaatgtacgaattctatataaccagttagatgaacattgagtcgtctgaatactgtatatgaaaattttgaaataaatgatgtggttaaaaaagggtcaccataaatattcaatcacaattgtctctttcatttattggaaatttggagtcatttgagaaagaaataagaattggacatcactaaatagtatcttaagtattctttaataatgtgttacacaagtaaattatagtattaagttggtaatacaatgatcggaaaaagaagcgcaaaaattcaaatgagaaaaatcaaagtttccctccataaactcactctgcaagtctcgtgattctcatttatttcctctccccatctgttcatagctctctgttacgactccgtcccaccattatcaatgtctatccgatcttggtccctccaacgaagccttcttccttttaaatctcgtctcttgttccaaacccaaaaacccatgattattcgttttctgtcttctcttggttttcaatggaaggctcgcagcggaggaggggagatgggtgcactatcgtgcagtgttatactcctaggagagtcgtcggtcggtggctttcggggttgagaagttccaaggggaagagagatgcaggggaggaacaagaagatgacaccagaaggtatcaattagcgcctataaggtgttcgacgagtttaaatcacctggtaatgcaggataataagcagaactgccgcctgaataagagtaaagagccggagactaatacatttggtgagaatcttgtgtttttctttttcatacacttttaattctctggaaatagcctaatgatcattgaacggtaagattgtctttagaatttgaaggagttccctttttctcttataggtaaacaagacttgtctttggtgggttatgtttatagacttatacttggttttctttgtgcagagtcacaaagcagagagtcacctttggaagtgggaattggttcttttttgctctatcttgttgttgcaagtaaaaccgagcttgataagatgacaaacctgcgaatgcaaatggagatgtttcttcttaatgcaaaagaacaactacagaagaaggatacacctatgtcttcaaatgaagcaagcggtttccagttttctcctcaagaattctcgaatttggcgtcatccattttccaagagtcatcatcgagtgttcttcaagaggagtacaccgaattcgaggtctcagagccagaggattatcgtcgaggaacagactgcaactcaaaactccaggctgaggtaggtaggttacctctgggtgaaaaagcagaggatagacaaacaaagcatcagattcagagacaatgcaaacttaaagtacttaaaagaaaacccttttatcttcttaagttgggtttcaactgtttaagcaattatgaaacaggctcttgattctcagacttgtggttcttttgtgtttgtaggacaatgaggtcacaaagagtcatataccagagatggtggtgtcagatgaaagatatggagtgtgtccgtacgaactagacaaaaagctgcatgaactactggagacaaggcaacaagaagagttagtgaagcttgagactgctctgaatcgtgttgaacgcagactacaagagaaagaaaccgaggtttcatggtggaaagacgcagcccgcctgcttgcccagcgtgttcctgaatcttctcggtctggactagaatggtgcaacccagactcttccacatgttcagagcgatctgttccaagatcttatgaagcatgttcgatacaccgcaccagtttttctagatgaaaaaatccttaagtggaagaggaagagtttagatttgctgttacagtgtttgcctgaagagttcttaagcatttgtgtgaagtttacttttagttaaactagtagccactacccctgtttggtgcaatgttatacataccacctgaaaatcactatccacggtaagaattgcactgtactgaatccaatcaagcttatttattgctgaagagaagtgtttgaacatttttttatctcaatccattaagtggaagagcctagatttgctgttacagtgtttgtctgaactctgaagagcttttgtgtgaagtttacttttttgttaaactagttgccactgtaactgtttggaattgcactgtatctttatccaatcaaacttcttctgaattctacactttggcctttcaacattataatggaatcctctcacagaaaacgaagaaactacaggatagttaaaaacttgacactccctaatgaagaaaaacagagtttgacaggataatgtcattgcagagatctcatttgcgcatagatcggtggaattctttattgcaagtaatgagtgtcatcagtaggtttttcctcaaaaataaggctctcgttgagctgttggcagcttcaactcagaatctgaatcatcgagctctgaggctggcgtgaagtagcaatccaccatgtctttgctcacatcttctaggcgtggaggatcccactgcaaatattaacaaaccacgaattagaacgtaaaacctggaacatgaacataagctaaaggagttgcaaacgtctaattttgaggctgatatgtttgtatgcacctttggagcaaagtctttatctaccaaacgggctcgaataccctatcaacagaaaacaacttcaatatgtgcaaaaaaatgatgctttaattgacaaattagtgaaatattttacctcgcaaaagtcgccagagactacttttgagactccacaaatggatatacggtattcatgtgtgagacattgatcaagggtttggaatctaccttctcgtatctgagaagagaagaaactgccagagtcagaaaaatgaaatcctttttgagaaaggagaagaagaaactaaaaggacttacagattgcaaagtaatctttaagctcaaaggtgaagcttctttgatctgtttgagagttttcttgcaccattcattgcacgaattagcagcttcattttcctgaggcacggtttaacataaaagcttagaactttacaaaactctcaagccaagtcgatccaaagtcctcaaaattgaaagatatcatgcttatgttagggaaaattttctcaccatagcttcaatgatttcttcaacggtatcaagcccaaaatatttatcaatcaactctatcctgatcaaagaatattgggttacatgattgtgggatattcaaagagatttgaagatatggagaaaaggtaaatgatttacttgtgcagtacgctgctactgtcagggtaaacaagatcaccatattgagcaagagaatcctc

SEQ ID NO: 30802 - DNA, 1066 bp, Arabidopsis thaliana landsberg
atagcatttttggtgatactgagattgtatgtacactaaatcatggggttagtgctaccaaatatatagtaacatttactgcatataaagagagtcgttttgttataagatttggcgccataaaaatctgggaggctagagatgatgggatatatctcacagatgaagatcacgatgcagtgaaaatgtatggttggtaaaatcttagttttcaagctatatgttgtctttaattttgatatcaatagattgcaagatataaattttaagaaaataaaatttaatatattgaattttcaaaattgtatgcaaaagcctaaaaaaatttgttggtaatctatgtgatctgacaaatctctatttgttaatgttttgaaactaatattaaattatattgaaagaaaaaataaacgtgtattcaaataaatgcaaactttttaaaaaagaatgaacaaaggaaattatccttacttttttgcctttgatgcaaaccaatctcgtaagccgccctcataattcagtcaacctcacttcgtattgtacttaatctatttcaaatatccttatcagtctcttgcttggtgatggcttgtctccatgccttctattgttgctcttttttttgatagagtaaatcgcattctgaaacacataccttataatgaaaatttttgttgtgtcaaggttgtttccatttagtagctgaaacatttccctccaatctgtaaagaaccttgcgagaagaaagcctttcatgagtcctttccatattgttagtgtaaatgagcaactaaagaacagattttcccttgtttccataggaatttgacagaaaacataacttgtacttgcttgtacattctactatgtcattctttcacatgttgttactctattttttatgaccaaccatgttaaaaaagagtatttcggggttgcatacgtaaagcatatccctttgtgacccgcatcacaggttttgtagttcgtaagtgtgaccatgtctcttttgacttgaaaacttttctataacagtccttcttcccttttcagagagcaacatcag

SEQ ID NO: 30803 - DNA, 4534 bp, Arabidopsis thaliana landsberg
ctcttgtgtctaatttgaatacttttgcgaccagttcgatattcgcaacacttctgcgatagattagtgctgtgggtttgcttacaattagaacaagagtgggtacgtgaagggaatctatatttcatgattacttattagtaaactctgtgaatgttggtttttgataggtgtgcatacgagcaatccatattctgtgaagtgttccatgccaaggaatctggttggagagagtgtaattcatgtgacaaggtgacgaaaatccatggcttactacacatgtttttgcactcaacgtatttcaattgttttccttaatacgtatttacgtttttttcagcgtcttcactgtggatgcattgcttctagatttatgatggagcttctagagaatggtggtgttacctgtataagttgcgccaagaaatccggactaatttctgtaagacaatttcctctccataagttaacttcttgcaagggatgcttccttggtcttggtttctctgtcactatactcatgtaatctctcttacagatgaatgtgagccatgaatctaacggtaaggacttcccctcatttgcttcagcagagcatgtaggcagtgttcttgagaggacaaatctcaagcacttgcttcactttcaaagaatcgaccccactcattcttctcttcaaatgaaacaagaagaatcgctgcttccttccagcctagatgctcttagacacaaaactgaaaggaaagaattgtctgcacagccaaacttgagcatttcacttggacctacgcttatgacaagcccatttcatgatgctgctgttgatgacagaagtaagactaattcgattttccaactggcccctcggtccaggcagctgcttccaaaacctgcaaattcagctcccattgctgctggcatggagcctagtgggagcctggtgtcacagattcatgtcgctcggcctcctccagaaggtcgcgggaagacccaattgcttccccgttactggcctaggattactgaccaagagctgctgcaattatctggacagtatcctcatctgtatgttataatatcgtgtttctgcttttattctaccattatgcactatttttctgtgctaaggagtccttgactgtttattttcctagctcaaattccaaaattataccactctttgaaaaagttctgagtgcgagcgatgcgggtcgtattggtcgactggttcttccgaaagcatgtgcagaggtaacttgtttctctgtacgcttatttgatattcccaaactattgctatctaaatgccaggtatcagctataaccgtctatgcttctatgtaggcatatttcccccctatatctctacccgagggtctcccgttaaagatacaagacataaaagggaaagaatgggtgttccagttcaggttttggcctaataataacagcaggatgtacgttttggagggtgtgactccttgcatacagtccatgcagttgcaagctggtgacactggtacttttcaaatccttttgtttcgttaactacattcataacatattgataaacccaccctggtatggataaatgaaacattggcactaaagcgttccaatcatgaggacagtgaaatacattccacgaagagatgaccgtacttttctattaggtctgatgtcttggattttccatgttctctgcagtaacattcagccgtacagaacctgaaggaaaactcgtaatgggataccgtaaagcgacgaactctacagcgacacaggtaaatgcgtaataagctgagagttgcccccttaggcataagtaactgccactgtgaagtgtattgaattaaagaatcctttctggtgctctcgtactgattctttcagtgaaatatttttccgtgtttcttcagatgttcaagggaagcagtgaacccaatctgaacatgttttccaacagcttgaatccgggatgtggtgacatcaattggtctaaactagagaagtctgaggacatggcaaaggataacttatttcttcagtcgtccttaacttcagctaggaaacgggttcggaacattgggactaagaccaagcgtctgctcattgatagcgtagatgttctggaactgaaaataacttgggaggaggcacaggagctgttgcggcctccccaatccaccaaacccagcatctttacgctggaaaatcaagattttgaagaatatgacgtgagttactgtttactgtttagttatcaaaaacagctgggaacttttcactgtattttctgaaatcatgtatttgctgctacccaggaaccaccagttttcgggaagaggaccctttttgtctcacgtcaaacagggtgaggcctcatgtactatgtaatgataggatcagaagaattaagcacccttggaatgatcgaaagatttgaagtaatgaacatctgattatttggttctgatatgtgatccatgaattctcagggaacaagagcaatgggtgcagtgtgatgcttgtgggaaatggcgacagctgccggtggatattcttcttccaccaaagtggtcgtgctctgataatctcttggatcctggcaggtaaacgaggttgcatgttcatgtgtttaacctaggctagttaccacagaacattgcgcatttttttccgaaataacttagactacacatatgggataattttagatttttgactcactgagactggccatctgaataatttgagttgctgtttatatcgtcaggtcttcatgttccgcacctgatgaactctctccaagagaacaggatacacttgtccggcagagcaaaggtaaaatccgcagctattattggtctgtataattagaaacttccttctttacataacgaaactttcgtctcaacagagttcaaaaggaggagactggcatcatcaaacgaaaagctaaaccagtcgcaggatgcatctgctctgaatagtttaggaaatgcaggcatcaccacaaccggtgaacagggggaaatcacggttgcagccacgaccaagcatccaagacaccgggcagggtgttcgtgcatcgtctgcagccaaccaccgagcggaaaaggcaaacacaagccgtcatgcacttgcactgtgtgcgaggcagtgaagagacgattcaggacgctcatgctgcggaagcggaacagaggagaggcaggacaggcaagccagcaggcgcagtcacagtcagagtgcagggacgagacagaagtggagagcattccagcggttgaactagccgcaggggaaaacatcgacttgaactcagacccgggggcttcccgagtaagcatgatgaggcttctccaagctgcagcgtttcctctggaagcatatctgaaacaaaaggctatttccaatacagcaggagaacagcaaagcagtgatatggtcagcacagaacacggttcgtcctcagccgcacaagaaactgagaaagacacaacaaatggagctcatgatcctgtgaactaaacagctttggaattctccatgagtatttattcttcagtggtatgtgtttcttatttatacaaaaaatgtcttcggtttcgtctcaaattggttgagtggttacgaccattctaccaattgtcgatcgaagaaatgaggaatttgtagtttgcttttctttttgtttctggtgttttggtttggtgtgtggtgagttgaggcttgagagagagagacaaatagatttgatgaggtttttgaaaatacataggacactaacttaatagttatatctaatatggaaatggatgaagcttctaagaagagaatcggttctggaggtggagcttcaaatttgtacgcctatctatcgcaatcttaagtttcaaaattcgaacctgtacataatttttattattttcaagtttgtttatgaaatttatgatttacttaaattagagaaattggttacgcgagatcctattattttgatttggtgataaacttatggtatgaagacacaatcagttacatggaagcaaataaatcggctatagctcggtcgatgttagaagtgttgatcgtgtcagtgtaataataagagttatcacttatcactcaactaaactcctaaaaatagagccatatgataagctatcactcatccaaatcctaaaaatataaaaaaccgtttggtatatccaatttgtctcgagttctaaacattagcgataatacagtattagtttcagaatttgagtcagaaattgatataaatttagatgaagaagcatgtttgttgcttgtttttgcttctttctatgtctctgttatgataacatacagtatcaaagaagttaagacctgaggtcaactcgtttgttcgtgtctgaattctgattattttgtgggtttctttcttctcaaatctcaccaatcccccatgttataaaatatcaggaatagccctcaaaagaaataaataattaaataagagcaacaatacttttccaaattgttt

SEQ ID NO: 30804 - DNA, 1667 bp, Arabidopsis thaliana landsberg
  unsure (1)..(1667): unsure at all n locations
catcatttaattcagttttgataaggagacagagtcgacttagtagaatcgaacagtgggagagtaagtactggaggaagcagaacaagaccggttcgtaaaattagattggcgtataaagttttggtgtgtagagtaaaagcacttgtcagaattgtatcgagtagtataaattagaaaacatgcgatctttattttcttctccgtttttttggtagaattttaactaatccattctgtctagtgaattcgacgatacaaagttttaatcggtaataaaagtaaataagttttgtacggtttgatcttatatctctatgactatgcctgaatctaggaaaatccttatggtaaatgttttatcctcgtattgagttctatattgaaatcacaaagttaactttttttttttttttcttctatcacaaaagttaactttaaaattcaaatttggagctcaagttcagaattagttagctataacatggaatggaacataatttgggacatagtgaaagtctacctgtcccactaaacggtcggtttgttcaacgaaccaaacgctttaaaaagtgacaatgtaatatttgtcctttggctttacccgttttggcagtacgcttttagttgtcaaattggccattagatcaagagcatcagtaacaaaaagacgcagagacaacaccaacaaaaagaaactctcctttattgttgtacttcaataatcacttatcgacttttatttccacttttgtgatttaatctataacctttaccaccatgaaacatataaaaagtaacttttaaaccaagaaccaataatagagaacgcatatccatttgcgtgaaaagtgaaaactaggactcatcaccgatgattttcgagcaagatggtgttttctgtgtgtttcagggcttctcaaggaaatgttgtgcgacgatacggcgctgaatcttaccagaggcagttttggggaggttatcagtgatgaacactctctttggcaccttgaaagctgccaaattcttcttacaaaacgctttaatgtcctcttcggttacagtagttccttctcttggaatcaccgcacagttaatctgataaaccaataaaccagggaaacacagcgttattaacagctcattgataagtaagttcacatgatgtttgatgattctgcaggacataatggtagataagggagaccaattcataaattcaaattagagacaatttaagcacaggttttgtttacctcttccccatatttctcatcaggaacaccgaatgcaacaccctgagaaacgtcaggatgcgttaagagtactgcannnnnnnnnnnnnnnnnnnnnnnnnnnnnnnnnntagattataattaagtacacatagaaaatctaactcattcatacaaaagatcatgatactgcacaaagtagcctctttctttgtcttgtctcatttctaatttgttggagggttttctttgacaagtctaacatagtactgcacaaagtagcctccaccgagactatacaaataaactgctagacatagactagtattcttgtgaaacagtaaagccatcaaaatagagtaaatgagactaacctccacggttaataagctctttgatccgacccaccagatgcaaatacccatcggtatc

SEQ ID NO: 30805 - DNA, 2762 bp, Arabidopsis thaliana landsberg
gtcatggcccaagtccctcccgagaaacaattcagagtcctcaacgaacccggctacgccccatacatcaccgagtacgacgcgagttaccgattcctcaactcacagaatcagaatttcttcacaattcctttccagctcatgttttacaatacaactcctagcgcctacgtgttagctctccgagtcggaacgaggcgtgacatgagtttcacgcgttggatctgggacgccaatcgcaacaaccccgtcggagacaactccacactctcattcggccgaaacggaaaccttgtgctcgctgagttaaacggccaagtcaagtggcagactaacacagccaacaaaggcgtcaccggattccaaatcttgcccaatggaaacatggtgctacacgacaaacatggaaaattcgtttggcagagtttcgatcatcccaccgatacactcctcgtcggccaatccctaaaagttaacggagttaacaaactcgttagccgtacatctgatatgaacggctccgatggtccgtacagcatggtgttggacaacaaaggcttaaccatgtacgttaacaaaaccggtacgccgttagtttacgggggatggacggatcacgacttccgcggtaccgtcacgttcgccgttacaagagagttcgataatttaacggagccgtcagcttacgagcttctcttagaacccgcaccacaacccgctacgaacccgggtaataaccgccggttactccaagttagaccaatcggaagcggaggaggaactttaaacttaaacaaaatcaactacaatggaacgatatcgtatctgagacttggatccgacggtagcctcaaggccttctcgtatttccctgccgcgacgtatctcgaatgggaagagactttcgctttcttctccaattacttcgtccgtcaatgcggtttgccgacgttttgcggcgattacggttactgcgatcgaggaatgtgcgtcggatgccctacaccgaaaggtctgctagcttggagtgataaatgcgctccacctaaaacgacgcagttttgcagcggagccaagggtaaagctgtcaattattacaagatagtcggtgttgagcattttactgggccttatgttaatgatggacaaggcccaacttctgtaaacgattgcaaggccaagtgcgatcgtgattgcaagtgtttgggttacttctacaaagagaaagacaagaaatgtttgcttgctcctctgcttggtacacttatcaaagatgccaacacttcttccgttgcttacatcaaatattagtgtttttttgggaaagttatttaccgaattctttttgaattcttagagatttaatgaataatcggtgtgcttgtaatgatccaccgttgaatatattgtattaccttaaaaaaaagccatcagatgtatttactatatatatatagtacctttgagaatcaaaataccatgtgaagcattatcattattttgttgcctctgacaagagttttgtagtccactggtcctccacttggaataccgctcacttggttcttaattcaattgactactgaggtttgtagatggtcgttgggactcatactgtcaaaaagaacagcaaacattttgtcacttctccaactcattgggcctttaggctttgtcatagcccaataattctatcttaatcggacaaaccgtgtggtccacttcccttcgtacaatttttttacaagttttgtggtcttactttttacttttcagcattacatgggataaaaagtgaaagcttgcccagcagctatgcatccatcaaccatcaaaatctgattcacagtactgttttggatgtcttaacttacataaaagattcgatcatcacaagatgattattgtgagttttaatttttttactgttaaagctgacggagatgtttttatatctgttagcattatcttggaaatttgtatatatatacgacagtctattggcgggtcagataaatgttggattgtgtagtctagactttagaatatataaaattactttatgaagtatatttatatacaagacgctaaaatcgagaaatttatatagctagtttgggaagtgtgggtacttcgttatccaaatattcactaatttgagtagagatcaaaatagtgatcgggtagattgcaattttgaaaggatttttagatatatttttacagtttaaagtatttaaacgagtacattctatattcaaaaacaagtgtttaaagtatgaatccgattggagaatctaaattttcttttgtcaaaaacgatggtcaactttgtctgaacaattttcatgagattagttatacaaaatttgtgtaataaaaacggattaacaacaatatatataattagtgttttactcacaacttttgtatatacgataattttcgaaaattctcagtagacatatcttatccaaatcataaatgagccattggttgatctgtataacgaagacacgatttgcagcttaggaccattcaaaaaaaaaaaaaaaaaacttaggactttcaaacgaatacagcccaacgacccaaagttaagatcttatatatacacctaaaggatatagaaaatcatctcactctactactcaatctcagtaaacataaagaacacaaccatggttaggtttgattacttactaatcacggcacttgccatttcaactgtttcggttgtcatggcccaagtccctcccgag

SEQ ID NO: 30806 - DNA, 4635 bp, Arabidopsis thaliana landsberg
taatttagaaattagaaccaacgacatgaaggttcatatgtaaatataattattgtgtaagcatcaaaataaccaataagcctcatgcatgacatagtatttagcgtttctacggttaaaattcaaaactgaagttgctgttatattattattgccgattttcctataaaaagtttcactgtttttaatgcctaaaatcaaatgtaaaaattatgttttcctaaaaaaaagtttcaatgttttacgttaagctagaagcgatcggttgtagtgatagatttcgaataagtttttagataagtgatatattatctgaagaaaaaagttaaatgcgagtcaacgagaactggtaagagataagataacgaccgatctaaattccacacttaaagtcaaaaatatatcactccaagttcttatacactagagactacgcattagtctttttggccttttgattgaagcgtgcaatacttttcttcgagaaaaatgtgtatttgttttggaactatatgtgtactttgaccaacagttgactttgaaagaacattattacagcattaagtctttttgtctcgatcgaaaatcctagaaagtttttgtacacacgagaaaaattgtggatcggaacaaacataaaataaactaattagctaaagacttatccattacgtacgtacatgtaaatgtcggtttaagattcgattgttttcttttacacttctatttaatgcatgtataaataacagttacaaatgatactaaactatttttgatagtacaaaaacgtttgcaagttgtagccatatgcatatttatttactacttgcataaacttacacttatattcataactcacaagtcacaagttgtagccatatgcatatttatttactatttgcattaacttacacttgcacatacacttatactcacaagtcacaacttgcattaacaaatacttcaataacaagaatgagaacgtacgttatcacatataaacatcattttatcaatatccacaggggatgatggtgttaacattatcagtaactataccgggaattaagccaccagaatgttccacgaataatgtggaaaattgcgaaaaagcttcggttttacaattagcagttttctttggagcgttatacacattagcaatcggtacaggcggtacgaaaccgaacatatcaacaataggagctgatcaattcgatgtattcgacccaaaggagaagactcaaaaactatcattcttcaactggtggatgtttagtatcttctttggtactctcttcgccaacactgttcttgtctatgttcaagataatgttggctggaccttgggttatggacttccaacattaggtttggctatttccattaccattttcttgttgggcactccgttttaccgccataaacttcccactggaagcccattcaccaagatggctcgagtcatcgtggcttattttcgcaaagccaatgcaccaatgacgcatgacatcacgagcttccatgagctgccttctcttgaatatgagcggaaaggcgcctttccgatccaccatactccaagtttacggtaatgtgtatatttatttagtataatctcaatctaaattcatattatatcctaagtatatcagaaagtacctaacatgcaactatgatgcagattcttagacagagcttcactcaaaacaggaacaaatcataaatggaatctttgtactaccacagaagttgaagaaacaaaacaaatgctgagaatgttaccagtcttgttcataactttcgtcccaagtatgatgcttgcacaaatcaacacattgtttgtgaaacaaggaaccactctagaccgaaaggttaccggatctttcagcatcccaccagcgagtctctccggatttgtcacactctcaatgcttatttccatagtcttgtatgaccgagttttcgtcaagataacccgaaaattcactggtaatccaagaggcattactttgcttcaacgaatgggaattggtcttatctttcatatcctcatcatgatcgtcgcatctgtcactgaaaggtattatcttaacgaaaaagaaatatcaaataattttcttgtgttgcattagtttacttaaacttctttatttggtatttatgtaacaggtatagactcaaagtcgctgctgatcatggtctcatccaccaaaccggagtaaaactaccattaaccatctttgctttgcttccacaattcgtcctaatgggtatggctgattcgttcttagaagttgcaaagcttgagtttttctacgatcaagctcccgagagcatgaaaagcctcgggacatcatattcgacaacgagtttagcgattgggaatttcatgagcagtttcttgttatctacggtatctgagataacaaagaaacgaggaagaggatggattttgaacaaccttaatgagtctaggttggattactattacctgttctttgcggtacttaatctggttaacttcgttttgttcttggtcgtggttaagttttatgtttatagagctgaggttactgattcaagtgatgggaaagaggtggaaaagaaagagactgaatgacacataacgaataatatagaattctctatatcagcaacttttattcatggactttgttaagtaatttatatcttccacaactcggatggaattgttagcagaacatccgaagctgagaattggtggtaattaagtcacagtaatgtctagataattaatatagatgagcttgcagataattcgacatggcagcaaccaaacttgttttgcaacacgttgatccaccataaaccgatccaattggacccatactagagataacctttcttccacgcttgccccaaatccttgcaacacgttgatccaccacaaaccgatccaagtcaaacccggatccaagtctgtttgaattaagcaaatgggttggcttttttacacaaacaaaaaggtaaaaaaaggagtcgtttaagcttatcctttttttctttctaattgattcgatttcattagaacggataatttttaaatagattaccaacaacaagtcaaacaacacatgtcgtccaatgttttgttggtaggcacacatgtcgcccaatattaaaagagattaagaaattcctttccattttatttgaaaattttaccaaaaaagagaaacaaattaagaatttaagaagtatattcttaattcaaaataagtaatttagtaagaaactgttacattgccacttgccaccatctgtaaataattctcattttggtattacatgttattgtagaaagaaatattttcatttcatgatgtggcattaaatatgtagaaaactcattttgggatagattttttaatactaaaatttacttttatttaggtacaattcttttctttcttaaggccggaaggatatgcttatgatctatattttattttttaaggataaattttgatattatctatttttcatgtttttatttcatccatcttatataaaacgaattttagataagaaattgtatctttaaccacattttgaactcaaggaaagaatagtaattaatacattaacacttgtaaataattaaacaaaaacaattgatgaaagagtgtttcaagctttcaatttgtgcctgatatacgatttgttttagtttgatatatatgcatgaattatactttaacgtgaattttttcggtttcgggtttcggctttcaaataagttaataatacattccattcatatgaaatattacaaaaattgttgaagaggtgtcatttctatgaagcgagcttatcttggtattacagctgtgatgataactataatgataataaattgtatatttgaccagttttgtctacatataaactactataaatcaattatagtaattaattaaaatataaacaatttcaactcttactttttaaatggtgatgaaatggcaagacagctcatttaactagcatatatatagatgtatattattctatatattgtgtgaccaaagtaccaactctcttcaaacaaaagatccgtataaaaactatattgaacaagacagaaaatgacagtagaagaggtaggagatgattatacaaaagatggaacagttgatcttcgaggaaatcgcgtccgaagatcccaaacaggccgttggaaagcttgttccttcgtcgttggtaaatatcatttttagtcaaacaaaattctcttgtttcagatatttttgtgtatatgattaagagttgattgatattttgagtgttgatgtgattagtgtacgaggtgtttgaaagaatggcgtattatggaatatcaagcaacctagttatctacatgactaccaaattgcaccaaggcacggtcaagtcgtcgaacaatgtgaccaactgggttgggactagttggctcactccaatcttgggtgcttatgttgctgatgctcatctcggtcgctacatcactttcgtcatctcttccgctatctatttattggtataacagtctaataaccacataaatagttacacaaaagaatttagagtgagttttgtgataaagatatt

SEQ ID NO: 30807 - DNA, 5498 bp, Arabidopsis thaliana landsberg
gaaatgtgttgaaagtgtgttatagtcccctttttccttctcaggtagctaataaccaatcaatatctttgcttttgaaggaaagacaggtcgtcgcaccatccaatctacgtgcttcagatcttctctggtgacggattcgtgctccttctcaatcctcatcaacttgtttaacgtgtgcgttattccctccggctcagtgagagattgcagtttctcgaacatgcataattctcttcttctccatcctcctattttccacttttgtcttcgcaagtacatcaaccctgatcgatgtcggagcatactccgttgtacagacccttttcaagagatggctactagaaccaatgatacggcggaagttcatcgtcaatccaagctctcaaagttcactaaccctaattataatacatatagctttcttcttatctccaattaatgtgctatttgtaaaaatgtttacaaagtttataaaccttgattacatagatgttcaatatcataagtttaatccaatctgtatattttaatgctgaaaagatagctaagaacctatatagattttaatttggtatgttagagttgaatatcttgtttaaaccttgactatacagagatgttcattatcttaagtttaatccaatctgtcatactaagccatgtatatcacaagaaagtctgaaaatgtgctatatgtcatagtaaaattattaagttaatgcttttttgatgtgagaatcagcattatagatttgatggtaaaatgcttccatcagtttctctactcttattaaaaggtagccaaatttagtttaattacttacttttaatatatattttcattatgttgatatgaaaataattttatttttattacctccaaagtgatgtatatgaaaataaataaaattgcaagcaatggaaaacaatagaaaacttaaaggtaaatattttatttaagagttgagataattatgtactaaaagtttactacataatgacactaattaaatctttaattcttgttttctaaagttgactacattaagatctactaattaactctttaaactcttctaaataattttgttttcaactatatctcaaatttaatagggcaaaaccaaaatctccctactcactttggaaatcagtaatgtttggaactaattttgactaaatatgctaaatgcaacaagtattaattcagaaacaaatttactacgcaaattcggcaaatgtaaaatgtcaaatatatatagtaattaaacatgttatgtgtgagttgtcgaaatgataaactagtttgttaagtacttcagttagtctttgttcttcatcatgtttctctataactaagtccctttccatatttcatcaatatgcatttatcttattcaaacatcataacattacaacatataactttccttgatattaaaagtgcatacaaagtattaaatctttaaatacctatccgggtgcaataacatattcaagccatcaaacctaatttctaaaagcccgatccgatcgacaacgaaatgttgtcctcggactcgaattacgctagtgatattagcgacgatgcctccgccaccggatcgatagagaatcctatatacaaatgcaagtattgtcctaggaagttcgataaaacacaagcattaggtggtcatcaaaatgcacacagaaaggagaaagaggtcgaaaaacaacaaaaagcatttttggcgcatttgaaccgaccagaaccagatctttacgcgtactcgtattcgtatcatcattcatttcctaaccaatacgcactcccaccgggatttgaacagcctcagtacaaagttgatagatcatacaagatgtccatggtctacaaccaatatgtgggatcctcaagctctagctttgcaggactacaaagtgacccaagtcaaggaatgaaccaggattggacctttaccgggatcccattcctaccccaatctcaacctcaaccactatcgtcaccaatatgtttggatctttgccttggcattggtagctcccaaacccaaccacaacctcaagaaccaaatgatgcaacagaagagatggatgctgagaaagaaaatgatggttcttccctttctctctcactcaaactgtgaaattgtaatctttcccttttaagtatttcttaaactttcattcctcacctttgttttcttgcatagtattatcggcttgtgtcaaatcagtacttgtgcacttgaacattgtaataaacttggttgttatttgcatttaaatttcatataataataaaaacttgatattgttctgactttggggtgtcaaattctatttataagaatttgagatgcaaatctcaattttagttactttatgataccaatataaaaaaaaaaaccactctttcgaaaggatgcgggttttgaaatactttcgagctccttcttctctccgtcatcgttcctctcccatggctcagtttcttcgacgcttctcttcctctcccatggcgaacgaagacgaattccaatctccggtggaaccatcacagcagcaatctcaggactgtgtttcggagtcttatctgatagggtttgttatcgcgaacatagtagggttaaagtactattccggccgaatcaacggtcgagagatggtgggtctggttcgagaacccttgaacgcatatgacaataatgcaatcagagtactcaacacgcgatctgagcaagtgggtcacatcgagcgtacagtagcagccgttctcgcgccgatgattgattctcacacgatcgtcgtcgagggtattgtacccaatactcgttctaactccaataggtacagaatcccttgtcaaattcatgtatttgcaaagttagaagcgtcctctactgtgaaatcgacgatttctagaggtgggttagtgttgatttcggagtcagatacatcgtttgggttatctgaggctgttgtggttaaggaacagatgggaaatggagataagaggagtgttgataagatttttaaacttgttgatgagaatgtgaagttaatggggaaattggtagcggctgagccacctagggaagtgataaagtctgaactttttgctcatcagaaggaaggattaggctggttactctatagagagaaatctggagaattgcctccgttttgggaggagaaagatggagaatttttgaatactttgacgaattaccgctcggataagcggcctgatcctttgcgtggaggggtgtttgctgatgatatggggttgggtaagacccttactttgctttccctgatagcttttgatagatatggcaatgcatccaccagtacgccaaccgaagagcctttggatggtgaaggagacaagattgaaaagaagggtaaaaagagaggaagaggcaagagcagtgaaagtgtaactcgaaagaagcttaaaactgatgatgttgttggcatgaatgtgtctcaaaagacaacgttgatcgtttgtccaccttctgtgatttcagcatggataacacagttagaggagcatactgtaccgggaatcttgaaggtgtatatgtatcatggtggcgaaaggacagacgatgttaatgagcttatgaagtatgacatagtgttgactacttacggcactttagctgttgaggaatcgtgggaagattctcctgtaaagaaaatggagtggctgagaataattcttgatgaggcacacaccattaagaatgcaaatgctcaacagagccgagtagtttgtaagttgaaggcttcccgcagatgggctgtcacaggaactcctattcagaatggttcatttgatttgtactctttgatggcctttctccggtttgagccattttcgattaagagttattggcaaagtttgatacaacgcccgcttggtcaagggaataaaaagggtctttcacgtctgcaggtaataataatacattacttacatgtatgcctgttttttgttttgctctttggtgaaaagttatttaatgacacgcttttcaggttttaatggcgacaatttcgttaagaagagcaaaagaaaagagtttgattggtttaccgcctaagactgttgaaacttgttatgttgagctttctccggaagaacgtcagttatatgatcacatggaaggagaagcgaaaggtgttgtgcagaatcttataaataatggaagcttgatgcgcaactactcaacagttttgagtataatcttacggcttagacagctttgcgatgacatgtctctatgccctccagaattaagatcttttaccacttctacatctgtcgaaggtaataataacaaaaccggtacatattcttacttctggttgcatagcttatatctttgtgcgtttgtgaaacagatgtgactgataagccagagctactgcaaaagctggttgcagcattgcaagatggcgaagattttgactgtccaatctgcatttcgccaccaacaaacatcatcatcactcgatgtgcccacatcttttgcagggcttgtatccttcaaactcttcaaagaagtaaaccattgtgccctctttgccgtggctcccttacccaatctgatctctacaatgctccgcctcctcctacggattcttccaataccgatggagaagacgctaaatcttcaaccaaatcctcaaaggtctcagctttactatccctgctcatggcatcgagacaagaaaaccccaacacaaagtctgttgtgttctctcaattcaggaagatgctgcttttactagagactccactaaaagctgcgggtttcaccatcttgcgcttggatggagcaatgactgtgaagaaacggacccaagtcattggagaatttgggaatccagagttaaccggacctgtggtgttgcttgcgagcctcaaggcctctggtactggcataaacctaactgcagcctcaagggtttacttgtttgacccgtggtggaaccctgcagttgaagaacaggccatggacaggattcataggatcgggcagaaacaagaggttaaaatgataaggatgattgcgagaaacagtatcgaagagagggtccttgagcttcagcagaagaagaagaatctagcaaacgaagcttttaaaagaaggcaaaagaaagatgaaagagaggttaacgttgaagacgtggttgctctcatgtctctctgaaactatcaatcattgcttagctccttaaccgtttttttaagatacattaaccggtaatttactgcttttggtacgtaacctcaaccgatgtttttgttgccttatcaagtatcaactagacttctgtctcgattagtttagtttaatcaagggttagcttgtacatgcgttttctggtttcaggcccggttactgtggatcggtttagtttggattaatttgaccaaagttaaaagaaaagataacgacggtccatactattca

SEQ ID NO: 30808 - DNA, 2555 bp, Arabidopsis thaliana landsberg
tatcaagcatttgaaatgataagaaactggcgatcatcctctacgtcaccatcactccaaaattattctctttctaggtttaagttttgtaatgatcgcctttatttgttgagatctctaacttctcgcatttccaaaattttaagtccaataactgcattggttaagttggggcgttactagtcggcttaaatccaaatatggatttgattccatatgtatgtgacagtttcttaacgttcatattacaatgaatgatggatccttgactagacaaagagaaaatggattgtcacttcgtaggaaaaatagaaattctccacgaaggctggtctcctttatttaacgacaaattcactcatagtctcattcacaatttgaacttgtctaacacaatgtgttatatactcgcgaaaagaagcataataggctcttaagggtaatccacgaaaccaaaacacatataaaacattaatatttttctctaaatttattcatatcaataataaagtttacaaaaaatataaaacaataatccatacttagcccatagcttcgtgtggaagaagacttgatttttgactagtcaacgaaaatgagtaaatgacgtattcagctatagtaaaagggatcataagcggaaattacaaaaaagctttgagggtaaaatagtcaaaaagcataatcagaaataacttaggcccaaagcaaaaaggaaagggctctggatccagccgcaaatcagaatctggtaagttcgaacgccacgtcatcacctaaatatctgaaatatctaattaagacttgtctatatataaaggcttctcctttcacaatcccaaacctttctcttctctgctaacgagaaaacaaaagctatcgtctttgctactactactactactattattacattgagtcctttgtgttcttcttcttcagctgctactttgttcgagtgctttcttacatgccgtcggagattgttgacaggtttgtttgttacatttttcgatttttctccgttttttttcctctcttctgtatgttgctaaaatgtgattgttcattgtaagggttaagattttgtttttatcgaattttggtgttttgggtgtatatccccccagttcctttgtttgtgtaataggtggaagctgaaaggtttttcaattttagggtttttggggttttttgttgactgaaatttgttaatttggggcacaatttgtctcttttggattgagttctgtgcgatttgtggattctagttcgtgtgtggttaagagacttggaaattagaggatttttagctaaaataatcgttaaaggtggtacctttcctgatacagaagttagattatggattctatgttgtttttttaggtgattctctgtttctgagtttgctctgttctagtttcttaatctgttcgtgatggagtttctttcttgctcgctgagatgctgcagattatgaaaacttcttcttgtagctacttcggtgtaattacgttcaggtggttaaaaattgtttctttgaaaggtgctttgatccgaagtatagttgaacctgttgcttgaaattttgtgaagagagaaaattggagttctcgagcatgttgctaatcttgcttctatcccctttgattctaccaggaaaaggaagtctcgtggaacacgagatgtagctgagattctaaggcaatggagagagtacaatgagcagattgaggcagaatcttgtatcgatggtggtggtccaaaatcaatccgaaagcctcctccaaaaggttcgaggaagggttgtatgaaaggtaaaggtggacctgaaaacgggatttgtgactatagaggagttagacagaggagatggggtaaatgggttgctgagatccgtgagccagacggaggtgctaggttgtggctcggtactttctccagttcatatgaagctgcattggcttatgacgaggcggccaaagctatatatggtcagtctgccagactcaatcttcccgagatcacaaatcgctcttcttcgactgctgccactgccactgtgtcaggctcggttactgcattttctgatgaatctgaagtttgtgcacgtgaggatacaaatgcaagttcaggttttggtcaggtgaaactagaggattgtagcgatgaatatgttctcttagatagttctcagtgtattaaagaggagctgaaaggaaaagaggaagtgagggaagaacataacttggctgttggttttggaattggacaggactcgaaaagggagactttggatgcttggttgatgggaaatggcaatgaacaagaaccattggagtttggtgtggatgaaacgtttgatattaatgagctattgggtatattaaacgacaacaatgtgtctggtcaagagacaatgcagtatcaagtggatagacacccaaatttcagttaccaaacgcagtttccaaattctaacttgcacgggagcctcaaccctatggagattgctcaaccaggagttgattatggatgtccttatgtgcagccca

SEQ ID NO: 30809 - DNA, 4433 bp, Arabidopsis thaliana landsberg
ccacacactctttaaattaaaagtctccaagtcacgctccactcacgtgtttctatgtttttctatatatttatttatttgcccttctgttttttctttttgagtagttaaccaagaagatactgctgaaatttacatgatttggaattttcttttagatttccaagttctagttgttatttgttaatatgctgatgaagtgattcttttttttccaacttatcgtgcctctaaagtctctctcgaatggtaggtgtgtggtttctttatagaaatgatatacaatacaaaaacaaattgtttttacggtattagtttggtgtgattattgattgttgagctggctttatctggtggtgttgtgtgtcttaagccataatctgattgtttttgttttgatgtccagatttctcaaacgagtgcaataacaacaacaacaacaacccttttcaagagatcaagaaagaagaaggtaaaaaatacgaaaaagacagtgtttctattagttactgatactgttaaagataatattactagttttagaccagacatagagcaactctgaccaggctactacctactggtttgtttaaatctgttgaggcatattgtctaagatacgcctagcaatcttatattttctacatttggactgatatggttttacattttagccgattcaaacctatatttctctaattaatatatatgattgttgacagactttggctgagcttaaagaggaagagatcatgctcttgaaggaaagtaacggcctgaaaaatgtataacctccattttagcctctttctttatgtctctatatatcaagtccaagttctaatcttagatttggttaatcttattcttgaatcaggaattggcaaatatgcgcgatttgctagagcaacaaagagcaagaaacactgctctaaagaagatgaaggtgagcccatcgctctctctctctctctctctctctatctttctatacatgtactcattcaatcatatatacggaagataaacatgttaattattcaagtatatcattttcatgtgtatgcaggctgaatcacaatctgccttatcgtgcaaactcactttcgaacaaggttcttccttcttgctccctgacctaaacatgcctctagataacgacccgagccctgaagttgtctgctgaacgggcgagccacaagcatatcattcttttgtttttcccattagacaacactataccactatacctcctccgtccacaaacatgttttttgaactgtaactatatgaatttgaagaacgtagattaatcctatatatccttcacccatatcccggtggaagctgaagaagattcgcctgaaggtgaagtggttcgagactatggttaagtgtgttaacaatatcttctagtttagctggtagtaagatttttgttctgccaatctcctaaatgattcttatctttctcccattttattaggatgagatgtaattatctacttagataatagatgtacaccttttttttttgtttgttctttcttattatctctggtaagatgtattacatcgacatttataatcagtgtaacacgttccaaacattttactatattttgtattatgattgatggactaaaaaatatctgcagtcttgcattctttttcatcgttataacgaaaaagtaagatactaatcagatatttattatgattgattctttattaacacgttctttcttgaaatttcaaaccattaatactaaaaacacgtaattacggaaaaagtaagatactaatcagattctttattaagctcagctaaaccagtagtagtaaaattatcactggccttaaaaccctagaaatagaattaagctctcagctattttgtcttaacgactctttattgtcccgacacacgaaaatggcgtctcttggccaaatcaccctgccacgcgcgccgtcggcggagattggcctcttacgccgtcgattggagcggccgatcatcagaacccggatcggattcaacggccggattgcgagcgtattgactaacgcaggggaccaagcggtgtcggtaaaagcgagtgtgagccagaaggtgattgaagaggaagccaaagttattgtgggtacctacgcgcgagctccagtggttctctcgagtgggaaaggttgtaaattgttcgaccctgaaggaaaagagtatctggattgtgcatctggaatcgctgtgaatgctcttggtcatggagatcctgattggcttcgagctgtcactgagcaagctggtgttcttgcccatgtcagcaatgtttattacacgatccctcaggtatttattcgttactgtatttttgcattactgattctgttgatggctgacgaaagcttaaaacttttgttgtttttatcctctgtgtgattgagctatggcctatggaaacatgctagggaatgttggattagtcttctacttataatagcgagattattctatgacaagtacttgcactttgaaatttcatcaaattggattgtttctacgccttccctatagaaatttttatgacaagtatctgacctcattgtaaactcttagtgtacatatgctcctcaatgcccaattcctcgaaaaaaggaacctttatgctcatatctacttcatatgggttgttaaaatctgaaatgtttgaacttctctgcagatagagctcgcaaaacgcttggtggcgagttcttttgcagaccgtgtattcttttgtaactcgggaacggaagccaatgaagcagccattaagttttcaagaaaattccagagattcacccatccagaagacaaagaagtcgcgacaggtttcatcgcctttacaaacagcttccatggaagaaccttaggagctcttgccttgacaagcaaagaacaatacagaactcctttcgaacccatcatgcctggtgtaaccttcttagaatatggtaacattcaagcagccacagaccttatccgctcaggtaaaatagctgcagtttttgtggaaccaattcaaggagaaggcgggatttactctgctacaaaagagtttctgcaatctctgcgctctgcttgtgatgccgctggatctcttctcgtcttcgatgaggtaatatactctaccgtccatccaaaattttattttctttctttgtttctgttttttgattggtcttgcctcaactgggttcattgtcccaggttcaatgtggtttgggtcgaacgggtctcatgtgggcttatgaagccttcggtgtgactcctgacataatgacggttgcaaagcctctagctggtggtttacctattggagcggtgctggtgactgaaaaggttgcagagaccataaactacggagatcatggaagtacatttgcaggcagccctcttgtgtgcagtgcagccattgcagttatggataaagtatcgaaaccctctttcttgtccagtgtctcaaataaaggtcgatactttagagacctgttggtgaaaaaacttggaggaaactcgcacgtgaaggaagtgagaggcgaagggcttatcataggagtggagctcgatgtgccggcaagctcactggttgatgcttgccgagattcgggtcttctgatcttgacagcggggaaaggaaatgtcgtcaggattgttcctccgttggttatatcagaggaggaaatcgaacgtgcggttgagatcatgtctcaaaatttgactgcgcttgattgaagttcttggaagagaaatgatgtggtgttgaagaagagctaatgttttatattcgatcttgtcttaaattagcctcaagtgtaccggtaaagatgctctgcacaattgaaaagaaataaaatttgacacaaaacttgatgaactaattgttcaatctaaatacttgtataatttccatggttggttcgatgacgtctctaacgcgattgtttccgtcttgcgttatagcatgctggttatgagctgcgtgaggaatcagagcacatagatgataacggtgatagaaatattggtagagtatccaacgaaccagcattggaaagacgtgaatccaatttatcggcagtgtatgcattggtcgccaccaagaatcttaggggtctaatttaaaaaaatgataattagggccttaggcgatcctgaactaatgtcgagaattttggcgtttagttctgttaattaattacagatgattgatttttgagggtcttaggatgatttctcactatgtctgtgttaataatgccattaggagttctttactgttgcaggggtagggttttggtatgtaatatagtattagcattgatgaaaataaacaggtgtaaaaagagaagatttcctatcaaaggttagtaatgagtacaaagcaaaaaaaaag

SEQ ID NO: 30810 - DNA, 1781 bp, Arabidopsis thaliana landsberg
tatcaactatggttttgatttttgcttttgcagctatccatatggccacgaggagcttgctatctgtgaagacatagatcaggtaaatccacaagctaagatattgtataattatatacggtctatgaatttggctcagtgaatcacattatgtttcactcataggttcgtggtgttatggaaaaataccctccgtatcaagctatattctccaagatgtcttatggagaaagccagatgctcgacaaggcattttatgaagaagaagtcagaaggctttgcttagcctttgagcagcaaggtttgcatccctctcccaaaatgaaccacagataactttcctctagaactgaattttaattggattcagataagagaccatggagtgcgattacataatgtgatgtgttataggcttatataactgtttctcaattcacgtccaatactaacagtagttgttaaaacatgatatttgcagttccattacgcggtattctttgcgtatatgaggttgcgggagcaggagatcaggaacctgatgtggatatctgaatgtgttgcacagaaccagaaattcaggatccacgatagtgtggtctacatggtttgagtctggtaagaagtgtaatctgtctgaaaaaaacggagaataagaggaacccatatggttgttgttggttttcttcattactccatttttattagagaatctgctgtacaatcgtgcggtctacattcactgtgtatgtcgctctgcgtgtatcaaaaactgctcaataagaatctatccaatttgtttgttttttttctccctcatattcttgcttggttccggtaaactctttgtaatgtcgaataatttacgatgtatacgaattacttttggcggcctgaatttgtcttccgagagttggttgcttcgagtgctagctaattgcctttgaatatgagaaatcgaaaacacatacacgttagaaggaggggaaaataagaaaagttaaatttgcaagcttattgtgaaaagataattcagctaaactagttaatgtactgtgtcttgaacccccttacatgagttccaatccacttgaaaatagactcattggagatatgtttacatatcactttttgtatattttgttatagatttcatgaataatatgaccattaattttattttatttagaaatataaattttaaattttaaattgagtttagtaatcttttattttttctttagtaaaaacttaataataaataaaactctttgacatacattgtttttagaaactgatttttaattttaaattttatattcttttataacattttctaaatagatatatataaaaaaaattactacatcatgcatttaatcttactttcattggaaaaatcatttttgcaatgttataaaaattgtgatgtcaaacaaaaagcccgacttaatcgggacgaaaaacccgacttcattggaacgactaaaagcgacaacagaacatccatgttaatggcaaaaacatgacaacaaaaaaactatgttgacggcaagaatataacaacggaaaagacatgttaaccgcaaataaagataagagcccctctctctcaaaaatattagagaaagagagctttcctactatttcttagagtccgaatcgttacaacggttcgagcagacaaacccgtgtatggactggaccccctttctatttaccattcataaactatagttaataaaagtatagataaaaaaaacaaaaaagacgctctggcc

SEQ ID NO: 30811 - DNA, 1021 bp, Arabidopsis thaliana landsberg
cgcgtgtatataacagagtagttagtaacgttatatactaatgtttcaccccaacttatgatccttacttagttagctagagtaggtataatcgaacgttactaatgttgtttcgtatatacaaggagcagaagcgataagagcaaaagattaaaaattgaaaagaaaaaaaaatatagattgttgtgaattcgagaaaatttggatgaatctaaagagaaatgtaacattcgactattcttaaactatggaagcctcctagtattctaagaagagtaaatattaattttattgtaaacattacccctcttattcaagtattttgtaaaatcctaataattattttcatactaaatgtagtacaatagtaatgcataatattcagagcaaattagatctcttagtgactgtaactttaagaccatgcttcatgtgaagaataatagaaggaactgggctcgatcttgtgtccttcaacgacctttatctcatagttttgtataattttcacagccactgtcttaatctgtgtcatagccacttctttccccaaacaagtccttggaccggcatttaacgataagaacttaaaagaaggcacgtgaatcaaccttccactctctgaaatccatctctccggtttaaattccgatgcatcttctccccaaactgatttcattctccctaatgagtaaagacagaacacaatcttcgaactcgcatcgactctgtgtccacttggaagaacgtcggattttgtaggagacttgtgctgaaatggaaccggtggatatagcctaagggcttcacacaatgctccatgtaaatacaccaacttgtttaactcttgagcattgaatgaatcaaaatcattggttcttggagatagttgtgtgttgatttcttgacgaatcttggttatggcttttgggttcttagagagaagccaaaagaaccaagtgagagcagagcttgtggtgtctctaccagctaacatgaagcttaagatcatgtctctaag

SEQ ID NO: 30812 - DNA, 1861 bp, Arabidopsis thaliana landsberg
  unsure (1)..(1861): unsure at all n locations
ttaagtaagaatatatcacatgcattggtttccaacggatgattagactcattacaaagcttcaataactaaacaaacaaaagaggacataatcccaaagaaagtaagatcttattccatttataattattcagatgatagagacacatcaccgatacctcaaagacgcacacatgaaatgctttatatatccaacataagagtaaaatcaagtatcatcaacaagctgcaatttggtgtatctcaaaaggagaaaaatacattttaatttatctctaatggttttcataagcttgtttgaaatctccattgctttcttttgttttctcctcttccgacatttcttgatcaacaagaaaactcaccgcttgtgtcccacaaactggccattctttggtatgattccaggtttgctcgtggagattcatcgtgtttacgacttcataaccgagattctcgaggtcacaaacctaacctatccttgcacaggcccgtgtttcgcaaacctcgacatgttagtcacggttgatcctgctaatatccaccacatcatgagctcaaacttcgcaaactacccgaaaggacccgaattcaagaagctattcgacattttgggagatggcattttcaatgcagattcggagttgtggaaggatctgaggaaatcagctcaaagcatgatgatgaatcccgagtttcaaaagttttcattagctacaagcttgaaaaagctagagaaagggcttgtcccacttcttgaccatgttgctaaagagaagctcgctgtggatttacaagacatgttccaaagattcacgtttgacactacgtttgttttagcgaccggatatgatccaggttgtctctccgtcgaaatgccagaagtggagtttgcaagagctctagacgatgcagaggaagccattttcttcagacatgtcaaaccagagatcttttggaggctgcaaggcttgcttgggttaggagatgagaagaaaatgacgaaagctcgctcgactttagatcgtgtttgctccaagtacatagctataaagagagatgaggtaagccgtgggactaacaatgttgattctcattctaaagatttgctgacgtctacatgaatctggatacgaccaagtacaagttgctgaatccaagtgatgaaagattcctcagagacacaatcttgaccttcatgttagcgggtcgagacacgacaggatctggactcacttggttcttctggcttctcattaagaacccagaggtcattgccaagattcgtcaagaaatcaacacagctctgtttcaaagaagcaaggttgatgatgatgcttctaacaataatgattctgattcattcagtccccaagagttaaagaagttggtgtatctacacggcgcaatatgtgaatccctcagactctatccacctgttccgtttcagcacaagtctcctactaaaccggacgttcttccaagcggacacaaagtcgacgccaactcgaagattttgttctgtctctactcattagggagaatgaagtcggtttggggagaagatgcattggaattcaaaccggagagatggatttctgagagtgggaattcggtacacgagccatcttataagttcttatcgtttaacgcgggtccaagaacttgtttggggaaagaagtggctatgatgcaaatgaagagtgtggctgtgaaaatcatacagaattatgagatgaagattgttgaagggcaacaaatcgagccagctccttctgttattctccacatgaagcatggtcttaaagtcnctgttnctaagagatattgacttggttgtttttatttacagtataagcaa

SEQ ID NO: 30813 - DNA, 3800 bp, Arabidopsis thaliana landsberg
cggcgttcactgttccttcaatgctatctccgacacaggactcatcgaaccgccgatgttttcaccacgggttctttttctacgccggcgccacgccatctgaatatttaccgctgcccacgtcctccagtttgaggaatagtatcttgcggtccgcttaagccgctcgttcgcgaatttataacggaaatgatcggtaatgtacctaagatcttcggatccgagggagaatgcctcgatgttttctaggcagacaaatgttgctgaggaagggggaagacggtccagaaacgggcgacgtaggcaccatgagagtagctcgtcgcccaagtaaccgcctggttctagagtactagtggctaggacgcctttgcttaggctctgtatacgtttgactcgtccacgcatgatgaatatcattctctgtacaggatctccttcacggatgatctgtgacaatcaacaaaatcgaagaacctcagattttactcttcaagtaaactcttaaaccgaaaccgaagcaaaatattggaaatataaatttttagaaatgatgggatgagtaccttttcgtctttagagaagactcgaggcttagcccgatcgcaaatgttgtcgaggatcaagtcgtccatgcccctgaacaatggcacctgagaaagatcaaacatgtcagagacttaacacttactgctttcacaagtcttaacaagattgtataaagtctgcttcctagtaccttgttaatgagatcaaagcaaagatatcgtttgatatctcttcgaagacccggaggcaaatcatgtataagttctagctcgtcttcaccacccaaggcattccatctctgccgctcaaatcgcctaaccctctgtcttaaccgggaaggtaactgcctacgtttcatccaccattccatatccctacaccgtatctgcattttcctttttttcgccattaccgcatgcaaaaacaccttcaaaatattgtaaagtaaaaagcttgttaaactcttacattccatgaaaacacaatatcatagaaaagacatattcttgcatagtttacctgaatgtttcctatcaacagcgtgaagagtaacaagccacttagaaccataactatactgaaaataacctcgagccagttgcttgtgggctcaagatcattcgcaaatgtgctgtaaaaagcgacacccaaaacagattcagtatgtcaatcagagatttttatatatccaagatgtaaaccttaagctcagaaacaaagcaactacctgagagtcattaggccccagaagatggggtaaaggatcttaaccgcaagagagttgctggagatgactggaagtgcccaacggtagataccatatcggaatggtccgtttgagtctaagcacataggcttattgaccacactggtaaggtttccagataagcatggatatccaactgtgcttgtcggtgacacaaattggtaacagacctcttctttgcaagccagactcagattgcagttcccggttctcatacattgatgtcttatgcaagaagcaacacgctgtattgcgagaacataccaacatcccccagcaacctgaaaccaccagaatttccataaacaacaaactttaatttcatatcttaggacagaccttagtagtactatatatatacacatgggatttgttatattgcatttgctttaggacctgaatataacctatgttgcaggacattatattcaggcagaaatacaatatctagcttgagaggacttacatgagaagcgatgaaatatgcgatgagattaagagcaaaaccccaccaaatagttccaaaaatgtaaccagtgaccttctgcatccttctcatcaaacagatgcagtgataaatcttggggaggaactggaacaagaatattagcagcagaatcgtcattatcagcttaaccttctcttctcttatcagtttcggcacaactaaccaaaacactgcctgcaaacaagcaaaaacacaaagttcacatcttatctgcatctcaaatcatgattcatcaacaggtaacactttcaaatgtaaatgtgggctttattgatagtaataaaaactttagggttaatttcataatattggaatagttggaaggttcttttgaaatgtcacctgagggacagggaggatgacgataacatcaaaccagaagccagtgagagagcgtgcgtaatgagacgcgatggcgcgtggatcccaaacgagcttcccacaaccaacgacaagcgactctcgagagacgtaggccagtctgaattgaagccacacgtgccaaagatgaacagcgtctagacacgtgcggagcaccgtgaccacagcggcgaacgcaccatccatgtaaagacacgccggcccggtggttcggccgatggaaagcgcgtagaagaaaagcggatccaccgctaaagccatcccacgagctaaaagcaacgcgcggttccatctctgcacgcgcttgctcctaggatcgagaacttcaccaaacggacctttgagacgtcggaatctggttcgggctgggttagggacagatccttcctggatcggaactagagaagagccggcggaggcacgccactccggcgcgtgagcttgatcgcagctagttgaatggaaagctgggacgccgacttgtgtgcaggcgtaacactcgacggagcttagcaccggcgtctcatcgctgccgctgctgctcgaatctccaccgttgatttggaggttactgttttcatcgattccagtcgtttgtcgacggaacttatcggaaaacagtccaatccacctgaaatattcaaattgtaagcaggaattagcaatctatcgccaaaaatcattcagaatcatctcacattcgttatatagtacacaattttgaaaatcgatttcgttgctagatgaacgatttcgcatactcaagcgattataaggaattgcatggtgacttgttagctatagaacagttcaaaaaacgagtgaattttccgggaaaagtgtttctcggggaaaataatcaatctcaggtaaagcttgtaacctctgggtaaacagcaaaagacacaaaatacatattcagaattcgggagtgttttagcgtgaaagcaccattaatgaacgaatatagatatgaaaaaaattgggaattgtgtggtataaaaacctgaagatgaagttggggtgagagggcatgattgaaatagaggaaccaccatgggagagggagagaagaaaatttgcagggagtgattgggagagagaagagtgatttgtatagagaggcaaagccgcaagatttgtgtgtgatacgtacgtctcttagtaggattcggtttatttgttaggggagattccggtttaataactaaaatcgaagatcgaactaaatcagaaaccgaaccgggattgacaagggggagatgatgagctgtcaagtgtatgagagatgtggtggcttgcttagcaaaacggcccacaaatagacattgaacaaattggattccgtacagatcatgaggattgctacgttaaaatggacccatcattttaaatgtaatttctttacgtttaatcattgaacttttagataagtttacaaatttacttgctttatataggaagatgtcataattctaaatctataaatacagtagaagatattttagtgaatgtacgatttaagcatattatcatttgatattattcattaattatacttttttttgtcaaacattcattaattatacaaataac

SEQ ID NO: 30814 - DNA, 1548 bp, Arabidopsis thaliana landsberg
ggttttggctcatgagtattacggatgcctcccaaactctatttacttcattgaggatttagagcctaaggtgttccagctagacaatggtaatggaagtagtatcaccagaaagtcggaatcttccgagagttccttcgaaatgttttttcctagctttctttgaatcttgtgtaggttaaacctactttctttataattaagagtaccaatcatctctaataaaataattacttttcatctttatagatttccaacttttttttagctttctctcacacacatgaaattgtttggtcgaaatcaataaacaaaacaaaacacatacttccaattctggagagattttctccctttctcgtatatctctctacccaaatctcttatctacgaaaatctcttatctactaccgttaagaacccaaatctactaatcgtatatctctctacccaaatctactatcattatgaaactgaggagacaatccatcttatcgacttctttgagacttccctttggatgtgatgcttcagcccgtatgaaaatctgtggttactacaggacatggctattcatatggattatgaagctgaggagacaattagaagagacactcaacgtgtctcgtttgacctctaataagagacgtggatgagtcaagacttgttcaagaacaacttggtgatatattgtttgccaagcatggacatggacgcccataagtttgacaggctacaaaacctagggattaaatgtcttactcgcaatctcgataatgagatcagttgggattggttccaaattttctcatattttcattgaatttggacatcattgatttccttaggacatggttggcttgagttgtaagcaagcttgttctcattgactgattgcaagaaagaaactctgaataaataacatctcaatgcttcatcatgataccgaaaaggaagatatatttatcagttgtattttatcatagatatgttgcatcttctgtataatttttcataccgaaaatgaagagaaagataaggtttttattaaaatgattggtatccttacattataattaaagaaggtagctttgacctaaataaacattcagagaaagctaggaacaaacatttggaaacaactctgagcataaggatatatcgttgtctcgatactacttccattaccattatctagcttgaacaccttaatcatggtatcgtcggtgaagtaaatagcgttttcaagacatccgtaaaactcatgagccaaaaccgagaaacaagtatcggtagctatcacaaatgccttatctcccaaggacttaacctccatcatttttccttgttcatcatcaaacttataaaccttgaaaccgaccgttttcgcatactcatacccggtgtcgtcagcttttctcttccaagtactctctccaacaagtctttccacaatgtaaaagtctccacaacattccacaagtctcctatctccggtccagtcaccaactagaggtccaaacctaatgaatttaagatcagaacgaa

SEQ ID NO: 30815 - DNA, 3277 bp, Arabidopsis thaliana landsberg
tcaccacacctatatacatatacatgtacaccaaactcattattttcacaacattcattataaatgaatctacaaatatatgaggaagagatgactaaccagaggtaaagagaagagctaagaagaagatggtgaatgtgaaggagcttttcatgtttctttctgctaaaagtctaaaccgtgtgtttgagaagagacaaagacttgtgaaattttgtgtgattttttatcccattgaatatatacaaatattttagggagatagtttgattagaaggaaattaacgttagctattttagtacctaagcgttttgaatttgactaaacaaatatatttttctatatagtctctgtttgtttgaaaagaaacaatgacttgtaagattttgtgtgatgtgttattccattgatatgcaaatattttagggagataatttgattaaaaagaaatttactttagctattttggtaactaagccaatttaatttgactaaacaatatggtttatgaaaaaaatcagtttttctatataaaatattttaaattttcaaaacatggccaaaatttcaaaaaatcattgtattatccatttttcttcctaacactttttttcttataaacttgtccctaattcatgaaattatccatttagttaaacttgacagagatttcatgaatttaaaatattaaaaaacttaatcatagagaaagtgattagagagccttccggcttgaaaacaacgccacaagaataggaagaaaaaaaaagaatgaaaaaacaatcttccaaggaagcgttaaagagacgcaggcaaagtcaaagtcaaatctctcgtttgtttataaaatgaaacctcaaagtgctcttttccttcatcagaagatcaccatttcttttgcctcagtaagctcctctttcactatctccgtcgttgctccgcttcctactggttcaaaggttcgatttgtgattcttgaaacatttctaatactgatctctgtctttgttttgcttgatttgggttagatcatattttccttttgcaattagggttcttgagttgcttcttttgcacgctttctcatactgtttccttatcttctactttgattctctgttttcgtttgtaagtatcgattcaacagctttgtatcgattctctgtttttcttttttcttctttgttaacagtttgaaagacaaaagaagaatgagggttgatttttctgagccagagtacaggaactgttaccattgtcgcgattcaggcatacttaatactcaagaatctgaaccgaacaatgtgattggctcatccatcacttcagttccggttagttccggaccatttcaagctcttggacatgcttctgctgctattggttcaacctcaacatcatctccagttcaaagttcttcatcattcaactttggatccgctcctgctgccaccacatctgttggtgtgtctagtacttccacacccacacccattagcttcctcccatttggttacgtcccaccacctccaccgagttcttcactgtctgggccagcgcaaaatgtgccttggagtattagtgcttattctactgcagggcgcggtgttgaatgggcctgggccagacccgatgttgctgtctatccagcatcctcctcctcctcctctactagtacagtagtttttggtacaacaccagtgagtgtttcttcactgtttgggccgtcccaagatttccccaagactacttttgcttgttgttcaagcaccccagcacctacaaggtgtgaatgttcttttgctaaacctttttttggttcctcacctgcatcttcctcttctaacctttttggaccaaacccatcgacgactactgcatcagtttttggtacatctgcaacgagtggttcttcattttttgggccagcgcaacatccactaagttacgactctgttggtggttcagcctttgctggtgttaaaacatcatctcctcaacctcttggcttcaatgaagctactactctgttgccgaggtcgcatgatggacaaaacatatcttctttcaagccttatctagataaatgccatgatgaattaaggtgggaagattacaagaaaggagctaaaggtaactaactcatcatttatatctttggtatgtacattttctcttatatatctctctgtaattttgactaatctcatgttcaggtgggtcgtttcctgctgctcatgcctctcccatagccataggctcaaggccaaacgctgttttttcaccatcaacggtatcaccatcaatatttgcttctccaagtgtacctgatcatcaacagaggacaaattttagtacaacgcaaggaaactttactggtcctgcttttggtttcttccctgctgctgctggtggtgctacaacattttcacctagccgttttggtcaacctaatgcgcctttcactggtttcggtccccaatttcagagctctttttcatcattctcaaccacatttcctgccgtaagctcgagtgttcagagaccccatgaaacagctgctgtttcttccccagcatttggatgtacagcgtgtggagcaacaagtagcaactctgcttctggtcatttcacctctcatggagccacaagtcctccatcagctgctacaactcctcccgggttgttctttcctaccactagttctggtcctatgatgtttggaacaactcttgctgctcaaggcacaactccagcacttcaaacctatcctgttcaaggtttcattattctcccatttgccaccatgagtctgcagtaatttctttactctccagcagttcaagcctatcttgttcaaggtttcattcttctcccattcgccgccatgaatctgcacttctgcagtaatttctttactttctgcatcaaactctgtcttccaaattgtaggactaagtctttgtcttgatttaagaaaaagaaaaaaaaaacaattgtgtcaaatttatgattgtctttgtaaaattatagctgtcatggatggaaacagttcgtgttacatgttcttcctttgaatgtactatatatcaacatcattattgtgaagaaatcaaccaaaaagctcttttgtttctactataaattaaccatctccactgttttgtatgctatgtatgatggggaggatgtggaattcagactaaagtctaatgtctttatcctctccagtttcaagggtttaatacacaccacatagtaatctctagcttcctg

SEQ ID NO: 30816 - DNA, 1928 bp, Arabidopsis thaliana landsberg
aaataaataaagatgagagggctaattaatattattgaaaattgttttgttctattgaaaaagaataaaaacatccaccccagtaaatacatttttatgatactttacaaaatcaaataagctatttgtgtaaactttgaaaaaaaatacgtgaataaataccttttttttttcttctcactgataaaaagatttcaaagacggtggcgcacataggtattgcgtgtgcaacgcttacctcacatagttttgacacaagctagacttgttaaaccacatgccatcattttcatttctttatatatttcctgcctaatcaatctagcggctcccacagaaaattactctcctccataccaatctttctttattttttgcatctctatctgtcacacaccaattcttattttatgtatatatattgacgcatacatctccaaattaatcaatagcttatctagttcttgactgttcaacgatcaatggcaccatccgctgcaatgctcatactctcacatcctctagttagccacaaagctaagaatcagtctctgtcatcgccgtcgtctgttaagtcgacacgtgtcttcggttttctttggccttggaaggcattagacaatgaggatcattccgcggttgttctcgtccggctctttggcgatccggctactatcgagaagcgacttccaagaagctcttgaacaaagctgttggtaatttgtacaatgtttggttgggtttattgattgtttttacgttaaaatcgcttttataaattggaaatggaagtactgtaaaatgtaaaaattgactatatataattaaaggtacattatgtgaaatcaaaagacaaatatccggataatgattttttatttttttaatgtaatgttaaattagatttaaaaaaaaattaacgtttttacaacaagtgcaacgtaagttatataagaggtaaaatgaaagctgagattaacattgtaatgaaaacttagaggattaaaagccgactttggagccagaattggaagctagcatcatagcgctggtccttttgtctttggattgtagtgatcctgtttcttattatcatgattcatgcatctgcataatgattaaatgtagctttaggaatggttaagactcctttcattagctactttattaaggcaaccaagcaacaaaaacaccaatagatgaggaaaatagagagcatgtgaaggcaacatccaaacccaatatatagagttgaaaaacagattcactattaagtaatcaaagactagaatggacaacaaacttcaaaatctaaaagaatatagtagataataattagtgagctcatgttgattatagggaaataagcgtttgtagccatcttgggcgtgtccatcaaggtatatgagatatgagttttgatacttggaagaaaaaaagagagagtataataataattgatgagataaaatagttttttaaattttgtaactcttaaataatgattttttaatagaataattgataaacgggaacttattcacagaagcatatgttaaaagacgactgataataactaccatagatgttatttctgttagatattcatcaaatagcaaattatccttattttaaattgtaattatttaaatttatgatctaataaatttaaaccgaatttaataaatatcatagtttacacatgaatgaaggcatttgtatacttacttatgtgttttatatgttgttgatttacgtattatttttatttttgtatatttactaatctacaaaaaaaagaacacaaaaatttacagcagcaataacgtcagcgtcagccaggcctgcccttggcacaaacccaagatacatgggtattggacctccaaagtgtttaagtttttaaataacaaaattaggtttgcaaa

SEQ ID NO: 30817 - DNA, 2238 bp, Arabidopsis thaliana landsberg
taccgcatacatttaattgacataccatgtacatgtaatggtttgtttagtttttcagacaataaactgaacccagctatttaaaaaagagtcaaaagttgatattcgcggaaattttcgtaacggcactatgaagagtctcaaaaatcagagagggaaaaacaaacctgaagtgtaccacgaggaatatgaactgcttttggcttatccgtccgcgagtcaatgcttttttggagaaaacttaacgccctaacaaccttccaaacaagagaaccattcttggtcaaaagtcttaagcaaatttctaactaaacttcaaattaatataggggttgaaatacaaaatgatttgtaaagaacaaaaaaaatgagatccagaaccatgtttgactttcccagtgtttcctactagattctcaggatcccatacatgaaaagaagagatctgaagtagatgtgtagtttattcgtaacattgtacacacttccagcatgaactatttttcggaataccaagcacattaaacaaccctctagtggaggctttatacacttatcaattcttaactttgacagaagcagaagctacacaataatctaatgttctgaatttacaggggttatttcagtgactaaataagttacaccatctcgattctagtcgtaactgaaccatcgatacaagtatacgagaaacagagattgctcactcgttgaagtggtaggaagaaggctgatgcacttgacgacttgctgccagcattcaaagctaccgccctgccttgccaatcaatgacgggagaaccacttgaaccacctttagtacctgatgctgcctataaacacagataccatattaacaaacagtagcgtatgtgtaaggtttacactttgaataacagtagcataacatacttgtgtattgcacaataagctacaaacaggaaagttttaccctagtggtagactcgtgatattttagagtaaatacgagtaagagacacatttttgtggaaacagggattaaccataagcatgacacgactaagaagagaaaacaaggctttgacacagagtgacagcatgcaattcagttcgaaataagttagtgactaaaatttaaagcaataaatattaaagaggacagagtcactttacttgcatataaaacgtattgaagtcgttataaccatccctgcaccaaaaaataaaataaaaattacaaagcaggtagccataagaaactataaaaggtaccggtggaatattactagttcaacaattactacctatatgaaattacgaagatttcatgcaagtatcaagtaacatcaaacaaattttcatgttgaggaataagcagaactaaaaaacatgagcagtgaagcagagatactttttgtaatgtggagcatcccgatccaaccgcgcaagagtaccagccagtatggaaacctgcaaatcaacactccagttaccagaagcattacttatccataaatgcgtcttaatgcaccaaacatatattaaaatgcatttttttttgcaccctaagtttgacatttgacagaataacttgaacaatagatagacagttctgacctcatcaaaatttaaattgagagctaagttgagtaagtgactgcttttataacatgaaactgaaaaatacagtctaaaatatgaagtaatccgccatcctatgtatcttaccttttctccgctatcatttccaacaaccctaatttcgagtccaacagaagccgcctctggggcaagaggaatttcttggtaagtcaaaaactgtacagcactgggatcataagaaaagaagccaaagtcatggacctgaaaagaataccaaagaatgtcagcctgatgacaatgaacaagtcgagaagggagaaaagtaaacataaaaagatgagacacaaattctagctcctgcagatgcatgctcatttgatcgaacataaaccgaaatgacttaccggatccctgtatacaggatagattgggatttcctctcggttcacaaacattgcctcagcaactactgggcctacgtaagaagaaagaatttacaaatcaattttactgaactctaaagagattctctgtctactcaaacccagaaggaatgaccaaataatctccatatccatatcgagctaagccattctagataaacatgtaactaatacctatggaaaatcgaacaatcctaaaacaaatact

SEQ ID NO: 30818 - DNA, 3285 bp, Arabidopsis thaliana landsberg
  unsure (1)..(3285): unsure at all n locations
cctaggtggagctcggagagaagcaagagaagaagttgaagggcctaaaacccttactcgatcacctaagaattacggaagtgcttgttcagtaacacagaaagtggcaccacaaggaaaaaaaannnnnnnnnnnnnnnnnnnnnnnnnnnnnnnnnnntaacttttagaggttgcagttgatacttcttgcctccgaacagcctgagagctcaatgttgatccacctgttataccagcctctacacttgaaattggtttcttatgctgcaaaacagcagcttgtgcagcttgtacagctcgtttagcaagcacggacagtctttcacgcctagaactttctttggtagtatctgcttccttgggtgttgaaccctaaagccatccagaaacagcagagaatcaatgctagcagtattgtgtaaattccaataacttaacagattgcctggacaaatatagcttctaaagcatttggaaccaatagtcagagtgccaatttaataccaatatgctcacgattccaagatagacaaaaaaatatgttacaaatatgcattcaatcaaacgctcaaaatggggaaaaaaaaaacagaagtttaccccaggtaacaagagagagtcaacaatcatcaatttggccccacattgtttcgcaagcgcttttgctaacatttcctgatatatctcagagccttcaaatattccatatgagaatttgttagggaaatggaaatgagaaacaaaagattcataaacaatacttgtccagagtttcccttataccagatggtccagagagtaagatacggggacacgctgttggcaaatctgatgcatactctgcatattcctttccatactttatatgggcatatgtggatatcatcaaaacatccttagttgtgccactgtgagaattcagaaagttgtttatccaaatttggaacaccacaatagcaaagaaatctaatagaaaattataagcacggctgaccttaagaaatatgggaagttctcaaatgaaacttctatgtcctgaggattgagtattcctcctcgcagactatccttatgcgcttgacgtctagttaataccgaagctgatggacgttcatattctttcggcatttccctcacttcccttcgttcatccaccagtattttggaaatgctaccccttaaatcaaattcagaaggatccccaagtaaactcaaaattggtctaatttcataagcaggatcaggaatatttccagcctcaggttcttgaaaaggatccattccattcccatctgcatcatggtcatcgttggcagcacaagaagtcgaagcaacagttttctccattgaagcaatagcagcatgatcattattactatcagcatcgttcaagtcaacatccagaataaaatcatcgcagctagaaggtaacacagggacctctgaattttgctgccttttgacacttttagcagtaggtggtagaaaagggacattttgtaactttgatatagacgccaataaagaggcagttccatcaacagatgaagagtctcgtgctcttgtctcaacgtgaagccctttcagaggggcactctgcgcttcaaaaaggctcaaggaagaagttctgtctggagcagctagattttcatctttaagaggctgaaatatctgaacactagtcaagaaaaaaatagaataaccactgaatatagataataagaacctcatagatgatatatcaaccctaattacggaacgtggataacttttcaaagaacttgtaaaaggatacataagcatgtttcccaggggtggtgaagataatttcatcgccaccccgtagatgaacacaagtactcctttggtaaatcttgccattgacctgaacaagtactccattccctattatctccagcgatgcaactgatggacctccgtgctgcaaaaaacaaaaccttataagaaaaaaggctttcttgtcctgtagggtagtagaagatcaatcagatagtgtccatacctcagactgccttagttcacatagaacattgggcatagaatgatctctgatacataaatcgcagcctcgccgtccaacagtaaacacagagcctctcatgacaagatgagggttctgaaattgcaaataaggacaaaagtaagtggagtcactggaagttgaaacatccctagatagagactagccagtaaacatcccttgacatggcagcagactaaagtggacccaataaaccaaaagccaggatctttaccatattccggtaaaccaactaggctcaatttgctaagggtaatgcgaaacatgcaagcaaacatataaatcaaataacacaaacctgaggaaactgagaaagaagcttggcccaaggagccttagcaatccgcttctttgaggatttcgatttctcagcttccaccaccacttcacctgaaaaaacccaaaacatatgagaaaaagacccaaaacatatgagaaaaagagatccttttttctatataatgaaaggacaacatgcaggcatggaaacctgcaggtgtaggcgtcaccaagccttcaagttctggatttgtgtcggtctccatcgccggcacatcggtggtagtaactggcctctccgcatcgttactctgcggatcagaagttctaagttccgggtctccagatattgatccaggatccgaaaccggtgcttgattatcaatcggcacctcactcgccgacgaagacgatgccggttccgccgccgcctaaacacaaccaaactcaaaatcaacacgaaattccaaaattcataaaacccagattcaaatccaggaggaagagaattgatcaaactcctttctccctaaaatcgaaatccagaatcaagcagagatgagaattgaagcagagccacgaacgtaggtgtcgatcttaaccttggatcgtttggtaggacgtgaggatgaacttgttgcagcacaaaaacgcttggaagcagaagagctacgtctcgtatcaaccatatctctctctctaattcttcttcttcaccgccgccgtctccgccgcttgattcaaagaagagattttcactgcaaaagtcggttttatcttaaataataatattcagacaagtgctgcaactttctcttcttcttatataaaagttcgtatctccactctttttttttttttttttcctttttctatgtcatatttctaaaacatttaacaagtttccatttttttactttaagaaacaaatttcaccctcg

SEQ ID NO: 30819 - DNA, 919 bp, Arabidopsis thaliana landsberg
attttcctgttataacaggtccaaaggattagaaggggctgtttcttctatctcctatcctgttcatcgttcctttttggctctgatcatttcttgtgacatatatatgtgacttttaccataaaaaaaaacaaagcttgacctttcgagaattttgcaacactttgatagttgccacttgccaagatctattgacgatattaccctccgctctgttattcccttagataaatcatatgtgttgtaaattaggcccaatgacaagctcatgaaaatggaaaactaaacagagcttctgtcacttgacgtttcaggttttcaaaagagaaacattaatacagagcggagggtaattttgtgtcgattcatatttttcacagagcaaaaagtttccttcagcaagaatcaattcatatcagaaatacagataataatgagaaaacaccatttttgaagaagccgatacataaagttgaataaatcaattcgatttcatttgtcaagaaccggaactggacccatatcaaaccggttttattgatcttcctttgtctttccgagagcatggggagtgcagaaaatgatgacatggacatagagtgagcaaaggagataatatctactacatagcaatgtgtaggatgacttacatttagggtcaagaggaggaagatttcaagccagagagatggcttaaggatggcgtgttccaaccttaagaaatacatttctaataaaacctgagatgttttctttctttgactatgtatgtaggctggtccaagaatctgtcttggcaaagatttcgcataccggcaaatgaagacacttgttcacttctttcgcttcaaaatggctgatgagaagactactgtatgttactagagaatgcttactcttcgtgtcccaggaggacaaa

SEQ ID NO: 30820 - DNA, 1276 bp, Arabidopsis thaliana landsberg
caggacttgctccacgaggacttgctccacgataacttgcacgaaggctctcatcaacagtagaagatgatttatctattgcctttctgaaaaacttctgagcagcgggtgaaagagtcctaacattcggacttgcacttccacttcgatgaggagatggcaacggaggtttcttaaacatactattcgatctctctctaagttttcgcgatgcatcccttgataatgaatgtgcccttacatctctaggaggtgcagatggaatgttatagtgcggtccatcagcactaccaccaatatcaataggtgtatcctcaagatctaatcgcattggtgtcccatcaatctcaccccatgttataaagggtgattcatcaagacctggagcaggagaaggcgttctaacaaaactatacccattgtctgccctcttatctgattccacatagaaaggattcggtgttttccttagatcatcaagatcataccttttagacttgtctctgtccctacctgagatatgcatcggggaagaacctgcgattggagtgtagagaatctcaacagaaccattttctcttggcctagaatccatagtcttaccatgaaaacgagtgttccctttaactatctccttagtcaatccaagtaatctcactgccctttccgcctcagttaaaggcgcctcaccccgatcagctggatggtacatcagaagattcttcgccgtatatttccatccttctaaagtactcggtggctgatcagatgtaccatacccatctgtaatcctatctctcttcacatcctcaatagatttaccatcctccttttcaccttcaaggagaaagccatacttctccttcttcttcctatttaccttctcaagaatcttcgaaaagctctcgttatcctcactagtatatctcctaaagaactcatctagggacaaattaagatctatatcttcatctccatcaccagcatctacttcaacaccatgaaattctctaccagatactccaggagttctaggggttttaccatcaaattcatctaaaggagtgaaatttctcagaaaagtagatccaggagtttgagttttaccctcggtatctccaacatgatgattcgccttctttccacgcctctcgataatcttcaactgggcatctcggatttgaatcgggtcacgggttttcaccgcttggatccaatcgagccgatccctaagcttagttatatctggaaagtaatcacgctcgatgatcttctc

SEQ ID NO: 30821 - DNA, 1672 bp, Arabidopsis thaliana landsberg
aggtatttagtctcttcccgttggtcttaatctgatatttttggtggtcctgctgcttctaattatttattggtttcatgattctagggtggtgtagaaggaaaaaggcaagttgataaagtcatcgacaaatgtgcatccatgcaggtatctgtgttaagtttttatcttatggggtttcacttagggtaaaatgtctaaggtttattcatgaattaacttacagaatctacgagaggcaattgcaacctatcgcagtagtattttgcgtcaacccgatgaaaagaagagagaggcagcactctcattttttgttgagtacttggaaagatattacttccttatatgctttgcagtatatcttcattcggagggtgcttttctccaatctggttcgcttggccatgtcagttttgctgattggatgcgagctaggccagagctctatagcattcttcgcaggtactgatatttttgcctgtaacctggtatgcttctgtttgcttgtaaatctggctgtatctcagttttccataggagcagttgaagaacaactttgagaggcttttcctatatttaagtagctcccggcagctgatctatttacactattgtagcatatgatcttcagatgtctcatgtatgttcattgtctcttctaggttgctcaggagagatcctatgggtgcccttggatatgcagctatgaagccttctttgataaagattgcagaatctaccgacgggcgccctcacgagatgagtgtcgttgctgcgcttagaagtggggcagttctgggaagtcaaactgttctaaagagtgatcacagtcctggctgtcaaattttaaatctaccagagagggtggaaggagctccgaattttagggaggttccaggatttcctgtgtatggtgttgcaaatccaactatagatggtattcgatctgtcattgaaagggttgggagttccagaggtggtcggccagttttttggcacaatatgagagaagaacctgttatatatatcaacgggaaaccatttgttctacgagaagttgaaaggccatataagaacatgctagaatatacggtaataatctatgttttaaaacatatttcaaatactatttagatgcaatacctttgagtgattaccctcagtttctcttcaactcttatggattggtctgaaagcttacataaatacctctatgtagggaattgatcgagatagagttgaagggatggaggctcgtctaaaagaggatattctgagagaagctaagcgatatgacggtgcgataatggtcattcatgaaaccaaagatggacagatttttgacttatgggaaaatgtagatgctgattctgttcaaacacccctcgaggtttacaaatgtttagaggctgatggttttcctattaagtatgcacgtgtacctataactgatggtaaagcccccaaaagctcagactttgacacattgacatctaatattgcttctgcttccaaagacactgcttttgtcttcaattgccaggtttagtttccttctttgtcccaatctgcttgtgtatttcgatatatttggtaatcctcttaagcttatctgttaaacttacagcatttcatttttcatatcgacatttacagatggggagaggtagaa

SEQ ID NO: 30822 - DNA, 874 bp, Arabidopsis thaliana landsberg
  unsure (1)..(874): unsure at all n locations
ctctcagtcaagtcaagacttgcagcatcagatcataatccagaggatctgttttctttaatacggtttaagtttctaatagagttctcaatggaccgggaatggtgctgtgtgatgaagaagttattgaatattctattcgaagaaggcactgttgatccatctcctgatgctgcgttatcagaactgtgtcttcttcacagagccgtgaggaaaaattcaaaacccatggttgagatgcttcttagattcagtcccaagaagaagaaccagacattagccggtttgtttagacccgatgcagctggtccaggcggtttaacaccgcttcacattgcagctggtaaagacggttcagaagatgtgttggatgccctgactgaggatcctggaatggtaaatttgaatttgatttccctctttgacttatataaactcaaaatctgtttttgtctgataaaaaatcttcttgtttggttcagactggtattcaagcctggaaaaattcccgggacaataccggattcacaccagaagactacgcacgcttacgcggtcacttctcatacatccacttgattcaacgcaagatcaataaaaagtcaacaactgaagatcatgttgtggtcaacatcccagtttctttctcagacagagagcagaaagaaccaaaatcaggtccgatggcttcagccttggagatcacacagattccatgcaagctctgtgaccataaactggtgtatgggacaacacgcaggtctgtagcgtacagaccacctatgttgtcaatggtggcgattgctgcagtttgaaaatgtgtggcacttctgtttaagagttgcccggaagtgctctatgtgtttctnccgtt

SEQ ID NO: 30823 - DNA, 1941 bp, Arabidopsis thaliana landsberg
gagtagactcaccaaaccggaaatatatgttcgccaagttgctgtttcacatcccactgatattttcccatctaaggcactcgcgatgaactccaagtggcttcccaagattgcttggcggcggcgtttggatgcagatgatcttgaatccacgccccaagtaagtgctccacataggaccacaaagtaggcaagggcatgacctcttagctctgcaactagatccgatggtccttgttctcggtctgatttgtcagttgatagaaaccaagatgggatcgtttctttgatgagaacgtggaccacacctaagccaccggttagccataccaacgaggcactcagcgaagcatcaagcttcacttgagtcattgctgttgctagagaactttggccgtatcttgatccgttcttcactgtcttcagcttttccagcttcttctttgagagcctgttctgggctatatcctccaccgaatgtatcagcagagagagaatctcttccgatacggagacagtatctctgagagcacgatacatacggagataaagaatccctggtgctacaggagagatccctccatagaaatgagagccgaatccatggccaagaagagctccaacgccaccatcatttgacatgggggcagcattcaaacccagagtggcactgaagcagtttctgaggagctgaatcacagcgtcttggttgtgaaggaagacggtgcgagaggcagagaaaacaaggaagtcaaaccaacgtttcgccttttgggtccataatgaagctacaatgggcatgcaaggccaagggcagcctgcagccaagcactccagagctgggccagccaggttgagaaaccgctctgaggctttgtcaattttgtaagtaatggttagactaacaaatgcggctagaggtaaaggaagcgttgccggagaactccctcctgcaataccacagcaagaagtcaaccataagttcaaaagacaactttaactttaacacatcaaatcaggacaggtaaaaagcttattataaagagaggatggtacagactacagagatggtaagccaaacaaacagactcggcattttaaacacgttgaatagttttacctggagcaaggctagggatatcgacgcctgttgttgcaagaatcttcgttatatattcctcaacagtggatagatttgtagctggacttggccaatccacgccgttcatgaatactggcttccaaacacctctactcacctcagctgagaaatagcttactatcgttgctaatgatgccgggagaaaatctgctaagtctttcagccctgaaagaaaaacacttgttattctgtaaataaattcactttactgtaagaaatgcatctgatataacaactgatcaacacagtcaaacatctctcattggcattcagagttgccaaaggtcatatagacggatgttatcgcacatgacaacacaattaggaatctgatccagcaaaacaaaacaaacctgtagctaactgacgaggcgaaagccttccatgagtacaagcggttaaagcagcatcgacaacatatggaacggctttgaggatatcccaagcaggaaactcaggtcttatattgctatcttcacttgcagctcctgatgaactgcttgtgcccgaatttactggatttaaagtctgactgcctctgacctttccgaacgtcatgttgagaagtgcttcaactgtctgatgaacgggagatccatgtgtaagtccagataatgtggctgctatgcatctttggtgctgcctataccagactttcagcttggggaacgagtccacaaacacgggatggcaacatgctgcccttgcaactacagaaagtctcattctgtttcggtctctatcaaggatctccgacgaaacaagataagaattacgca

SEQ ID NO: 30824 - DNA, 1175 bp, Arabidopsis thaliana landsberg
cccaataaagaacaatgaaagctgattagcaactacttatcattataatatatagctaataatctactgaacggaaatggttacatacagaagatgagcaggctttcacagcatgacttgaacctgatgaacatggatttaaggtggatccatcattgcaagagcggaacttcttagcacgagatccctcaagatcaacttgacctgtatttgtagctaagacttcataagatgaaacatgcaacttttcacaaacacagcactaagcacagtatatcataaagaccgtacgaatttgtgatttaaaaggtcctgatgaatcctttttactatttctcgagtccggacaggaattataaacctctgcttgacgaagatggcacattacagagagccagagagttgatggatctttgtccccagatccatctgaaacctctctgaatgcagcaacgacttgttccttcgaataaccaaacggagtaaactgttgaagaaaaccaataattttaaacaaaaaattaatactggagaaaaagatgcacctcgcccccataattttaaaccaatcaacaccgtataagaagaattaaaggttcaaataacattatgatggagtaccttttcaagaatatcgcttggaatggctgattgtgccctacatcttggatcgacatatggaagttcttctctcatggtaaacgaacaggtgggattttgattaggtgttttctttgcttgcggtgtaggatccatttcatcaacagataagatatcaactgaatcaggtaatccagatcgcaggatacactcatttgcaacttcccgaccttcaactgtcagcatgtacctaagataagaaacaatgaagtctcaagataagttctacttcttcacaaaaaatacaagtcaagggcaccataaggcagagtttcagataagagcttttactttgctgggttgctagatttcaccactaatcccttctgtataagagtggtcatgcagctccatccactataccactccctcttagagtgtccaagtcctgctttccctttccctttctctggcctagtcaaaactcacacgaaatggaagaataagacatacagcagaggttgggtacaaaaccaatatattagaaactgggaacatcacgatatgattcatac

SEQ ID NO: 30825 - DNA, 2838 bp, Arabidopsis thaliana landsberg
aggtggtggacctcctggtaaagctccttctaggggagagcaaaatgactattcccagaactttgtggatactggaatgcggccccagaatttcattcgggagctggagcttaccaatgtggaagactaccccaagcttagagagctcatacagaagaaggatgagattgtatctaattctgcttctgcaccaatgtatctgaaaggcgacttgcatgaagttgagttatctcccgagttatttggaacaaagtttgatgttattcttgttgacccaccatgggaggaatatgtccatagagctcctggtgtttctgatagtatggagtattggacatttgaggacattatcaatctcaagattgaggtgactatcctctacactcttcaattactcataggattttagggtacatgcattcgctcgttggtatacttcaattgctctttgcttagcaatagatctaatagcggggtagcatatatcatctgtcatctgagtattatctagatgaagtagtggtactcaacatatagtaatttaacttgtgtgtaggaccttgtgggtaaagttacctagatgacgtagtggtactcaacatatagatatagtaacttaacttgtctgtaaatcttgtgggtaaggtttcctagatgatgtagctggtacgaaacatatagtattttaacttgtgtgtagaccttgtaggtaaggttgtttgccatcattgttatttataacaaaagtgaattcttccatgtatatgtaggcaatagctgacactccatccttcctcttcctctgggttggtgatggtgttgggcttgagcaagggcgccaatgcctgaaaaaggtacaggatccaaaccaaatcgcatttcctttattgctttggatttgtttctcttgacagtatgtacttaatctgtatttattttgtttgggtttgacagtggggtttcagaaggtgtgaagacatttgctgggtgaaaaccaacaaaagtaatgcagcaccaacattgcgacatgattctcgtactgtgtttcagcgttccaaggtccagtatggtctgccattgccttctcttttgttttccgtgttgcatatcttttgcttaatcttttgtattggtttctctttgtataggagcactgcttgatggggataaagggtactgttcgacgtagcactgatggccatataatccatgctaacatcgacactgacgtaattattgctgaagagcctccttatggttagtaaaatgtgtgttcctgatagactgataaaatcgagagtgtcttgcttgtcatatcatgttccttctctctgttctgcttccagcatcctgtttcttttaaagtgggcatgctagtagtacatcagcaatcaattgtgtataaataggatcgttgcttaatgtgattaaggtatcgagtgtttttgtatttggtactagtgttgggaggcaaggttttgggttctcgaaaacaaagacctatgtttcttttggctctcggttatggtacacgtgattagtttgctggattagtcttgggttatccacactgtaagctggttcattgagaaatacattagattctgtggttgattttagcattgccatgtctaaaatattagtgaatttgtatcctcctattattgcaagctggtttgcttaactgcatttctttacgttgcaaaactccaggttcgactcagaagcctgaagatatgtataggataatagagcattttgcacttggtcgccggaggcttgagcttttcggtgaagaccacaatattcgagctggctggcttactgttggaaaaggcctttcgtcctcaaactttgagccacaggtaagatctcatgttcgctctgtagacatctatccacctcctgtttatatgagctttagacctatgcaaggagcttctttgactgtttgatctgttttggatattgtgtgctttaggcttatgtgaggaacttcgcagacaaggagggtaaagtgtggctaggaggaggaggaagaaatccacctccagacgcaccgcatcttgttgtgactactcccgatatagaatctctgcggcccaaatcaccaatgaagaatcagcaacaacaatcgtatccatcgtctctagcttctgcaaattcctcaaaccgaagaaccacaggaaactcaccacaagcaaatcctaacgttgttgtcttacatcaagaggcttctggatctaacttctctgttcctaccaccccgcattgggtgccaccaacggcaccagctgccgcagggccacctccaatggacagctttagagtacctgaaggtggcaacaacacaagaccacctgacgacaagagttttgacatgtacggctttaattgagcctctcccaaaattgcagagtttccagaaccgtttctattgaatggatattttacccctttgctttgagaaactctgctgcgcacggttttggttctctttttgtaattctgttcattttttcacttccgtagagccaatactttatattcatttcattatcaatcaagcttttacctaataatcccaatttgctccatacaatgtgatgtatccaaatcaaatcgcatttaaccaccctttatattcacaattacaaagtcttatatggtaaatgcatgcagtgtcccagtaatcaccaaacaaaaagtccttagagactctggagtagccatgatttgctcaagaactacttgtaggagccttaaggagaccagagtctaagattcaccctccccacattctaatagaaatctcttgtactcgagctctactctgct

SEQ ID NO: 30826 - DNA, 1710 bp, Arabidopsis thaliana landsberg
atctgctcctacactgagccataatggcttactcccagtagaaggctggcagcagaaaagcatatccttcttctcaagctggtttaatctcaaaaaaaatgtagatgccctgctgctttgtttgattgtattctgccgagtcagtaaaccttgatcaacaaatggttgatcttttccgcaaccagaactcactgcgatgcaataaccccatgcataagaatgatgagagttttcaacctttggccggatatgcaggcactgttcattatcctttgataaacatccccatggcaaaacatatgaagatctagaggcaatcacagcattatgattgcttactccagaagagacattctgatcggaagatatagatatctctaaattgacatctgaatcatttacaactgtagctaaacatctgaatgttgcgtgctttctcccatttctcatagaaacttccattgcaataaaatcattttgtagtgatttcggagcaatacagagcggaagcagtgagcgaatgctatgccatgagtcatcaggacgaaccccgatccagaaaccagtgtctccgtcaacaaaatccttactttccatatttcttagtgtgttcgggattgtcgtcttctcaaagtaagatgttgagataagcaagcacccgttgtcatgtttatcttcagcattctttatttcatgataaaatggagaattgaaaatgcatgttataaaatcttgagatatacgttaacacaccctagtataaatgaaaaacagctaacctttctctgaagcgtatacgaacttatattctcggcatcacttgattgatgtagcatccttactgaagctacctttctaagcgtactttccccatgtccaacaggaaacgaaagtgacccgacgacctcccctgtaatagtcaatagctaactatcatgcaacataggtaccatcttgactcattgtgaaaactcttggaaaaatgtccagtcatcttttattcacgaatcaggtgcaaacaatccaaggactcaatgaaaactaaacaataccaatcaatctcaaaaagaacacaatcacacacataaggtatagttaaacaggtcaaagaaaagagtccaagaattaataggattgaaccttttccagctttagcagcaaggtttgtgacctcaacctccaatctggcaactccctataacaattaaacaaatagaaaagaaaaaaacagatactcatatgagataagttccaaaatcatgacaactgttttcagtttagaaatgaatattgcagacagacataccaatctaacttgtaccactaaccatctaaatcataatgtatacagggatagcaactaggcttaagcgcttatgtataccgcatatttgaagaaacagagaatatgaataaaggaagcatagattaactgtttccttatgaactaccttccgtggaatttcaaaaataaaaagttcattccacttggaagtgcactccatcaagtcgttgacaattgtagtggaaggcttgacacactttgtcctagcactttgaggaaaaagcttttgtggttctgcaccctgactatcaacaacgaggcgtagggtgcaaaagaaactgtgactgttaccatcatcaataatatgcaaaccctgaacaaaaaagtgaaggtgtcatcttaaccatacaaattcaaacatgcca

SEQ ID NO: 30827 - DNA, 3128 bp, Arabidopsis thaliana landsberg
tgttttgtttcttttccacaataagatccaattttttatatattaaaagaaggtacaattgataataaaatcgttaagaccaaatgatataattgccatatttgtggtcttttttgttttgttgaaactgtatatacagaagttggcagatatagtgtgaacaaaaaaaaaaaaaaaaatttaaaattcagagatcatttggcagaaagtaaagagaaatcgtgcccgacatgttctatttctaatttatactattgatgacatctgaacataacatgtgtatttcagaatcacgaattcgaattgctactagtgttttttacaatcttaatggaaataaaaatgttatttgatcgagtaataaatattaaaattttgaaatcggtctggacttggacttggacttggtgggccaataataaataaatccaactaatcttttcctgatttcatgattgaaacgtgaagtgaaagattaaacaagagaaaaaggttagatagctttctgaacaaaaagagagaatttggggatatagatagaatccgccattgaagatcccttccctttgacctgttgagtgttgacaacctgaaaagaaacaaaaaaagaagaagaccgcttcatcttctcaacaccacctctgtgttattgctctcttttcttcttcgacgacttctctcacacatacaaaaggtttgggattttttttggtagaatctttttaagttatctatcgaaatcagttcttctgggttgttggtgaataaatctacttttcatcttaattaggacaaatctctctaattaaaacgcctcagattttgtcttcagttgttttgttttaaaccctaagttacttgtaagttaaatgaaatctacaattcttaatttatctcttgtttccaaaattgtgaaaaaatccaaacatatatagaatagacacgtaacggctcaaagtcggtaattggaggtaacgtgattgagtcttcttcatcaatcataaatcttccctcttaagaattaagacgccgcctcattacacctgttccataatcatcgtcaatatattcattctgcaaaactattcttcttcttcttctttcaaagtcgtaattgctctctctcacccctaggttcttaagtcatacccattttcaaggacaccttagaaagtttcaagttttctattaggtaattgcatgttgaatcgattacgttcttcttgtgattccccttttttctggcccaaagaggataagattctaaaaatctgaatctttgtatgcaggtgtattgatcttgaagccttaaagtttgtgtctttttgttaatttgaataaagtttgatgggaggagggaattccaaagaagagtcgtcatcaccatcttcatcatcatgggcttctcatcaaagttatcctcaatatggacctgatagctacaactatcctcctccacccacttatgctcccgctccatctcctgctcctgctcctgctccggtgcctgctccatctccggcttccagttatggccctcagtatagtcaagagggttatgcatcacagcctaataatcctccaccacccacttatgctcccgctccatctccggcttccagttatggccatcagtatagtcaagagggctatgcatcagcagcatcacagcctaattatcctccacctccttcacagagtcaagttgctgacaggaagaaatttgatcggaggtattccaaaatatcggataactactcttctttactgcaggttagtttaagacaatgcataccctatacacttggattttcccctcaaaggttctttggaaactgaatctagcatgtgtctgaattgattccaggtgtccgaggctctaggccgtgcttgttttgaatcttctaatctaatcgttggtattgatttcaccaagagcaatgaatggacaggtttgttatattattcttattcttacgttttgaatgtaaaggagaagccaaactaattggttttggtactgcaggggccaagtccttcaataggaaaagcttgcatcacttgagcaataccccgaatccatacgagcaagcaattactatcattggaagaaccttagccgcctttgacgaggataacttaattccttgttatggttttggagacggtatgcactgttttctctcttctcgattctcataagaatgtatatcaatcggatcatcattgacttgctttcatctctttgcagcatcaactcatgatcaagacgtgtttagtttctatccagagggaagattctgtaatggatttgaggaagtattggctcgttatagagaaattgtacctcagcttaagctcgcaggtttatttcctcctctgacctgcactggccaattctatatctccttgtgaaacgcaagttataaacttaaaactgtgtttttttttcctgcgaacttatgtatttcaggaccaacttcttttgccccgatcattgaaatggcaatgacagtggttgagcagagtagtggccaatatcatgtgttagtgattatagctgatggccaggtactgattaatattttgactgcctgagctgtgtatgatcttctgattttgtgtctagggatatcaaagtggacccattttgttgtttcaggtcacaagaagtgtcgataccgaacacgggcggctaagtccgcaagaacagaagacagtagatgcaattgtgaaagcaaggtgcgaatatttcaatcttttgactaatgtttcttccattttaaagttctttactttgagtgttatgttataaagtgttatggtatgtaatcagtttcatcctctctattacagtacccttcctttgtcaatagtcttagttggggtcggggatggaccatgggacatgatgcaggaatttgatgataacatacctgcccgagctttcgataacttccaggtaagcttctttttttcatattatgacattgaagattgcttcttttcttcagtttggaaccatttctttaacatgtctgctctgtttctagtttgtgaacttcacagagatcatgtccaaaaacaaagaccagtctcggaaggagacagagttttgcgctgtctgc

SEQ ID NO: 30828 - DNA, 4413 bp, Arabidopsis thaliana landsberg
  unsure (1)..(4413): unsure at all n locations
aatttattgactagaaaccagcaatgccagttcccagtggcaacccagaacacccagttcccaatgaaaaaccaacaagcttggcttcagatgaaaaaaccaacttattggctttttatttggtaaccagcaacctcgcatgaccataagaaaccagcagccttgcttgaccatgggtaatcaacaacctatgtatctgataggaactccacggcctgcattagtaagtggaaaccagcaactaggaggtccccaagggaacaagcggcctatatttttgaatcaccagacttgtttacnnnnnnnnnnnnnnnnnnnnnnatcacctacagacatgcatcaacttgttatgtcaaccggagggcaacaacatggactactgataaaaaaccagcaacctggatcattaataagaggccagcagccttgcgtacctttgattgaccagcaacctgcaactccaaaaggttttactcacttgaatcagatggtagctaccagcatgtcatcgcctgggcttcgacctcattctcagtcacaagttcctacaacatatctacatgtggaatctgtttccaggattttgaatgggactacaggtacatgccagagaagcagggctcctgcatacgattctttacagcaagatatccatcaaggaaataagtacatactttctcatgagatatccaatggtaatgggtgcaagaaagcgttacctcaaaactcttctctgccaactccaattatggctaaacttgaggaagccaggggctcgaagagacagtatcatcgtgcaatgggacagacggaaaagcatgatctaaacttagctcaacagattgctcaatcacaagatgtggagagacataacagcagcacgtgtgtggaatatttagatgctgcaaagaaaacgaaaatccagaaagtagtccaagaaaatttgcatggcatgccacctgaggttatagaaatcgaggatgatccaactgatggggcaagaaaaggtaaaaatactgccagcatcagtaaaggtgcatctaaaggaaactcgtctccagttaaaaagacagcagaaaaggagaaatgtattgtcccaaaaacgcctgcaaaaaagggtcgagcaggtagaaaaaaatcagtacctccgcctgctcatgcctcagagatccagctttgtcaacctactcctccaaagacacctttatcaagaagcaagcctaaaggaaaagggagaaagtccatacaagattcaggaaaagcaagaggtaactaatgtattctacaatctctgtgatataattttgagattttagtaactgatgtgtccaaaccagctccttatcactgttggtgcgttgtataggtccatcaggagaacttctgtgtcaggattctattgcggaaataatttacaggatgcaaaatctgtatctaggagacaaagaaagagaacaagagcaaaatgcaatggtcttgtacaaaggagatggtgcacttgttccctatgagagcaagaagcgaaaaccaagacccaaagttgacattgacgatgaaacaactcgcatatggaacttactgatggggaaaggagatgaaaaagaaggggatgaagagaaggataaaaagaaagagaagtggtgggaagaagaaagaagagtcttccaaggaagggctgattccttcatcgctcgcatgcacctggtacaaggtgaagatccacttctcttctcaactccatttttattcacacaaattagtagaatactcaaaaatgatgttttgtttgcaaaattttaaaattcactagttaaccatgtcaaataatattcataatgcatcttgtgaagaacaggtgtgcatttatggtgacagctgaatggtttatgtgcctattatttcttttactgctatagatgaccaattgaacttaaacgtttacaggagatagacgtttttcgccatggaagggatcggtggttgattcggtcattggagttttccttacacagaatgtctcggatcacctttcaaggtatatgagttgccttaataaattgagttccaaaacatagaaattaacccatggtggttttacaatgcagctctgcgttcatgtctctagctgctcgattccctccaaaattaagcagcagccgagaagatgaaaggaatgttagaagcgtagttgttgaagatccagaaggatgcattctgaacttaaatgaaattccttcgtggcaggaaaaggttcaacatccatctgaccatggaagtttctggggttgttagtggatcaaaagagcatctaagggactgttcaaactctggaattgaaagatttaatttcttagagaagagtgttcaaaatttagaagaggaagttttattatcacaagattcttttgatccggcgatatttcagtcgtgtggaagagttggatcctgttcatgttccaaatcagacgcagagtttcctacaaccaggtgtgaaacaaaaactgtcagtggaacatcacaatcagtgcaaactgggagcccaaacttgtctgatgaaatttgtcttcaagggaatgagagaccgcatctatatgaaggatctggtgatgttcagaaacaagaaactacaaatgtcgctcagaagaaacctgatcttgaaaaaacaatgaattggaaagactctgtctgttttggtcagccaagaaatgatactaattggcaaacaactccttccagcagctatgagcagtgtgcgactcgacagccacatgtactagacatagaggattttggaatgcaaggtgaaggccttggttattctnnnnnnnnnnnnnnnnnnnnnnnngacagagtaaagaacaaaaatgtaccacgcaggtttttcagacaaggtggaagtgttccaagagaattcacaggtcagatcataccatcaacgcctcatgaattaccaggaatgggattgtccggttcctcaagcgccgtccaagaacaccaggacgatacccaacataatcaacaagatgagatgaataaagcatcccatttacaaaaaacatttttggatctgctcaactcctctgaagaatgccttacaagacagtccagtaccaaacagaacatcacggatggctgtctaccgagagatagaactgctgaagacgtggttgatccgctcagtaacaattcaagcttacagaacatattggtcgaatcaaattccagcaataaagagcagacggcagttgaatacaaggagacaaatgccactattttacgagagatgaaagggacgcttgctgatgggaaaaagcctacaagccagtgggatagtctcagaaaagatgtggaggggaatgaagggagacaggaacgaaacaaaaacaatatggattccatagactatgaagcaataagacgtgctagtatcagcgagatttctgaggctatcaaggaaagagggatgaataacatgttggccgtacgaattaaggtaaatctactaatttcagttgagaccctcatcaaatctgtcagaaggcttgaacatcagtaaattatgtaaccatatttacaacattgcaggatttcctagaacggatagttaaagatcatggtggtatcgaccttgaatggttgagagaatctcctcctgataaagccaagtgggtaaatcacatttttagtgactgcaacactagcacgatcgatttactcaacaattacgtcaaactgagtattaacaagttgctcatgaacatttcacagggactatctcttgagcataagaggtctgggtttgaaaagtgttgaatgcgtgcgactcttaacactccacaatcttgctttccctgtgagtcagactattccattatctactaaaaacttagaataactccggctaactaagctggaacttgtattgatgatatgaaggttgacacgaatgttggaaggatagcagttaggatgggatgggtgcctctacaacccctacctgaatcacttcagttacacctcctggagctgtaagtttctttttgtttgtcatctaaacaacgaaatttttatgcaagtcataaccatgctgtgttttcacagatacccagtgctcgagtccatccaaaaatttctttggccaagactttgcaaactcgatcaacgaacactgtatgctcataaactctaacaaatcatctgtctgaaaaaccaatatttctttggtagaattctattgtcattactcattactaacagcgaaattaattaacgttctttttcttactcacgtatgaattacactaccaactgattacgtttggaaaggtattattgctctaagctttgaatttatcatatggtaattttcaagcattgtaggcacctgaacaattatgtgtctaaaacatgtga

SEQ ID NO: 30829 - DNA, 1665 bp, Arabidopsis thaliana landsberg
  unsure (1)..(1665): unsure at all n locations
tggttatactccctcatcacctaactctggattctcatggattctccttctgattccaaccatccaatcgaaaaaatcttctcttttagctagactaaggaaatttttaggaatttgagacaaatcattcgaggaacatgaaatcagacacgagtttagtaagtgaaggatcaaaacaaaagaaaccannnnnnnnnnnnnnnnnnnnnntcaagagattgcgtgatgatgaagtaagaaaccatgaaggaagaagcggtatttataaccaagaactcacataatagcaagcgaaatacaacacggaaacttaataaaaatcttcatatcttttgtaagtttcttcggtcccaagtcaccataaaatatattcttttccaaattgattaccatcaactaccgaaggtttcttgttagtatctcaaactattttgacgttggacagaatttaaatatttcattttaagcgctcaataaatatcggttcgagtttgaacccaataaacatgtggaacatatttcaccgtgaagttgaacctaagacattaattgtattttcggttaaaatgtaaatctgcttgtttgcaaagtaattaaattataaaatgaaatttaaaggattgtttagaagatacacacagtaactaaaagtttcgtgttttctgatttgcgagatctttcctcttttgtttggaaaatcatttcattttcatttcaagttttcgtgacacgtgaaaaaaaagaactagaaattgaacggttgtagttgttggacggtgtggtgtggtacatttgctcttgctacaaatagctataaagcacggctataacgtgtttgatggattctttcataaaatttatttccgtatttaaaataaatacattaaataaaatagaaacattttgccaaaccatttccgtgattggtttaaaatgctagcaatcagagccggctctgacctgaagcagctaaagctcatatatgctttaggcacatgattttcttcgtaattttatgggcatctatttccagttttgatcgtagaatcatccgttatgcgccgcataagttgtttaattaacaacatgggcctattgggctactctcttttttcttttgttgctttaaatgggttattttgggttcttaattgttttaaatgagactgaacttttggatttggtattttatagttttttatcccttaaatccaaaagttcagtctcatgcatagtttttgcaaaaacaattccaaattttatagtttttgatccctctaattgcaatcacttttccttgataccatgagaaaatgcaaatgaaacatgccaacacaacaacatttagaagaaaatgcctttactcttctttaaaaaacgagtaatttttcgacttctaaacatagaacaagagtaacggatgctcctaggggctgaaaagaactcaaaactccctttattcaataatctgtcatgtcaaaaaatatgtttaaccttcacaatacctgtaatatcattgtgaaagaggagattaactaatgatcagttcggtccatgatcatactctaaactcaagaacttctcaaaacaaataccaagagtgacgagtggaagatatgttagagcctaactcaagaatcttgggtgcaagttgcagtaaaggct

SEQ ID NO: 30830 - DNA, 799 bp, Arabidopsis thaliana landsberg
tcgatcttgtcaatccctatgttctatgagaagcatggcttgcctttggggaccaacctgtattacactagatccaatgaggcaggtgatgacaactctggctagcgttaatatgtgtactgcaacacttgactttctagaagatgagactgctcctttcccgccgactgtgaacactaaaaccttgcacctgttttacacgaacgttataaaggatatgtcagggattgcgaattatgttgagacgctaccagtgatggtatcagaggattttgctttttaccaacaagcaatcccgggacattttagctttgttgggatgcagaacaaatctcattcaccaatggcgaaccctcactctccgttttttgaagttaatgaagaattactcccttatggtgcttcccttcttgcttctttggccacaagatatcttcttgactcatcttcatcgccaaataaagatgaactttgatgccaactttggatctctcttcttcatctcatgtacctatcgaaaatgtcaaccatggttacatggtaacagttattccctgtaattctcagttgtcaatcaataaaataaacggcagtgtcaagttctattagttacggagtctaagtcaccaaagagaaacagaggaggacagaaaactggaagttccttaggtcacaagtaaaggccttgcaaaattttcccatacaaaaccctagtcagacccaaactataaacggtaagaaagatcctcatatctggatcaagcctgtatgcacaacgattttttggctatatcaactc

SEQ ID NO: 30831 - DNA, 1553 bp, Arabidopsis thaliana landsberg
  unsure (1)..(1553): unsure at all n locations
gactcgatcccgaaatgcaatgcaactgacaaatatttttgatccatcaccctctgtgcaaaagttattaagataaaatcagtaagagatcacccaccacagttaaagcaggtgtattcaaaacaaaccaacttaaatccaacatggcagagaaacaagactagataaatgagtgcaagacgacttctacgctaaaataattccactgcaaccgaaacaacatcgcacatagagcagctacaatgcaaagcatacaaaactccgagtatgcaatatacggataatcacatacccgtcaagactatgggatagctccgtgggaaacttgcagggtcactggaaacaaaaccagaagaatggaactccaccccagcaggaagaacacactgtccaaaagaaaatgaagcgtaatcataaaaatccgcttgtttaatatatctagtcttatctaacgaaagaaaacaaactcttaaaaggcttaacctaatcaagcaagttaaactcttaaacagatgactcatttcaccatggagcatcaaaagcaaactacaagcacaagaccaaaagcaaagaaatataaccacactttgagagaaatttcaaaagctccttattggtagaaggcaattcaactttaatattccaacttaactaatctagagacctaattagaggtacctagaaaacatcaatccaattcagcacgtttatctccagttaataacttcgaaatgcttcgtttagcaaatacagaagaaacctaacaactagacaacnnnnnnnnnnnnnnnnnnnnnngtttaacaacaaagaaattaccagcatggacctaaacccaatcaaaatcctaatctcgacgagaattacaaaagatgttgtgaaaaacttaacagtaggaagctgaggaggaggggcagggtaaggagattgatcagtaggagggaactggtcaagaagagcaggcaagtagaatgtttgcattccatggaatccaagatctccatccacggttcgcatctctggaccaagtccgcacacgacgaagtactcgaagatccgtcccattgtcttccttcgagatctaaactagggctctagagcatgatctggatttccaaatggagatcaatttttggcggatttcgccgatggtgatgatgatggagaaaagtagttgcttcaattcggccaagtcgttcgtgggaaaataatcctacgggtcgaacgcaatttgttttccatttcacacaaattacaacaatcaaatttttgtagattttattttattttaaagtttgcaaagtagcaaactaataatattaattttagagttaaaaaataataatactattaactttatttttttaggttacattttttttaatgtgttcatatgtttcattttatttaagcttttaatatataacaaaaattaaaactgaaaaaataataaaaccaataaccaaactctaaaactaactaaaattgcacccatttcggtcttttatactttatcttcttaggggggtattggacataaattctagattttc

SEQ ID NO: 30832 - DNA, 2294 bp, Arabidopsis thaliana landsberg
  unsure (1)..(2294): unsure at all n locations
cttctcgaagcacgactcccatcatttcgacgatcaaaaacgccctgccatattggatttatatcattgattgtgaagtggatgaggtctatctttggaagctcgagcatcatccacccacaccattgttctcctctactctaacttggctcgctttgcacccatctacctgttcggttctgtggcataaatctatatggtttaaggaccatattccaaagcatgcgttcattaattgggttgtggcttggaacagggcttcacactagggaccgaatgcggagttggagaatttctattcccacggattgtttcctttgctctggaagttcggagtctagagatcacctcttctttgagtgtgactttagtctggcggtctggagtcacttcaggaatagaacaagattatctcctccggtccccttcatggcctgcctcttatggattaattcggcttcgtgtgatgctaatctctgtctcatcatcaagctagtgttccaagcctctatttatctcttatggaaagaacgcaatcgtcggatccattctcatgctccccgtacctctgctttgatcatcgaggaacttaaggttattctatggtcaaagcttgatcccatttctcggcgtagtgaatttgattctccaagatcctctctgctctctacttggtttcgtttcttcagctaagggcagttccttcgttctctgttcttctttttgggctgtttgggtcttgttgggccgttcaagtttagtttcgggcctgcgtgacttggatttgggcttcttgccgtgtatatttttcgggcttgcgtgcctttgtttggactctttgttttgtaacttgcttttatctttaatggaaatttaaacctaaaaaaataaaaaaaatgggtgggcaaatgcatgttacctactgatgttaccgagtatctcaagtactaacaacagctctatgtttctcaaaaggaaagtctcaaagcgacgacgtattattttcacgcacgttttaaattgttgatgcctttttttgttttattcttttttcttaagttacacatttaaacaaacaaaaaagaacaaaatgagaaagaaatagattgtttccgagatttctctctcttctctctataaaaaatcttagagaaaagggaaagttttctcttttgtttcgccggcctgatggcattccgacgtttatgtgtttcaatatagttgggttttatatctaacatctctgtcgtttttagcagtgatggctggctcttgcccgacatcgttcgaattccatgaccatcgttggccggatctacttttcttatcagtgtatctgatgtttttttttttctttcaataatctcatagatcctctattggaaatttaggtgttttttttgcttaaaggtgtttattatccaatttgatcttttgagtttgcgatttgcaggaatcaatccaaagagttgcatcttaagttgcagaaaagaaaacaatttcattgcacattaatattgcttttagctgtaaatctctattttgatgttcgattggtttatgaacagtgaaacctagaagaatcaagcttgcttttataatcaatgatgatttttctcactggaatcgatctcagatggcgaatgatctacaattgaggctatttgtctaattgatctatggacacgagtgttttccttttcgtttttaggtgttgctgaaaagctccatcgtcttaatacctacgtcgatgttctttggagttcgggagtcattgcccttgtgaagatcttttctttacagatttgatgatgtagttggtaggattctctagttaaaaaccggtggacttatttcttgaagctttgacggttttcagtagttttggagttcccttacgcttcgtaccatatcggctatgagcggcgaacggcgacaacatctacttcaactttacttcatagcctcacacatggttttgtgttggatttgttatatttcttagttccttaaaggggtatctttatggattgggctttttaagttgggtctccgcttatacgctgaattgttggtgaagtggaagcttccactgttgtaccttttacaacataaagttttaaatagaagagaaaattcccaaaaaaaacttcaactattaaaatttgccagaanaactcaactgtntcggttgtcaaaaaactcaaactaanttattagtgacanataaaacccaaactagaaatattggcagatttatacatacgctctaaaaaacannatatagttttatc

SEQ ID NO: 30833 - DNA, 2355 bp, Arabidopsis thaliana landsberg
atgttggctaacttcattgctactccaatagaactaaggtgaccaattactttccatttcaagtttcctttaaagttaccccttaaatgaatacaagagagacaacacaaaacagatttttattcatttttccaggtaccagtttcaaattgaacccttatgtgtattttttaaaatgtgtttcacgttgaagtcttgtggtgcctttcttacgacttggcgaaaaaataaccggtggacctcattttcctttaacatctgatgccctaaagaaggttttcacaggccaagcttcccgagatgtttttttaagcattggaaatgcggtaaggttcttctgtcttagcttagtggtgtagatgttggtgatttctatttgatgcgaagctgctcatcgcatttcctgccataatctttaggttcagtactctagtatgttgtcatttgtcagtgtttttcaaatctgaagataatattggtttcctctcgtgatttatgtcgatgacaagttggtttgggttgtcatataactggcttaaaacaagaacttatttatgcagctactaggatggctcatagcggcaccatttgtgatcgttgcactatacatcatgtttctcccatgtttcaaaatacttgtccgcaaattcagctctgttgattcaaccgcaaagacacctacaaaggaaaggatcgcgtaaaatgaaacagttatcggtttcaacaaagctagagcgttggagatcctatgacctcatgttcctgctatatcgatactgaggtccgtgtttgagttatctgtaacaataaacctccctgtaaattagtgtttgaaacagtttaggccttagggggagaatgccaaaggaaaatatagaagataagtcatgtactcatactcatgtctaactaaatatatacaatgagaaaggcaaatgaatgttttcaagacaagcaagagtaccctttgaactaaccaagtcgtagttcttctttatggataagtactttatgtagagagaaaaaacaaaagcaatctggtacgtgtctccatttggttacaaaagagaacaatcaagaccttgaggttgacaacttggtgatggccaacaaaatgaaggatttgtcggattatgatcggtgcaagtaataacgcttcccctcctcttgttttcttgtttgcttgttcggccagaatctacgggaaaagttatctttttttttttctcataagtggaaaatcttattaacgttaaccaaccatacatgggctaaaaaaccaaaagcccaacatacactgagattacaagaacatttgaagtcctaaatgagtccaagaacattgcttaaagatgaagaactgatattgtggctccaaccaatcttacgtgtcaacagctgaaaacaacacagcacacgtttggatgagtaatctaaaagcatttccgacatcttcctttgccgtctgagattgattccggtgagaaaaatcaacattgataatgaaagcaagtttgattcttctgggtttcaccttaaacaaaccaatcgaacttccagataaaaacttagcagctaagggcaatattaatatgcaacgaaaacttcttcttttcttcaacttaagatgcaaatctctaaattgattcctgcaaatctcaaactcaaaagatcgaattggataataaagatctttaagcgaaaaatcacctaaaccattatcaccaacataagatctatgagattattgaaagaaaaacaaaacaacgttggatacaaaccaaatccggccaacgacgctcatggaaacaacgctgccgggcaagagccagccaacactactaaaaaagccagagatgctagacataagacccgactaaatcgggacagataagcgttggaatgatatccaaccggcgaaacaaaagacaaagcttcccctcttctctgaaagattttttagagagagaagagagagaggaagtttcaatttgttttccatttcacacaaattacaacggggaaaagttatctaacatttcataatctctcaaattcattattaatgccccctaacttttttaatttttcctctttaaaaataacaaggaaacagacagttgccctatactgaaagctaaatgcttcacctgaaacctctcctctgccacatctctctttctctctcacacacacattattgttttttttataactccaatcttgaatcttgaggatctctggtttcttcattcaaagggggagactttttgggttttttagactttgcttgtcttgtttggggtttgtgtgtggtgatgtcttatagtaattcaaacccatgaaaattattca

SEQ ID NO: 30834 - DNA, 4223 bp, Arabidopsis thaliana landsberg
  unsure (1)..(4223): unsure at all n locations
aatccaaagtgtaaattgatgatattgttgaggagaccgtatttattttttctcttgagaaaataagcgtaaacggggtccggaatcagtaaaattcggtgcacaataaaatctaattaaaactcttttcactaattgaaactaaattccccaatggccatgagaaagcataatttcttaactattcaatataagccacttgagttcaaattagagatccaccaaaaaaatggatgacaaagtagtcatagttccttatccccctaaaatgataatggtataaacaaacatattttatggtatcatcaactcttactatctaaaatcgaccatcagtttttactgtctcgtgtcaccaatatcggtaaaatgtgtttgtttttgcacaaccaaggttttccgttcctaataacggcgtaagttagcactgtaattgaatatctggccaaatagacgctaacgtggacgactacctagccccatcatcaatcacacagaaaaggagtcggagagggtttttcgcctagggttttagaattcgatcttactcattcaaatttctcccttcagatttattcatctgttgagtaaaaccacaagggtttctctctaatgttgcccagattagctcgagtcgtcactcaaacctcaaagcttcgatctttgaccactaatggatcgatgaaaaatctctcctttttctcccgatatgggtacgcgactgttgcgccggcggcagctgatcctccgtcgcagaaggatttccccagtaaatctccggtatgatcttaaagtggtaacattttgtttactcagattaaagatctcgttttcagaagtagctgttaatgcgtagttgttgtgaatgtttaggtctcactatagtattcgaacctaagctcaatttgattctctctgtttctagtttcatcgaatgcgggactaaagtgacttctgcctccccattgtacctcatttaggattcatccctttttttctgttggagtttcattagtatgtttgtgatttagattcatgctcttttagtcaactgcttctggacaatcgtgtcttctttgatgaaaaggatttgttctatgtttgacagataaacttggataagatgttttggtcaaagccatgttcattggctctgcctaaagactctcctctcagaattgatgaaccagactatgtagggattcgtcgtttcatactaaagatgatgatgttctatagcaaacagagcatgtctatccgtggggctaacgtgatctacaagcggatcattgcacaagttgataaacctgcaatatatgatggtactttatttggtttccaacacaacttttgcaaacagagttatgtatttacattttgtgctttgtttatatatcgggtgctttgtctctgctgcagtattcaacttggagaaaacattcaaaataacgtattcgctgcttgtccttcatatgtggcttgttttacgccgcttgaaggaagatggacaggaaggtgttgaccttggtcaatacgtctatgagatctacaatcatgatgttgaactcagggtnnnnnnnnnnnnnnnnnnnnnnnnacttggttttgctttaatatagtttcgaagagatatcttagtttcttagattccttaaaataagatggtcttaatctttcttgaaattacaggttaacttgctgctagccaagtggatgaaggagttggagagaatattttatggaaatgttgttgcctatgatgctgcgctacttccggaagctaaaccaaatgacctacaaatcaaattatggaggtaaagcttctataacgtcatgctttatgcaatgagttcggtagagattacacagctaagtagctcggcttgaatttatatacaatatggcagccatagataacggatttgtctcagaaccttatatgcaattggattgtaggaacgtattttctgatgatggaacaacaacacctgataacacagatttaaaaacagcacaggcatgattttctcctctctatctctctcgcaaacacacacacattgacatactagtttaggcattgtgtaccaaacttgttaagacattgcttgtgtgtttcaggcaatggcaagatatgtccggagagaacttggttctctttctttaacaggtacctatgacgctatagttggaatgcctcattatgttactcgcatttgcatttcgaatagacatgccttttcttatatggttcttttttgtcatacacagataaagagtccatattctccggcaatttctccttcacccctttggagaacaagcccctgtgatttgaatgaaattagaagaagctgtggtgctttgcgaatcaatctttcatttgtttctctgtttcatttgatttacttatatcaaaccaaagaaacctacacaagggaatgtgctagctgttagcatccagatgatcatgaaaacaatgtgaaagtgaataagattactgaattagagcatttactgtcattggtatttggtactttaattggcttactaatgctcaaaatcttttctacaaggcgatagccgattgtaattacttatctgccattcaacattttatgatcttgtatttgaaacagtattataactatagtatgttagatcgtggaattcatcatctttattaaattcttctttttgttggtctttgaggttagcacaacaaatgaattggtaccacataatagcagcgcttttatagagaacaaatgttcatggttaaagatttctgctagcgtagaagaagattatgaacatttgtgtaatgtaccaatgacactgtctatatgaagatttccgctcgcatagaaggatcaaaacattactcgcacaacaacaacaagattacatcatacattgcatgttattatatatcacacattataacataaacgttgaaaataaaaacaaagagaacaggtctaacgatggatgacaatttaatgtggaaatcgtttttagcctttgaattttaagaaacttgttggtgttggactccaatgttgtgctgcccatacttagtatcctgcactctgcttccaaccttcatccgagcattctctatcttatccgatccagatcccgtcatgtgcctaaatacaatgaccatattctccaatattcaaactttctataaaatataacgtgcattgcaagctcggtttgaaacggtaggtcacattttgtgttggtcgtaaattacctgtagagccaagagaaggcggtaatggcggctattccaaagccaccggatgcaaggaatccggtaatgatgagagcaacggttaccactgctggaaccaagacggggctgaagatgacgaggagaggagtagccaccgtgagtgcgatgactgttccagcgagtgttaagccggagaggacaaggagggatccaccggctgtgacagcggttgctgccttcaccatctgcctggccttcggatgggcctcttgggtactgtctcggcttatcatctcgtgatgggttcttgtttggtccgccattggttctttttattataatatatccctccaacacaaatagtagaaattagcagagaaaaggtagtgatgtgttttcggagtaagtaatgatgatttatgaaggagaggagcgctggtggggctcgcttgagccatgtcacgtgtcaaaagtgtcttcatgcagccgttgcatgtgttaatgagagtagagatgggtcttttttgcgacacgtacgtctgggtcttttttttttttgctatagtacacaacatggaccgggacataagtcacgtgatggacgttattatcgatcggtcgtgatgttatggtcactcccattcccccactctatagaactatagaagcaaagaattaaaaggaagttcggaatccacatccattaagccaatcggcccaaaacaacttggctcacagagaatagtattagtagctcttcaactcaaaggtgtgaatagttaagattgttgtgaattagtagctcttcgcctcaaaggtgtgaacggtaaaacttaaaggtgtgaatagtaaacagagaatagttaagattgttgtgaaaaagaaaagcattaaaagtgtgaatggtaaaacttttggctttcataactttaaaattaagctggagcttttaaagttttttctcaagagtcacaaaaaa

SEQ ID NO: 30835 - DNA, 406 bp, Arabidopsis thaliana landsberg
gatcttgctatgattattcaaagtttcacttctaacaatagtataataaatatatattaaacagaatgaaacctaagaattcaatcttcccacaagccattcaagcgttacgatcattggaaacttacaccatctcgcaggattgcctcacagatgttttcataagctctctatcaaatacggacccttggtctttcttcgtctcgggtctgttccggttgttgtgatctcatcgagtgaagcagctgaagcagttctcaaaaccaatgacttggaatgttgcaaccgaccaaagacggtggggagcggaaaactctcttaaaaattcaaacacgtcgcctctcgcgcgatgcggtgagtaatagagagaaaagcggaaggtggcggttatcgagctttttagctc

SEQ ID NO: 30836 - DNA, 4763 bp, Arabidopsis thaliana landsberg
aggaacaacccctctggtatgagagttcctaccatcattattggaatggatgtatctcatggttctcctggacagtctgatcatataccatccattgccgcggtaacattgtttttttttttctttttcactttcttgtgttgtatttttatgtaagctactgatatctttggaatgcataggttgtgagctccagagagtggccactgatctcaaaatacagggcttgtgtgcgtacacagtcgcctaaagttgaaatgatcgatagcctctttaaacccgtctctgacaaagatgatcaaggtatcatgaggtaatactatatattactggactattttgtaactcgtattaattagccctgcttttatgtaacagtatatgatttttaagattcaatgatgtgtttacagagagctcttgcttgactttcactcaagttctggaaagaaaccgaatcacattatcattttcaggtatgcatgtataatttttaggcatgcatgtagtttaatacaatttttctaactcttaactacaccaatacatgcagggatggtgtcagtgaatctcagtttaaccaagttcttaatattgaactggatcagatgatgcaagtaagtattttggttttaccatttttaagctcttaaatacttagcctatgtttgaccattttggagtttaaggtttaacttttgttacattattaggcatgcaagttcttggatcagaagtgggatcccaagtttacactgatcatagctcagaaaaaccaccacacgaagttcttccaaaccgaaagccctaataatgttcttccaggtaaacagttgcagatatttttttgtgttttgtttgtttgttagtgttgttgaaatgacttgaaacctgttctctatttacccgcaggaacaataattgacagcaacatctgtcaccaacacaacaacgatttctatctttgtgctcatgctggaaagattgtaagtgataagtatatatattattatgctcgaatcctttatgaatcgaacaaaaacttgatacacttttcgatgtgttagggaactacaaggccaacacattaccatgtgctctacgacgagattggatttgacacagatcaactccaagaacttgtgcattcactatcctatgtgtaagcagcacatcacttcaaacttttttttacctgatacattaaatctctgtattgaatttagccattaatctcttaattctttgctttattacttgtagctaccagcggagcacaactgccatctctcttggtaattcttttggcatttgatatctcagctttatgtgtagaatttgaaaaattgacacaacttgattattatgcagttgcgccgatatgttatgctcatttggcggctgcacagatggcaactgcaatgaagtttgaggacatgtctgagacttcatcgagccacggcgggatcaccacagctggagcagtccctgtgcctcccatgccgaagctgaacaccaacgttgctagttcaatgttcttttgctgaaagaacaaaaataagcacaagtgacttggcttttcttctaatgaacaaaccaaataacaagattgtttctctcgctttcatgacttttcgtttattctgtattttattgttgattgctgttttcgattcttattgaatcgcaaacttaagacataatcagttgcattttattattgactacgattgatataagttgtttcttgttacatgaacctgagtgaagtttttttttttcacaagagaaattttgtattaaacatatccaactcatacaaggcctaagaaaagccttttcaaaatgcaagattacagaaattatttagacccaacaaggcccaaagagatttcctacagaagaagaaactggaatttgtctctatctcagatcacgtgtcgtcaataggagaaagacctatacgtgtgagacgagaagcctaaaagtgaaccgacttcttcctttgtcgtccgagcaccgattccggtgaagaaggaatcacaaccgataacaatcgacatagattcttctgatttttcgccggtataaagtaatcgaaactccaattaaaccaacagcttaaggcaatgataataagcgaaggaatcaacttcttttcttcatcttaaaactcaaatctctgtaaatattcctgcaaattgaatctcaaaagagagtggattggataagaagcaatagaaatcgagattgctatcactattatcaccaacacatctcaatgagaattattaaaagtaaaacagaaacaaataaaccggatctaacaccggtacataactggccaaaaccaccggaaagatgacggtggaatgaccagagacaaaagcggacaccatcgcatagaaagccgaaaacatgccgcatacaagaggagccagcgcaaacggtgctacggagccatcgttgccggagagaaaactggccgacgttgctgagggagccaacaccgccagtgaaaagccaaccaacctcctctataatagccggaggatgttggactgaagctggtttaacaaccagatggctttgccggattcaccggatggcggaagaaaaactaagcccttctctctctagaagatttgagagagataagagagagaaggctttttaagatatgctaatacttttttaacccgagtgaagttataacccaatgtcataaagaacatttcttgtagtaaaaggctcgaaattaccataaaatcaactcactcgatggaaaaatatgcatctgtttgatatgtacactggtatacttctggatccgtaaaaatcaaaatgttttagagtaaaagaaacaaccacatgttctgggatttaaaatacataaacacgaaaagaagaataatccaaagctgttactgaagtgataagtgaaagagtttacctatcatagagttaggacttgggatcatatatttttttttgaatacagaaaaaaacagctatttaccctctctatggctactattaacctgaggaaatgatgcatattttgaggctctaggtggttcgttgtctaacatgtcggctggtggtatcgcccccgccgtcagaaagttgggcccacacgctctgagactttgctcctccagtactgttactaccttcctcgtgaccagccaccgccttcagaagctcggactggagggtcacacattcatccttcatctgttggtaagcgtctgtctccaggacagctgcaatatccaaggccacaccaaatcaaatacaagagaagatccaatagttctatggagaccatcatacactttaatggcctagcgtatgatattaaacattgtttaaaaatgcaatgtagaagcatacctgctaggtcacggcagtaacttaggcaacgccttttagttcttagcattatatctgtcagccaacgctaagatcttggcgacggatttgactgatacgcctttgcagatgtgggattcacacaacaacctgagcctaatcaggtcgtacttgtcggctgctgctaaaacttttacaatcaatgtttcgtatatttctgacagctttaagcgctcaaatgtatgagctgttgcaggctccacatcttccggaagagaatctttgtacatgaattgtagcaaagcctggatggaacagagcattaatacaagcacgatctaaactaacagaaataactaaagaataaccaccaatgatcaatgatgtaccttaaaaaccttaggttccaaatcgttaatagtaacctctgtattgtttgcttcaaactcactgaaaaacttagacttgaaaaatggagatcgagcagccagtactagtttatgagctagaaacttctcgccagcaatgttaaaagttatatcagaaccttccatgctatccagtagaactccaaaatgtgatccaagttctgaatcagggacgtgaacagagtgtaactgtgggcagagtatttctgaaaccacaactccaaccgtacaattgattatcaagcaatcgtctttcaggtagtcagatgtctcaagaatggaacgtctgaagaaacgcttgtatcccctaatcaaaccacaaagaagaaaagggtataagaggaccttgattaaccagaacttaagcaaaagatatatgtaaagagaagatcaaatatatctctttcaagaaggatcaaagtaaattggaagaaataaagacacagcttctccacttaaatcaagattttttttcccaattaagacttaagctaaggctatgtctggatacactcagaaaattcagttagctaaacaccttagaaaatatagattttcccattcaattttttttggcgtcatgaacattaaaccacccacatcactcattagtcagaggaatgtgttactacactgactatgagtagctgaattcttcaattttcatgctttacaccaccaatatgaaaaatcatgcagtacaaacacagttcaaatttacatttctcttagaaattcacaagtgttcgatacacctatcagctatggctgtcacttccaagtaagcccaggattcatcaatagagaaactgaactctgaacaaaatctctctgacagtaccctaataagattaccatgatgtatcttctaattcatgtgatcattttcacagtttctcatcttcagtttacctcacagctagtaaacagatatctctaccataaaagctagatgaggga

SEQ ID NO: 30837 - DNA, 1598 bp, Arabidopsis thaliana landsberg
  unsure (1)..(1598): unsure at all n locations
ggtttgctattatagatactatattcctttatatatacatgtccttgtatgtaatcttgcttgatttgtggcgtattatgcgctcttgtgaagcaatccacattggaaaggccactattgaagatctccctcctctatttccaaagctgaaggcacttactgcaacatttaaggaagacgaaatcaagggtatgctaggggaattgggttctgatacaagcactgatgtgagttttgaagagtttctcaaggtatatggagcttctacgtttcattggggaatcgaggattggactgagtatgaatgtgatatgtatataatgtagttttggattgatccttatgtgcagatatatctcaacttactaagtaaagcagctgagaaatctggtggtcatcataagaactcatcctcgtttctgaaagcttgtacaacgacacttcttcacactatatatcagtcggagaagggtccttttgttcagcacatcaatagatatctaggggatgacccctttttgaagcagttccttcctcttgaccctcattctaatcaattgtatgaacttgtgaaagatggtgtccttctatggtaaggtgcactagagtccatctctacacagaatgcatctgatttctgcctttcacgtgtttctctccctttatttccggcgtagtaagcttataaatgtagctgttcccgggacaattgatgaacgagcgatcaacactaagagggtacttaatccgtgggagagaaatgagaatcacacgctttgtctcaactctgctaaagctgttggatgctctgttgttaatattggcacacaagacctggccgaaggacgggtatgttttctctgcttagtattcagtgtacgtttgaaaatatttcaacacacatcaataagtgtaattatgtgcaccgttctgaccagtgagcttttatgatgttttgcagcctcacctggtgctcggattgatttcacaactcataaaggtccgcacacatccacttgtccgctctgtatatcttagttttattttttttgtgttaaccaaataatgttggaaactgcagattcaactacttgctgatctcaatttaaagaagacgcctcagcttgttgagttgcttgaggacagcgatgtaagtgagctataccaatcacattttcagccatttaattgctcttgtactataatataacaagtttctctctgttgcaggatgtcgaggagttgctgagattaccccctgagaaagtcttactgaaatggatgaacttccatcttaagaaagggggttacaagaaaaccgtctcaaacttttccgcagatttgaaggtatttggcttctcaaactacaacttggaggaaacctttctcctttgcttatccagatctttagttaggcggttctcaattcaagattgtattgtacttacgtgctactgttccttacaacatgtagaagctatatcaattcttggataagagaaacaatatcacctatagaagtcataaaagaaacagaaatttaattcttactcaaggttttggtaatgttatggatggagtttgtccgcntctagttt

SEQ ID NO: 30838 - DNA, 3250 bp, Arabidopsis thaliana landsberg
  unsure (1)..(3250): unsure at all n locations
actctcaagatcttactacaaattcaaaatcacatgaaaataccttggcaagaacgagggactgttgtaacaccacatttagctacaagagccacgactttagatggatcaattcgtaaaattgggagataaaacttaaatctgcataagcattcgaaattagctttccgaaccactacgcagcaatcattgacgggaggtgggggattgtttccagtgatggctgggcgacatttctgcatatcatttatgtccatgtcacaaatggacatgcttgtagcttctttgaccatcatcgcaaaggttaaaaccattgcaaaagttgcaaattgcataaggaatttggtattgttcttacccattctctcttttctctagactctacttgtgaatccccctcatgatcatgagcttgtttataaacaagttaaaatgctaaccgaaagttagtagtaatttaagagcgtaacgtaaagataagtgtgggtgatgtgatcaggaggcttttgagttgagatgcgtgaagaaagggacaaatgtgagaaagacttagttgttttgcatgccatagtttctgggcggtgaatgacaaagatttttttggactctttgcgtgaccattgtggcgccgttggttttgtccttgttgatcatttagatggatcattagcactgacatgaatttggtaattattggcttttaatatggtaattatcatcaagtattcaaaagttttattatcacttgttaaataaaagattggttttttaatgattttgtatttatgttgtttaaaataaatatattaatgttgttgtgcacctctcaacaaatgaatatcttttatttcaataaaatgttataaaaagatcaaaatactgtaacatcttgaaacgatgatttgaatattttatgatcttgctttaaaaaatatttagacggcaaaagttatggaaatcttaccatacagttgatttatagtagacattaatttttgtttgactaaaactattgtgttattgtgtaaagcttttttacattttctttcgaattgtacacagagagatttgcgttctaataaaaatattaaattcaatatcacctatagttattgtcacaatttaaatagtaggccgtcgtgcgtaccacacatggggtttaaaaacaaatcagcaaaatatttaaaacgtcggtggagaagatctttgtttcgttcataaaatctaaatttccaaaaaaataagtaaacaaaaaaattagggtattttgcaataaatatcacttgagaatatcaaatatcttccgaaaataactcagctatatatggttagtactgtcatttttaaatttatgtaacgaactaacgaagtaaatacatagaaaaacatttaagagtccaaaagcatacaaattttttgtgtagtcttcttctctatttagaaatgacacctacacnnnnnnnnnnnnnnnnnnnnnnnntgtttcttccacatgtcgtcatcagacagcgagtatataaaaccaaacaaaaccctactcgcgattctgattaagcattcaatttcacaaccagaaactcgttttctctctctctctctctttgtttgctctcgcacgaagcaaataacgatcctctctcttctctgcctatcatcttcgttcacattgtggttcgattcttgcttcctagttttctggaagaaagaaacattatcatcgattaaaatatacacattgaacaactttggattattgattctaagcagagaagaatctcatttcgatacattggggtttgtgttgtatttttattattctcctagatttctggattttgtgtaatcgaaagtcaccggcttttttcctaatctatctggaaaactgttaaaagtttgaatcttgctgtaatgttttttgattagttaagaacaacattgctattttaagtaatgaaatctttcgatcgataaaattggtttcttttcgttttatctcaaagttttgatttttctgattttttcttggcagggagaagttcctacattggtgtgagtttgaagattatcttccccgtggattgtaacgggggagatgtctggttttgtgggtgttattgtttcggatccatggttacaaagtcagcttacacaagttgagctaaggagtcttaattccaaggtataaagttactctctttctcattggtttagcttccgtggatgcaatctaaagagaagcttgttttgatttgtggttttttagtttgttgcgttgaagaatcagagtggtaaggttacattagaggatcttccatctgtgttggtcaaggtgaagtcacttagttcatcatttaaggagaaagaaatcaaagaaatcttgggaggtttgggttctgattatgaaagtgatgatgatcttgatttcgaatcgtttctcaaggttagtttgatctttttctgtgttgcgtcgagttttgtttgttcttgtgaatctcttttgatgaatgtgatgtgtaatgtgtgtaggtatatctaaacttgcgagataaagctgctgataaagctggtggtggtcttaagcattcatcttcatttcttaaagccggcactacgactcttcataccataaaccagtcagagaagggttcttttgttcttcacatcaatagatatcttggggatgacccgtttttgaagcagtttcttcctttagatccggattcaaatgatttgtatgaacttgtgaaagatggtgtgcttttatggtaatgaacttatgtgaaaatttgtgttttggatttcagtctcaacattagtacattttggtttctggattttgacttgtactctctttttcctttgttggcacagtaagcttataaatatagcagttcctgggacaatagatgaacgagcgatcaacacgaaaagggtacttaacccatgggagagaaatgagaatcacacgctctgtcttaactctgcaaaagctgttggctgcagtgtggttaatatcgggactcaggacctggctgaaggacgagtatgttatgcttgcttagttttcacttttcagtatatcataatatattggttgagacgaatatagaagattctgactgcagatgtttcattgtttttgcagcctcatctggtgcttggattgatctcacaactcataaaggtccatacttgtttgctatgtgcactgtcttgtgtttgtgcttgatgatttactaaccaatgctgg

SEQ ID NO: 30839 - DNA, 607 bp, Arabidopsis thaliana landsberg
aaaaaacatttgtttatgaaatcagttgttgagaagattacgtagctaaagaagataacacattctctcaccccacgagactcacgatctacgagtcactcacacacactaaccaatcggtcaataaacaacacaccaataatatcttcttttgattacttcaaccggtcaatatcatctaaaagtcaaattcttgatcccacaaatcacattcttattagttagagtttactccttccaatcataattcgaacccttcaagattttcttctctctatctctctgtttctctctgtttctgagatgggtttgtttggaacgaagaagatcgggaagtatgagataggaagaacaatcggagaagggaatttcgcaaaagtgaaacttggttacgacacgaccaatggtacttacgtagctgtcaaaatcatagacaaggctttggttattcaaaagggtcttgagtctcaagtcaagagagagattcgctcgatgaagcttcttaaccatcccaacatcgtccaaatacacgaggttaggatatgcctctaatgtctatctgtctcatcaagttactggtgttcttattctgagtgagatcttacat

SEQ ID NO: 30840 - DNA, 811 bp, Arabidopsis thaliana landsberg
tgggaacaataaatgactatccaacaaagattgtataacttagaaaaaaaattgaatgtgttgtctttagatctccttgatatctaaataatctttcgccaacacataggcaacaaaatcaagtctcgcaaattgacatagtttggttttgtctattattggtgggttttattctctcttttgttcatacgttctttttttagttataactatcgatgaaattttataaaacaaatatgtaaccttgggtgaatctacatgaaaatttagaccaaaatttctcactgcatgtattagattaatatattgtttatgaatttctcaaagacgttcgagcaagaaccgatcgacttgcttatataactccttggaacattttgatcgtcttacatgtttgaaagaaagtcaacattttgatcaattcccttacacatgcaaaacgacacaccatgctaacattattgggtcggtcactttattagacctgaataacaacaagcccaattaaatattaaatggtgttgtttctcgtagcaaggtcagtttattggacattagcaaaactatggtgttggtttcgtctattctaagtctaacgtccgagtttgaaaacaagcccaactatggtaattataattcgtactttcgtaggattggaagaatctcatttgctttctctttgtaaacgaagaagataaaccactttgtttcacagtttcaaatgattcaaaagtgacgtcacacaaacactttggtaatttttctgactgtttgtcttacgatgtttaaataagtaggccactcaacaaaa

SEQ ID NO: 30841 - DNA, 3357 bp, Arabidopsis thaliana landsberg
aaagcaacatcgaggcgatcattatagtgtgagattttatatcctaactatataacaaaaattttaagatagtgataaatcttactctctttgtattaaaatatttttttaaaaaataattatttaatatttaattcaagaaaattagtcaatgatataaaagattgcataataaaaatgatcataaaatatcaaatgtatttaaaaatttgtaaaacatgatatatattttaaaaaaatatcctaaaacatcgtatattttgatataaaggaagtaatgtctatgaaaaatcccgacatgtatgtaacaacatttttgagaactccgtctctcgattcgcagttaactcgcatacacaatttatacttactgcttgacggatggtttatatagttgatcatacatacatccatttgaaagagcatgttggtcttaattgcatcaaacattcttatcaacacaaaatgatatacatggcatcagataaaccatcacgaacaaatacaattttgaaaggtaatacacacaaattcactatcactattaaggtaatacacacaaacattcttatcaatttcatgattttctattaaaatgtcattataaaaaaaaaaactgaaagaaattggactgaaagagaaataaatttaaccataattgtttggtaaaaatagtaaaacatataccaaaaatgagatttaagaggaaaataaaaagaagaaaaaaaaaacagctgtagtctacatttacatacaagtcgtggactaacagctatactactactaagtactaactctttctctctctaaatatcaaattcaatttaatttttcttctgcaaatggaaccaccgccgtcttctctgtcctccaccgcggtggcttccacctccatctccgccgccactactcctgttcctcctcctctacctcctcacgtgacttcttcttaccccgaatctctcgactcctcccctcgttctcgcaccaccgatggctgggatgaccttcctgctccttctggcggcggcggtggcggtggtggtagcgccgtctcttctaaactccgtcttatgtgtagctacggcggtcatatccttcctcgccctcacgataagtctctctgctacatgggcggtgacactcgcatcgttgtcgtcgaccgtaactcctctctcccttctctcatcgctcgtctctccaacacgcttctcgacggtcgttccttcaccctcaagtaccagttacctagcgaagaccttgactctctcatctccgtcactaccgacgaagatctcgacaacatgatcgaagagtatgaccgtaccatttccgcttccaattccaccaaaccttcgcgtctccggttgtttctattcacctctaagcctgaggctactcaatctatgggtcagatccttgagagctctgccaagagcgacgattggttcctcaacgcactcaatagcgccggtcttctcaatcgaggattctcagattctgatactaacgtcaatcgtttacttggtttggatgatgctcttgctctccgttctaattccggtgacaacaacaatcgagatggtgatgatggctctgttaaaagcgccaagcaacagcaacctccaccgccgcagcagcaacaacaacagcaaggaggccaagatgtgaactgcttaccggattctccgatgttagatacatcctcttctttcggctccacttcttcgtctccctcgctcgccaatttgcctccgatccgtgtccatgtagaggaaccaggcggagtaaggactttgccagatcagagaaatctgggaattgaagaacagttcgcacgattcaacgtcgggaacaagcatcagctacatgacgacggatttgctgcgatctcttcaccaccgccgatgcctgtcacaatcgcccttcctgctgcgcctgtgactgcagccaccgtctctaatgagttccaggccagggtttactcagatgacgagagatccgatcacggcgtgcaggctggatacaggaagcctccgactccgcgatcgcagccgcagaatctaccgcctcagcaggctcatcagctgaaatcaaatagcggtggtggacacgagctgccatcacccaattccgtttccaggtactctttcttcttatattggaaccctcatgagccttaatttgatgctatagaagaactaagattggtcagaactctgattgtgtgtttgctatataatgaatgcctcagtgatagcagtatgagcaacccaatgtttcaccaaagaccatctgtctatcaagaaccaattgctcagataccttctggctctaccgttgttactggtatgatcaatccctcagatccaagcacacttttgtcacagcatcagaatcaagacccagcctatatccttcacccccagtttgagcaacaatctgcacaatctcagccacagcagcagttcatacacactgctgctcctcctcaatacattcatcaccatccgtctagcggccttcctgtcccgacttacatccaggtttacccttcgcaacagcctcaacagtccttccatcaacacgcaggtcgactggatcagcagccttatcctgtttattatgtcactgctcctgtcccacctaggccctacagtatgcctgtgccacaatctccaagtgtgagcgatgctccagggtctatcccctctaaccatcccaactctaccatgatgcctccacctcctaacaaccacatgagaagtgttagcagtggcaaacctgagatgggacaggctggggtttacacaacagccccaggtgtgggcggtgctcagatggttcaccagattcccacaaaccagcagcaattcatggggtattcgcagatccgtcaccctcctcagtctggttcagctgggaatccaaactatggatatgaatatgtcgacaatgctcatacacagatatactacactcaacctatgggacatgcacagtaccagacaatgactgggcctccacctgccatggtgatgcctgatggttctgctgctgctaagcttccagctgagaacatgactcaacagatccggagttcacagccattgtgacacacacaaggaacacatgaagatgaaccacaaaattttggaggaagaaaaccccgggttggtttttaaacgtataaatatataatttttacttcttttttcttctcttcttttacaagttgctgcatcaaaaaaaagagtctggtgtcatgttaagtttggtattatgggttgtgtttaaaagtgttgtgtgagtaaattaaaaaaacaaataaatagtgcttcttggtgggatttacat

SEQ ID NO: 30842 - DNA, 1797 bp, Arabidopsis thaliana landsberg
ttcccttatatccttctgggtttcgcaaaactgcaagcaaaattgtttctctctacgatttgcggcggcgttagggtttcgtttagattttgtgattcgtgagtgtgttcaagctttgggaggaagcaaaaatggtgaggaaacatggttggcaacttcctgctcacaaatttcaggtcttttatttcaacctttctctgattttctccaatttctaacatttgggttttagttcatttgtttcgtttggtcatgaaacaggtggttgcgattacggtgttctgcttattgagtgtagcatactatgcgtttttcgctccttttgttggaggacgcatctgggagtatattcttctcggtgtttactctcctgtggtatgtactagaatcgctttagagaatgataaggaattgataagagctaggtaggtacatggtagttttgcatatctgatacccttttgcttcttgtgtcatgtgtttgttttgcaggcgcttattgttttcgttctttatgttcgttgtactgcaatcaatcctgctgatccaggaatcatgtcgaaattcgaaagaggtgcgagtagaggtggtgacttacctactgccaaagatatctcgagaaaatttgatgaaacgggcagccacctgcagtcttccccttcggttgcttccaggacttctactttaccaaactctagtgtgaaaggttctgttggagatgctcaaagagtggaagctgctaaaagaaaatcttgctttaatccgttggcaatatgctgtggcgtgtttgtttatgaagattgtcgtagcaaagaagagacggatgagcagcaaggggatagggaagaagctctgttttgcacgttgtgcaatgctgaggtaatgtgttaatattggtttatgcttgaagagtaagaagcaactactaaatcctttgttcaccttggttttgtgacaggtccgtaagtttagcaagcattgtcgaagttgcgacaaatgtgtagattgtttcgatcatcattgccgggtaaatttcttactgttatgataattaactgtttcttggagttgattgactagagttttatgggtgtgatcaaatgacatagctgtatttaaatgcaacagtggcttaacaattgggttggtcgcaagaattatatgacttttatatcgctgatggctgtcagtcttctctgggtacgtatattctcctgatatgccttttctcaagctcactttttgcttaccagtaatcaataaatctttctctttctcagctccttatagaagcaggagttggaattgcagttatagtgcgtgtatttgttaataagaaggacatggaaacagaaatcgtcaatagacttggaaatggattttctcgggcaccttttgccacagttgttgtaagtattcttagtgtaagggtgagcatctattgttgattttcctgaatcctgatgttttcttacaatttatgcagggtctctgtactgctgtttccatgctggcattgtttccattaggtgaacttttctttttccacatgctcctcattaaaaaggtgagtatggaagaagtcaatatgcttttatatgtatgtaatgtattcgctttactggtactaagacggtatacaaaacattcattgtgattttaatcttatagtcaacattattcccaaaatagattgagtagcacatcaaaacgcatgctctttgtcagaatagaatttggtttcccttcatgaatcatgattgagaccatatgttacattcgtctaaaccatcacac

SEQ ID NO: 30843 - DNA, 4615 bp, Arabidopsis thaliana landsberg
atttgcacttcatagttgtaggatcaggacagactcagatctttcgcccgtgaaacataagtatagctcttacttaggacggccgtggagaaagtattcgagggctatagtgatggaatcatatattgacgacgcgatcgcggaggaaggatgggccgggtggttagactccggagacgaagtactaaagacgttgtattttggagagttcaagaattatggtcctaaagctagaatttccaagagagtgacgtgggaagggtttcattcgattgggtttgaagaagcaaattattttagcgtcggtaaattcctagatggagtttcttggttgccctctacgggagttagtttcacttccgggatttagtgaaaaaaagtaaagagaagaaatggagaagacgtcactaatggttttaagtataagtttaagattaagatacaaatttagagtttttacaccaaaaaaaaagatacaatttagagttaaccatcgaatgtaaattcaatttggtatggtcatgaatatatttgaaacttaaatgtaagactttcttctttttcttttggtcaaacaaatgaaagagcataccaaattgttagtgataattgtttatgatactttatatgaatactagataaggcccgcctatttaggcgggtgtaagatacaaaaataaatttttatcgataatatttgaatattgtatagcaatttatatatttttcttgatatttaatttaataattattggtgtaaacaaaatttcagtcttatacattctattttaattatatacactcaattttatcaatgatatttgaattctaaaaagtaaccgaccattcttctatatttaatttagtatttagaaaaaaaaagaaaaaacaaatttgtatcttacaacattcaattttgtaatacagtttaactatctatgtcatcataataaactcgatttaaattctacaacttcatattgagtgataacatttttatatcaaaataatatttatgacatatcaaatctatatcctatttagtattaaaaataattaacaattaacaaaacataattaataggcctaggcataatatccaaacccgaagaaccgacccgaaaaatccgatccgaacccaaacccaaaattttcaagtacccgaacgggtctaaaattcaaaacccaaaaaacccgaacccaaacccgaataggtatccaaacatatctcaaatataagtatatattaatattttcacgggttatacttatatatagaaaatattacgatttttttagatattttagttatttttgtgtatttttagatatattcaaacaaaactactcgtgttgaattgggagtttttgaaattttcaagtaatttaatagatttgcacacaaaatttgatatttcaatatataggggactcgaacccgaacccaaatccaaaccgaacccgacccaaaatcttaaattacccgaacgggtcctaaacttctaaacgcgaaaacccgaacccaaaatacccgatccgaatacccaaacgcctaggactaataattaataaaaaaagaaatccacaaaaatatttagaaaccaaacattgttgaaaatatattttctatatatgccgtaatctcgtaagttaattttacatcatgcaaattaatattaaatgagttaaaattaataaatgaaaataattgaaaagttaaatcctataaactaagctatttttctcaaaatgttctattttcacttatgattacatgagttaaagacaaatttgttaattttctttttgttgaataaatgttaattgtttataaatatatagacatataaattagtatatgtaaatttgtttactttttaaaatttttttatttttttaagagaataaaaagttaaattttgaatgacacatgtacacatctgatcgtttgacttgacacgtggcatgatcctatgagttagtaaatgaattagtatatataaatttgtttactttttaagattttctatttttcaagagaataaaaaattaaattttgaatgacacatgtaaacatctgatcgtttgacttgacatgtggcacgatcgtagttagtaactttgaaaaccatactttatataataagatactaaaaacataaaatactcaatgagacgataacaaaaagaattcagcactataaaattatttttagatatatattaaattagtttaaatgtattctcttataaaagtaaattatattacctcgcgataataattagtaaatataactaactcggccaccataactcagctatttgttggatccaaacccaatccggcagtttaggacttaaaattcaacagtcttcatagaaatagcttatatcaatcacctgattaaatccgggctcgatacgagatcctcttagagatggaattgcaaatatttttaaaatttaatttacctatgtattatctaaggatttgataataacaattgatgaagacgataaagttttgctgagaagcaaaatgtatatatattattttcttgatcgttatatcagaaattattaaactcataatgatttcaagatgagaatcgattggcagctcgtagataacacatgtgtcaaacttaatcaacgtatcatgtattcatgttttcagagtatatatttagctctttttttttctttttttctttgttaaaggctgggtttagtttttagctcctttttaatctaacttttggatgttagttttgtaatttgattgcttttattattgggctagaaaaatcattgtaaaacccctactctttaaagcatatttgagctttgttgggctttttatatgattcaccaaaaatatatcatattttccaagaaacattgatttagtgtgattaatctcgaaacagaatagttcattaagctttattgtgcaatgaataaatataagaataagatttagttttttcactaaaatgaaaatagttatttgattgatcttatacaaattttttggaagagagttactacaagaggcaacttccaaagatttatgttctcaatatcatatacatccgtatatattagtctttttttttttttttgaatatcaggaggttctgggccggagcccgtaattcccccaggcccgaaaccacaacatgtaatacagtagaaggttagatcgaatagtttcatagatttgtttaggatttgcatacctggtgcgacgtcaagtatgacccgcagatcgagtgtattgatcactgcatagagctcttcattttgataactacttgattgaaagagttaagagagaatttagctcttgatattggaattgactcgtaagaaataatgtgaagaggtctgcattttatagtaaacagaagtataaagcttagttggtaaaatatcaacatatattatttatgaatgtgaatatgagaacaacaaaaacatgtggaatcaaattagatttttattttaacaccaataaatctgatattatttaacaccaattcatatatgagattatgttatatctcttgagctagtaaaagggacagatatcatacaataattttcttacaataaaattaatattccacatcacattctattttttttctaacaattttactattttttctgaaatagaaatctcagtttttgtagtactgtatattgaaaaaattatgatataaatatgaatgtctcaatagtaatcatatttgcaagtaacatattatatttaaaacttctccatacaaattataacgagatttgtgtccatgtaaaacttatatagatagatatacctttttaattgcgatatattaatatatacttatctatataatatacacgtatgtggatgtcaaatccacaaaagacctcccaagcaaatatttaagtaatttgtgctcatcatttaatgtatgatacagacagaggacacaacatttaggcctctcgtggtggacgtacaaaatctatcaatctcgatttattggccagttacattggtaacgtgttatgggaacgctagttgcacttaacttatgagccatgtgacttctgtgagagaccgacaaatggtcaacctaccacttcagaatttagtcacttgaatgtctaaatttgaaaaggtaaaaaactataaattccactttaaatccaacatcaaagaggatctaaaaatcgataaaagctggaagaagtatattataattaagtacaaaatctcaccaaggctctctatttgttagccgatctcttcaaattcaatcgaacactttttttcttttagtgttggaaaatctaatggaaaataacatatcactatgtcaacgtctgaaaatcctgtatcttccatggtccaaatgtttaaagcaatgttttttcttttacaagatgaaattttcctgcatttctatttcttctctcttctgatgatatggtgttattttcctttgcaaattatcaatcattgtttgaaaaaaatatatggaattgaaaaatacacttccctccacgtttagtgatgatgtaaatgtttcaccacattcaaataaataaaacatcaatcgat

SEQ ID NO: 30844 - DNA, 4733 bp, Arabidopsis thaliana landsberg
cttcttcctctggagatcagctcgagaagtggacagagtagtttcacattttatttcagtttcattccgcacaatgaaatcgggtgatgatttgtttgacttctttcagagagcaggatgagctgaagaagaaactgatcgcgtacgatgacttcacatggaagttatcttcatcaacggaactgtctcagggatcggagatacttaagtatgttggaggtgtagacatgagcttttgcaaagaagattcttccgtcgcatgcgcttgtctcgtcgttcttgagcttccttctctccgtgtagtccaccatgacttctctcttctccgcctccatgttccttatgtccctggatttcttgcctttcgtgaggtttccttctcctactacttcgtgtccccgagcaatgctctgctaaattcatttgcttcactaaagtatctcagatcccaaaattggatttttcatgttacaggctccggttcttttgcagattctgcagaagatgagagatgagaagcatccattctatcctcaggtttcagttttatctataagttgctttagtttgcaattggctactcttaaaccattgcttttgcgttgattttttttcttctaaaagtctcttgctttgctcttgcaaaggtactgatggtggatggaaatggaatacttcatccacgaggtataaacacacaactttacctttgttttgtagttgcatttcaagctctgtaattatggtgttagatgtaattgtcttctataggatttggcttggcgtgtcatttaggtgttcttgctcacctaccaaccattggggtcggaaagaatgtacggtcttcagaatctcaagctctgaaatttgtgatgttatttttgttttgccttgcattttccatctgatcgttaatgtggaatttatgatgttgtaacattttcagctgcatcatgtggatggtctgaatcaatctgaggttaaacagtcgcttcagctccaaataaacgagcatgagcaaactatcactttggtaggaaactctggaattacatggggagtagtaagtgactttgactgaacatctactgtagttgttgtgtctctttggtaataccgcgttatattagtagtgaattatcagttttagcaacgaaacttctccatagttgtggttttgataatcttgtgtaagatagtgaatttaatgatcaagttttacatattacgttcaacagggatttaggccaactctgagttctctaaagcccatatatgtatcggttggccatcgcatatcactggactctgccgttgaagttgtcaagataacctgcaagtaccgtgttccagaacctattagacaggtaagtgatgcatttaccaacaaacagaaagttatcctgtagatatgtgaaaagtgaaaagtaagagtcgttaagtatacagtttactatatgcaggcagatattagatcaagagcatatctccagaagcatcaaactgagtcttttaaagaactggcagtgcgaccaccggatcaggtaacttctgatgttttctccgccatttctaaccattgtcatattttttcgtactggctcacatgtctctttgcttccttttttgtctaccagactgaaccttaatccctcaagcaaccaagaacactattccacattacatagaaactctccaaagtctttaccaaagattgttaaatggacagattcaggcactgaagatccgccccaattatctccttcatttatctcactgacttgaagattgcaagctaaccaaggtaatcatgttatatccgatacattggaatttcctttccatacataccttaaacaagtgtaaatagaaaggctaggcaactggtaatttggttgtttgggcactgtatattgggagattttggggttctcgacaaacaattctatagctttgggtttggtatttcttttggttcagctgtaactcgtttctcatgctctaagacagcacaatcgtttctcaatcttaagagactgttaatggtggacagattcacagcagtgaagcctcattgattcctcttttgcagcaaacctgcttaactaatataaggtgtaatgtttgaaacttcgggttgggctttaacagctaaagtgaaagatgagatttttatcattttctgattactaacaagagaggtataagagagacagtgaacaccaaactgctctcgagaaataagagatcaaaccaagtatacataaatctcactgtagttttctgtttctccataaacaccaaaagttttgcaaaagaaaaaaggaaaaaaagaaataatcaaacccatcaaattttcttcagtattcacagaacaatatacagacagatggagagaagtagcagcactgccgttgatcgtgttataggcatcatggcacttgcttcactagcatcttctgacttgatcattatcttgaatttgcaactcccaatagaaggatccctagtactgactatagagagacccgggaacttacacgcactgtcgagctgattacttacctggtaatagctattgaacgcatacgaaacattctgtgctagattcaggttaccacaagaggagccataaccaagactggtgcaatcagcatgatcacaagcgtagctcacgcttggtcccaactgaggatcctgaagattagcatttggcgcaagaatacaccatttcttagccaaataatgaacatcctttgcagggatcagcccgttaccactgccaagactgagctgatacttaggctgtccatcaatataaaatatcccccagtgtctttcaaagtttccaggctgaatgcttttggcatcttcatcgataagaccaaacaagtaagcatccattgccccaggtctcataggtgttcctttattagccttttgacggttcataaaaccttgattgtaccgcctggcatacatcaagtttgcgttcttatctccatctgttggccacccaacttccccaacaataatagtcaaattcccaaacccattcttctgcaacgaccacacaagtgtatcgtagtttgcatcaagaacattgtcgtagattcttccattgtcgtttataggagtaccagttccatcaaagaaagcaaactccacagggaaattcgggtcgttgtagagactgatgaaagggtaaatgttgatagtgaatggtgctccgttatcactcagaaacttaacaatgttcaacatgagatcacggatttcaggcctgaaatctccatccgaagggagattagacgcactttggtacacatctgcgttaagaggcactgtgactttcacctgagtcgctaaaccagctttgatgatagctgattgtatattctgaagagcaggaagagttataccctcaaatgttccattgaatgcttttagaaaaggctcattcccaactgccacatacctaaattcaaacacaaaccaactaacttcaatctctttgctttagatcaaaatctaaagactggaactttgggttctaaaatcatttcttccaaagctcttgatcaaaacaaacaaagagaacatgttgtttcaatgagatataagcacaaacctgatatcgacgccattagaggagacatgagcagatacattctgagagacccatctctcagcggctgcaacgctaccggctaaaggagcaagcaagtcgttagggattccgaccataacttgaatccctgtccgacttaaagctttgagaatcgcagagtcggcctcgaaaagtttcaccttttggataccgttttctcggagaagcctcaccaccgtagccggaggtaggggatgcctcgcctgtgagccccagttcacaccaatcccttcaacttcaattaacaaacttgcgtacaacaaagtgattacgaaaaagacagcaaaaacacctttgaacaacatcggaaccgagagataaatcgtaaacaccctatacccaaaaaaggcaaaagccaataacgaaaaagaaacacaccaaaaaagaactgaactttgtggttaaaacgagctaagatgaaagaatcagtgaagtgggaaacttgggtttgaagaagaataagaacagagctgagttttggcttaacttcaatcaacagattatcaaaaaaatcaaagtacggtactatatattattgctttttgggtggaataagttctcttctctcaggtggaatttggagaagaagagggagaggttacaagaactaagatggagaatctgaaatacacgagacttgaaaatgttttaatttcagacatggaacataaacgaaaaaggtttttttattgtctgtcccagtgacctgaaaggcggtgtttgctttttgattggtacccccaatcgaaatttaattagcagaatattatgaaaacgattaacaaaaaaaaagggactaaaagagaaacattaatgttttaatttactacgttaggtgttgtctacttccttagctgtagtagctcttcacaataccactcaaatctattaattatacgatacggcaatcatgataatttataaagaaaaaatcatcaatatatactttaaaataattaatccatcataaatatagatttgggtttaccatctttgttatagtttacagttattataatcagccagcatggtagtaacatgagagagtattaattaaaaataa

SEQ ID NO: 30845 - DNA, 1656 bp, Arabidopsis thaliana landsberg
tagtgacaaaccctctggtggtcagagcaataagataaggcagaaccctagtactattgttacgacaaaaaatggattcttgtgtaaggtgtgttgatcttttcaatcttcgtagtgtatatgattttagctaaacaagtagatgagtgaaatactttttgcagtttttttggatatcgtgcacccgttgtctatttactcttcaaagacttagagctcttttaccagttaccataatctgaatgcagcttttttgtgttatgatttcttttcatttttaacccggtaaaaattatttttatgaatgaagtttattgttgaagagtacggaaattttctcgtaatatccccggctgcagaaaggaaaaacttaaatgagattgagataatgaatctgtgagttcaagttggttctatgagtcctttcggtcagtcttacctttttgggtaatcggttttataaaagctgtaattctcaatataactcttgactgagatattcttgtcctagtccttgaaggtccttcttgttgttgatcttatgttttgtaatcaattttttatggtttcttgacctcaagtcttctattgctttcttgtcagctcgaaccttcaatgccatttccccactcagcaatggagggggcgacaaaatgggatcctgtctgcttggatacaatggaggaagtacaccaaatatatagcaacatgaagcgtattgatcagcaagtgaatgctgtgtcattggtttcttcccttgaagcagaactggaggaagcacatgctcgcatagaagatctcgagagcgagaagcgatctcataaaaagaagctcgagcagttcttgaggaaagttagcgaggagagggctgcttggcggagcagggagcatgagaaggtccgagcaattattgacgatatgaaaactgatatgaacagggagaagaaaacccgtcagagattagaaatcgtaaatcataaactagtcaacgagcttgcagattcaaagttagccgtgaagcgttacatgcaggactacgaaaaggaaaggaaagcaagagaattgattgaggaagtttgcgacgaacttgcaaaggaaataggagaagataaagctgagattgaagcattgaagagagaatccatgagcctcagagaagaagtggacgatgaaagaagaatgctacagatggctgaggtctggcgtgaggaacgtgtccagatgaagcttattgatgccaaagtagcactcgaggaaaggtactcacaaatgaacaagcttgtaggagatttggaatctttccttaggtcacgagatatcgtgacagatgtcaaagaggtgagagaagctgagttattaagagaaaccgcagcatcagttaatatccaagaaatcaaggaatttacgtatgtgcctgcaaacccggatgatatctacgcggtgtttgaagaaatgaatctcggtgaagcccatgatagagaaatggagaaatctgttgcttacagtccaatcagccacgattctaaagttcacacggtaagtctagatgccaatatgatgaacaagaaagggagacactcagatgcttatactcaccagaatggagacattgaagaagatgatatgcggttgggaaacagtgagccacctcgaaga

SEQ ID NO: 30846 - DNA, 4427 bp, Arabidopsis thaliana landsberg
catccaacatgaaagaccaaagatgtaagtacctcttcatctggaccgggaaacccgcttcgcttaaaggcttgacgccaacctctttcatacaaaaatgatactaatggactcctacacacacaccaaaaaaaaaagaagaagctcacatgacacttaagctaagagagcagtgatggttagtattgataaaatcatgtaaattgtaccgaaagagctcggtagtaatgggtttgacttcattataatcatccaaatcagcagtgacagtaagatccaagtattcatctttgctagaatatgtcttgttacattgtccacacttgaatccagacctgtagattgcttgtctgcagcagattcacaaaaatgctttagagaaataagaaaaagggcaaaactttgaaatcattttacaatctgaggaagtaagtaaagaacttacaggttgatacctgaaggtcctttcctcataagtggttcgtagcaaacaggacacgcgaacacttgagtttcctctatttcgatctttggagtttcatttttatttatgtcctgaaaataccattgtacaaggtttacatacatatacaaagcttgtaaatcaaatcaagtgaattaacaaaaaagcagaacgcaccgatttgggagcaacggcgcttatggctgcggatggaaaacgagaacgaacagaggtagaagcagagaatcggagaagaggagattgtgaatcagaggagaagaaggaagagcggttaggtaagaaaggtttgttgaggagagtaatagcagaagaagaagatgttagagccgccatcgccatttgagcagagaaatggagcttaaaaatcaacgagcacagagagatgttttggctcaatttatacgaaatctcgttgctcagacaaattgtgcgtttcttgtaacagagtctggagcaataaatgtgttgtccgaattttgagctatgttttaagccggaataaaagacgcacacttctcgttttcaccattcactttttcatctattttttaaaggtatattattacttggttaaacaggatccacatgatcgagtggattctttgctcacaagtcacaacgttgtacttgtaccttatgattcttctaggcctaactaaattgttgctacgtgacaaatatgttttgaatatggatcgcaaaagcatcaaaagcctggttttggagattgttgaagaccgttgcttgctactgagtaattatatgtatacatactttgaatctggtgttaaaaaaaattcacatgaagaagtatggtttgtttgtattcactaaaaagtaaacaaactactctccttgatctcatatatggagaaagcaacagacaaagcacaagaagacacggtaaccaacttataagatgagggaagctctcactcaatctgcgtctccaagaccatcacttccatcgcctctctttgtaatttctgtgaactgagagtttggtttcttcttctgtgatgatgccacctctgcgtttctcctcagaacagctccaggtgatggatatggtcgttgttgaaacagaggaccctgaaacacgatttgatctcgtttagttagaacctcaattttttcatctggtttagtgaggtcggttatttggaatttaaagaagatcccagtctgaaaaggtaaatgccattaccgaagcagttgtatcagcggctcgcggttgtactcctttcagtccaacaaccctacaagatgagaagcaatcagatcaacctgatattatgattcctatgagcataattagcttggttgttaaccaaaaaagaacttggttctcctcaattcagatgacatagcagagagagatagagaacagtattataggtcatgccgtttcatgaagtggttaaaatgggtgttatggacattaccagcctccccgtggagcatctgagtaagagctcgggtccattggatccaactcatcatcttcggcatgagcacgctttttgcctattacttttttcatgggaggttttgaactggacctgtttcaaccattttcatttttccatcatgtgtaaagaaaataccacaagagtaagtacaatgtaaacatagtcaatgggaacctcctggttcactactacatgtaatgtgttccatcttcattttactgctgataaatggaatgctttttaacagaaattatgtccctccgaaaagaggggcaacatttgtatccaaatgggttgtctaaatatctggtaacagatgttaagaagatgaccagagtccaccaatagctctcttatggaacactatgtattttagaaagataacgggcatagaagaatattttttctaaatctaagattttgagagatgcgtacctctgattcggatccttttggccagaatcgcctgcatttgtgaaatggtttaaatgtgctggcaagaattgcttttctgggagattgaaaaccctgaatcccatataatatgagtcccgttaaccaaaggcagaggggcttaagcctcaaaatatgcaagtaaacaaagtgtatttaaggtcttgatgcacactaataaatgcttcctataacacaaatctgagccagtaataaaaagggagtcatggtagaggactagaggtatatacattattaacagtcttcaaccgaagcagtctctatgcagcaatctaactcaaaaagcataacaagaaatggaagggttcctacctggtacaatgaacacaataaccccatctctggacaaggcccactccccagcccccacatccgctgcatcttggcagctgagatggaggatgctcccccttcccattagccgtactttgggtaacagcgttgttagagtttgtggcagcgggcttctgtaaagaagctggaggttcccactgagacacatgtgtccttgtattgtagaaatacttatggcctgtgcataggaatcaaaaggttcagagttcaaagatgcaaccaacagatccaaagattaagcaagcattgcgtgtacagtacaacagaaatcagaagaagctggtcaataagaggcaaaaacttccagcagaaaacacaaggatttcctcattcttatttctaacatgtgatgatgtaagtttctttccaagatgaaaaagatcataagctattaaattcattttgctaacagcataataccacaataagaaaaggagaaagatatcatacttttataatctttgatatgaatattgtagcaacgagctagtcattatgatgactaaatgtgtgaaaatcataccagatgcttcatcaaatgtttcaatccactcttctttagaaagtacaggtggtgcacttgaagtggcataagaaagctcaacaggcctttcccactggcatgttccagtgtgctggttatagtaataggtagcaccactggcaggatcttttgcatctacctgaatgaaacagaacaaatttaagtggtataacaactataaacacatcatcagaaccataagtggtcatccttaaggattgagatctaaagactatttgtgtatgaccacattatcacatgcatttggagaatctcaaacgattaccgcactttcacagcagaaaatattgctgcaccagatagtaaagcaaagacaaaaatgaagaagaaaagacttttaagtgtatctcattcatacccatcctaatggtaaggtgcttgcattagcctgaaaaggtaaagttgcctgtctattccaactaaccgctgatgtctggaaaagagaagaaacacaagcaaacaaaaacgtcaaaaggttaacaaatattaataagataaactgaaacaaaggggctgaaatatggacaagtcattgcagacatatgtcaccctggattacagtctgagggatgaataattacatcttgtgggttggatgtaacagcccctgcaccatctctgagaattcccctggcctttaatttttgtttgagatattcaggcaaattgtttgaagcattggtaggttcaagcttcccactgagctcggagtgacccgcgtatgcaactccacccggtataccataaccgtttccaacatccacattacctagaacggaataaagtcgataattggatcagtttcctgaattttcctaaatgactgagctcgtaagctattatgactaaccttctccgcatgtactcacactcccaccacgctttgccgctgcttctgctctatgatttgcagtgaactttagcaaatgttcctgcataaagataatatgtatcaaaacttcatgtgattataggacttattaagccaatagccgcttgatgataaacaaaaaaaatagtgaatcagaacctttagagcattggggtcagcacgatctcgaagaaatcagtgttatgc

SEQ ID NO: 30847 - DNA, 1789 bp, Arabidopsis thaliana landsberg
ctataagagaaataaaaatcacacatgcgatcacacatgggccggtccgcttggcatttatgggtattgaaaactagttgcacacttgcactataggaaattgtataaccattttatgataaaatatttcattccaaagagtttttgactttatatatttgttagagcaaatcgtttcccgtgattgtccaagtatctgaaatggcgacaaacttgaaatccctattaccagctatcggtacggatgaaaccctaaattcattattttcagcaaatgtcgcactcatcatcaaagttttcatattaaatctcaaggaaactaaaatgcatgagacaatggtttttgtagacatcagtcctttagtggtcaaatgtgatgatgccaacatggcggaggatgccggcgtggcggagagttgtgggaaagctggacagggcctgtggggacgcaggattcttctacgtagtaagttaaaaacactttctataatggagttttatttgtttggattttgttaaagggtttgatattggtcagtgatttttgagcagataggccatggaatatcagaggatgttattaacaaggttagagagatcactcgtgagttctttaagcttccttatgaagagaaacttaaaatcaaaatgactccagctgctggatacaggtttgtgtgtataattgttttcccccctaaattcgaatagttttgagactgttctgttattgtgaacagaggatatcagagaattggagaaaatgtgaccaaaggaataccagatattcatgaagccattgatgtaagtgttttgtgtcctttaggcattagtaatgtaaccatgtaattctcttgatgtattttattctcttatggatagtgttacagagagattaagcaggggaagtatggggatataggcaaagttatggaagggccaaaccagtggtaatttatattcgatgtcttatccggttatgttgtttagtcttatgaccatttctatcatattttgtggtgttttcattgaaggccagagaatcctcaggagtttaaagagttgatggaggagtatattaagctatgtacaggtggtgtgtttttccatttctctgtttcttatgtgttatgtttccaagagttcttagtttgtaatttcatttcatatggtttcagatctttctagaaagattttgagaggaatctccttagctcttgctggatcaccttatgagttcgagggaaagatggctggtgatcctttttgggtgatgcgtcttattggttatccaggtgctgagttcacaaatggccaacctgaaaatgatattggatggtaactttctgctacttctcctcctttttcacttatcagctcaagtaactaaccttttccgatcttctgcttacaacgatatgtttcaagtggagctcacactgactatggtaattaagtttaaccctgaagtgaaatcaagttaaacttttgcttatgtctcaatggggtaacacttttctctgcaggcttgttaactcttgtgaatcaagatgatgacaaaactgctcttcaggtcaatattattatgatgatcctcatttgatttaatgtttatgtgaagaagtggtcttgcctctttaacagattttaactttgaaaaggtgagaaacttgggcggtgagtggatatcagccattccaatccctggatcgtttgtttgcaacatcggtgaaatgttaaaggtttgttcttcccatctcacttcctttctcttgaatacaattttaga

SEQ ID NO: 30848 - DNA, 3522 bp, Arabidopsis thaliana landsberg
  unsure (1)..(3522): unsure at all n locations
aagaaaggcttctatcccattgtttatcgatcgatcccttcgatcttgtcttccactctgcgagtacaattccttgagcttctctatgttgtgcagcggaagtgtcccagtagccacgaccattggcctccaagaaagtctgaagcattttcctgaaggagttgggattggtgttcatgagacggttcagcatctcctcgtcttggatgaaagttgagttggcctcctcgtagacccaattgtctacttgacctgacgttgcactccatcccacagtgttggacagtctcttctctatctcacgaactccttcatatccacttgacatcattccttcgtaccactttggattcagcagctttgttcttgcgtccagcctcactgtctcagatagtgtcctcacctgccagattcaacaaataccttaaggaatgtgttcttgcaaggtaaaactgatcccatatatgaactacaaagaaaattcactcacctgcgcgtttgcagttgtagtgtcagcaatgtaagagcttggtttcttcttatccttcctcaaactctgaactagatttgtagggtcagaatcgaagtagtggctcacatcagtcaaagaaatctctgaagaatccaggttctggaaggtgacttctgcagtgctaagagccatctcaaagacctgcttcttctcagccattcctgctccaggagcatcactatcaaacgcaaacgatttgcggctcaagtacatgtcctgaagctgtttctcatcgttccatgacgagttttcaacagcaagactgatgttggctgagtatgaccctgaagcgtttgagaaaactcttgtcgctgcctctctaatatcaatgccaagcgcctctgcttgttccaacgcgtgtttccttacaaaattttgctctacaggctcatctagctccgccaccatcttgatagctcggtcaagaaggttcatctgtcaagataattcaaggaagaaacaccatgagagaccaaccaacaagaatctaaatgaaagaagagagaaagcttttatctggttacctggttgataaagagatcacggaagacccctgagcagttaacaactacatcgatcctcggccttcctagttcttctaagctcacaggctcgacacggttcactcttccaaaagtatcagcaattggtctcacaccaatcatccaaagaacctgcccaagagactccccatatgttttgatgttgtcagttccccaaagaacaagcgcgattgtctcgggatatttcccttcgttttcgagcttctgtctctctaccaacctctcaaccacaatcttggcacttgccattgctgctgttgtgggaatagcctgaggatctaaggcatggatgtttttaccggttggtaagacctttgggtttctgatgggatcacctccggggccaggctcgacgtacttgccttccaaagcttgcattagactccctagttcgttgtccatgaccaccaacttcaggcactctccaaggaaaccaaacactgttctgagcttatctctgttcgccctgtagaacttggtgttggacaaatactcaacccatggctcattgattccaaacccaagaagcgaggtaagcttgtcagacacatccaccacctgtcctttgctatttgttgttttttccacaaaggcggaaacagcgccacgtgaggcatcagtnnnnnnnnnnnnnnnnnnnnnnnnnnnnnagatacccttgtcgcttcctctgtaaacatcctctatctcccttccaacacactcagctaatatagaaggaagagctgaaatctcatcctccggacgatctagagcagcaatgttgaccagtgtggccacagcttccatggcggatggaggctctccaatgacgtgaagcccgcacggcaaaagccttgattcaatctccataatcttggaataaactttcccaaccacagaatctctgtctttaggtgacaactccaagccttcatctggaagatccacatccttatcaagattacattgcttagctgtgctgatgatggaactgacgatctgtggacctctccccgtgtccttcagagactgataggacgatatcagctcactcaactgcttcagccctttgtatagaccagcattctcagctggaggagtcaaataactgatggtgttggcgtaacttctcctctttgcaatggtagcttcagagggattgttagctgcataatagtagacattgggaatgttcccgataagactgtcgggaaaacaagcatcactcattcccacttgcttcccgggcataaactcgagagaaccatgtgttccaaaatgaagaacagcatcagctttgaagatcttttctacataagagtagtaagcagcaaaaccgtgatgaggacttgctgacttggagaaaagcagcctcatgggatcaccttcatacccaaatgttggttgcactccgatgaaaacattaccgtacgcttttccatagacaagaaggttctctccatctgagttaaggttccccggaggtttcccccagttttcttccagggcatttgcataaggagtgaggtcttggtactcacggactcccattttgtaagctacattgaggttagggctgctgaactgagcctccttgtcatgaatgatttcttcaataagagtctctgcattctcaggaaggccttcaacattgtagccatctctcttgaggtctcttaacaccgagaagatggaagcaaacacattgaggtaagctgcagtccctacattacctttatcaggtgggaaactgaaaacagtgattgccagcttcttctctgcctgcaatgagccagagttgattcatgagaacatacattacattcttgagaaagtcatgaaggaatgtgatttcactaaggatgagtggtaatacaataccttagtttttcttttgagctcaccccatcgaatcgctctgatgcagagttgctccactctcttgtggagagcatgtgacttccctgcagcaattggtaaaccacctccataagaaaacattcccactcttgcgtaatgacaatcatgaaaaatgcaatatggtcataagtggactaacctgttctagggtcacgaccagcgaaaacgattggctccatcgctccatcaagctcagggagggcaacctgcagagccacctggatgggatgcagaccaagtgtgctgtttagccattcctctgtcgtctggaacaccagtggtactgccacaaggtaaggaacatcgagctttttcagggcttcgatagccctgggatgatcctgccttgcaggtccaccaacaagagcaaaaccagtcaaggagacagcagagtttacgatgggctgtttcgacaccgggtctacgaaatatttctctactggaccagagaaatccaaccctcctgcgaatataggagcgaccttagcacctctagcctcacagctccatgataacagccacata

SEQ ID NO: 30849 - DNA, 3869 bp, Arabidopsis thaliana landsberg
tatatattattgttctagggcttttgttgccaaaattggtaatcacatattttcttgggtttatattattgttcttaaaaatcatattcaatgagtaacttggttctatgggttctttgaaccggcttctaaattttaatatatgtgatctaatttcaggagacaagcttggcgagaaaaggggcacaaaagattactcttagtattggtgatggggccaatgatgttagcatgattcaagctgctcatgttggtataggaataagtgggatggagggtatgcaagctgtgatggctagtgattttgccattgctcagttcagatttcttacagatttacttcttgtccatggacggtggtcatatcttagaatctgcaaggttgaatttctctttcgctacaaacacgctttagttttttctgaaatttctaacgatctttttcttcgcaggttgtcatgtatttcttctacaagaatcttaccttcactttgactcagttttggttcacatttcgaactggattttctgggcaaaggttttatgatgattggttccagtcattgtttaatgttgtatttacagctcttcctgtcatcgtccttgggctgtttgagaaggtactagcttttctcgatctctactttatacaagagaatattcatctaatttaagacttttcttcatattgttttggattgtataatttcatctctatgttgtgctcttgctaggatgtgagtgcatccctttcgaaaagatatccagaactgtatagagagggaatacgtaactcatttttcaaatggagagttgtagcagtatgggctacttctgctgtgtatcagtctctcgtctgctatctcttcgtgaccacctcatctttcggtgctgtaaattcatcaggcaaagtatttggcctctgggatgttagcacaatggtcttcacatgtctggtgattgctgtgaatgtgcgcattcttttgatgagcaattccattaccagatggcattatatcacagtcggtgggagtattcttgcatggctcgtttttgctttcgtatactgcgggattatgacaccacatgataggaatgtacgcagccagcttacatcttcggttttctgattttttgtcttagttttttttcaacttggcaaatctgatttccttcttttcttgtctctgcaggaaaatgtctactttgtcatatatgttctgatgagtacattctatttctacttcacattgttgcttgttcccattgtctctcttctaggcgatttcatcttccaagggtacgtaaaactggatattcttagtttcaatttttttttggcattgacgaacatgtgattatattgcgaacgattctgtttagttatgacatgagagaatctgtgtctttactgatgtagggtggagagatggttcttcccgtatgattatcagatcgttcaagaaatacataggcacgaatcagatgcaagcaaggcagatcagctggaggtagagaacgagctcacacctcaagaggcgagaagctatgcgatatcacaattgcctcgggagctctcaaagcacactgggtttgcgtttgattcaccaggttatgaatctttctttgcatctcagttaggtatatacgcgccacagaaggcgtgggatgtggcaaggagagccagtatgaggtcacggccaaaggtaccgaagaagtaaagatccgatatataacatattattgctaattgtctttgtacatttaggcaatgtcatcggcttggggggtttttgttagggcctttagttctaaaatatatgtagaaaatatgcttcattaggtgttttatgtttgtgttttgctttaaatgccattttcatagctccatttatgactaatgtggagagccaaggcgttagcaacccaatacttgttccccatgtgcataaaattgattatattacacctttgagttcattatttctccttttatttattccaaatatcttttgcgtcttattcttatacattgtatgtcaaatgtgtatacattttagagtactactataacaatcccattttatattattagtcgatgccttataacaacgaagaaatagtttaggagaggacgaatactctattggtactattacacaccaaatgtggtagaaatagtgaattcttaattgaaacatcaagttattatcaaaagacattttctataataagaagaggcttctacaaacctgtttcagtatcaacatcaacaaaaaaatgatgggtttttcgtctttggtatcacattccatctagagactcgaaaaaacaaaataaaacagagacacatctacaatgatacagcaacaaacaaactttggaagaaaaaaaatgaaatcacaaaaaataatcaggggtcttgcgtgtggtatcgggttcgacttgtctaggtgctggatcgaattgaaggaagttctgttccatcttttctccaatctcaagaattgcggccatgtttccacatctgtaacagtagtttggtgcactaaacactgtcactacgttcttttcctatcaacacaccgaaagattcagcatttttgcaaccagaactctattcaacagatatgccaatctattgttatgaacatattatatacctgacaccaattatagccttccattacaagttgatgcgctcttgatatcagactcagtccattgttatgattgaactgagtagcaatgtcctgtccaaacgtgtaaccagcaccacgaggagatattccccatccacaacgatcgtcgggatcagaccagagtagatcgcacattggtccttcgtgtggaacctacaatcccagagcataccatatcagattattacaatccttgttctatctgaagccaaaactaataataactaggaggttggtttcagagagtttatagccagagagaaacagtgtctttagggaaaaagaggagacatttacagatactaaatgcaaatcaatgcttctatacccaaaacaatacctcttgtattcgatccaagcttcggatattgtcaagagtatccagagaaggtgaaaggcctccatgcaaacagaaaacctgtcacggaatacagttgatgaagaaaagtgcggaaatgaaagaatgacgattggcaagaacagctcgaacctgactctctatgagtgctgttagagggagataatcgaaaaggtccgtaaaatacttccacacatttgcatttccgtataaatcaagcattagtcataaaaaccatagctgaacaaacataagcaaaaacaagcacaaaccattgttagagcgagtcagaagcaaatgaaatacaagtcttcttagaaagaaaatcttacacttgtgtaatctgacggctctcatgattccctcgcaggatcgtaagtctgtccctgtaacgcaccttcaatgccaccaatagagagactgtttctacagaatagtagccacgatctgcacagatataaccaagacaaaaacaataaaccaaagaaataactatcagctccaaacttcaaacagaaccagcatactttgaatcaagcatacatgctctgaaaatcaacataagaacacagatctctaaaaacccaacaaatcaggaaatttaacttacccacaaaaaataaatgaaatagtgtgatagagaagagagaaagacatacctacataatctcccatgaagaggtaattagtatcaggagcattaccaccaatacgaaatagctcaattaggtcataaaactgtccatggatatcgccgcataccgtaaccggacacttaaccggttgaacattatattcctcaacgagaa

SEQ ID NO: 30850 - DNA, 4181 bp, Arabidopsis thaliana landsberg
  unsure (1)..(4181): unsure at all n locations
tgctctgctagcttttaattagcgtgatgtggaagcagtgttttgtttgcttaaattgtgtggatcaggtacttgtacagaggtatttcgactggtgacgaacccacatgcgaacagtgtttgatgattcacgagaagctaacagagagagctggtctcggttgcattctccgctgtcttagtgatactaccaacacggtttaaaccattaagctaagctgatcttttcatgttacttttttcttgttttctatgaatgtttctcccaaatctcaagttacttcaatagattatagaaagtggaataaaccggagaacctaagatcctttcacaaagagatagtcataatagaacctacggtttatctattacctgttttaaattatatctcataaccaggaaacttagaatctaccggtgacacaagatcgaaccagaggcatactggtccagctagtccccggaaaagcgaataatcatgttctgtttcttggcttgtcatattcacgagctctatcgcatcacggcacaagtaactcgcaaacgcttttgctctctcttcatatacaacatctccggttaagcgataaagggataagaaagcgtaggcattaccagcaactccatcagctaaacctaccttcttcaccaagccactcttccacactacttctcctgcttcaatggctgcttcgcggaaatccctttccttgggaaacacctgagatgctttagccaaagtaatggccatgccggttgctccatgagcccattggactagcttatccctcggattcccttcgctgcacgggtagtttctgctgttcggaaacctattactcatcatatacctcaatgtcccttgaacatctttaacatcctcttccgatagtggaaaatgcagcaatacatacaagattccagctaatccattcgcagcaccccaaaatcgcgttccgtgaaacctaaaagccacaaaagtaagatcaattcctactaaagataaacaggattctcttttaacaaactatagctattttgtgaaacctgtataacagaggacaagcttcatgatctgcagctccaactcgcccaccggctaagatggctgcaacaatgggtgataagagatggtcaggaacagttccttggccgagatatcggtttaggaacagagcagcccaaaggaaacccgctcttccatagagaaggtcatatgacatcccaaatcctccttcctctggtcctgctggtaactctctctcttctgcaagctgcttgtaagaataacaaatcttaaaggctcgtcacttcactaatcttgcttaagggttaatatatgacaggttggatcaaaatactgaatctatagcttttatctgaaagtgttgtaagcaaaagaaatggtgtatgaagtcaaaaagattggaacctcaagaaaaagaccgaggaagaagtcacgctttgattggtcccctctgtaattggctacaattgcaccaagcgtacaaactcctcctcttccacataaaaatgtcacgtgcctattcatgagcataacaagtccaataatttgttagaaaatgacaagtccattctaatgggtgtgtagatattgttannnnnnnnnnnnnnnnnnnnnnnnncatacatacataattttctataaactataattggttaaagagtgacatctttgtaatgactcaatctcacacatgtgttttctatcagacagattttaattaagaatattctttaaaatggttagaatccattttttttttttttatggaagatgatatttgatgtttacttggctaagcaacttagtgtacgaagatattttcacctggttgtggcacgcgcaacgttggcacacgtgtcgattatctctgcgcaagttagcagatcttgatggttccgcgttacctcgtacgacttcaagcaggtgaacgctgtgccgagtagtcctgtgtacacagtcggatccagcactggacccgaaccagaggcaagagcttcgacaccacctttccacgtggcctccacaacctatacatacatcgaccaaaaaacatatatgagcgaacgtacggactaggcttacattagccgtctggggcgtcgcatagttatcgtaacgcacctggttcttgagtaacgtcgctgctctgaggaaagattccgtagggagagaaatagtcggagccgacggttcggaaagcaaatgatcaagctcgccgttctttactgtctctccggcgccgttaccatcgtcgccgcatctcccctgttccgtcacgaaatccaccgccgacgacgacatagctctcgcctttgtgtctctgtcttactcttgatcttgattgatatcttgaagaaagaatcaaatacggtagttatatttatttgtagtttttataacagccgctatctatatagtttctgttttttttatttatctttatttattttagttctattagaccaaataaaattactgtaatggatttttcttcttttaaaagaaatttgtgaatcaccttttagtttagttttggtataaaatattttagtaatttatttggattaattcagtagttaataaatatgttaggtacttgagtatgatttttagcagttccacacgtgttttcgtaattttgtgcatttgggtataggacctgccagtctttaaaataatgacttaagcatcttggaaaataaatgtgatgcttctattaaagtatcaagaaacaaaggaaaagctgaaagtggggtttagggtattggattctggttgcaggacatgaccgtaatacacgtgaaccggtagacagagcctaaacgtgtcagcatcttgtcggctctatcatttttacgaatcgatttgccgttagatctggcttaggggatatggcatggactacgaacgctcgatgttatatacctttataaataaggaataaaaaagtgcagagatttgagaatctcatactatatcagacgattaaaaaactaatcgaatatgtaatgttttagttgataaacggatcaattagttatatttttaaaataggtgagtgtgaacgcgtcgaaatgtgtttcttgtcaatttacgaattatacatttggttagatagtcacttattgaacatgaatcagtgtattagctgctgacctgtaaacacgtttggaaaacgtgaatcatgtgatattctttcacgcgtgttaattaaacacctaaaccccgtatgttgtaaaacgcatgtagtctctatagatcggacggcccatatttaattcatcaaattatatttgtaggtgtaaccaggcccagttactgaccatcaatatcaggctttgtaaagtgcagcccagttcctagaggcctaactttgttgaaattcattttattcaattaaaaatagtggagtttttttttaagacaactaattaataattaattatgaaaagccaaaaaaaacaaacagaaaattcaaaatttcatgcgaaaatgcgcagcatgatatcaaaaacttcgtgcttgcgcaagaattaagcattttcattaaacaaaaattaaaaaaaatgtgttccttgactttctgaaacaaccaattaccttacaacttaaaatcatatttatcagagtactaatggattaaatttgacgcaaacaaatattaattttagatttgatggttgaaattatttaatattaatcagactaattcttctcaaagtctctcaattctaaactctcaccaaataacgaagataaatatttacgttttctttttaaaaaagcattagagcgtggaaaaagctgcttcttcttcttcgtcaatgaaccgaaccgagatcgaaccaaggaaacgaaactgaagaacgaaaaaaaggaacaacaaactagagagcgaccttcctcttaccggcgcgttactctcacgcnnnnnnnnnnnnnnnnnnnngtcgagcgatctcgcggcggcgtttatcgataccctaagctcgtggttgtttcagatttttgttaattgaattctctgcatcgagatagagggagatgtgggttttctatctgatctcgtcgcctctaaccctaggattagttgttttcacgaaccgatacttcgccggaccggagattcctcggtacgttcttatcgccgtt

SEQ ID NO: 30851 - DNA, 1138 bp, Arabidopsis thaliana landsberg
ctctgaatctattgaattatggttatgttctctttatttatagaccttaaaatttcaacatgggttgtcaaaactttcaactttgataatgtcctcatacttctgaaaaaaaaacaaagtttcttttgagccaaatttgaaactatgtttagtcgagagttaccaaaagcaatctccaaagcatctaaacgactgatgttatgtaagaaatcaatgactttcttggttcataagaaccaatgttagaaaatatgattcttctgacaggtttattaactagtaacaagaatatatgactatcaaatgttaatgaaaacaagttaacattgtaaagatgtacatattggcaagtttgtcagggagcttaagaccttagacaaaaccttaagagtcaagttaacacagagaagaacaatagtcaggtcacttccttacgcctaatcaaaagaacttcttgttgaatgatctgcacaataaggaccatgccaacagaatcatgaaacttttactgagagttatagattaaatagcttattataataccacagaaccaccagatccgggcgcccatatacgatattcctcctttatgaaagaccacagaagctagaaaattcgataaattcacgaaaaagaaggttccagattgaacctctcttcatttatattactgacaatgcagtagtacaaagatctaaccaacagtttgaatttaccacaaggagataatggctgttgttaacctccaaaactgatatttcactcaatagttactcacttttatacattcagtatctcagcttcaccaactgtacatttagaacacttaagatttcaatgatctattatcctggctaaaacaagggttacgctttacttgtgtactaatatcaccgagcattattctatggttcactaattaaatagcacctaagaagtcttgaggaactaaactagtctatgactaaatctgttaaagaaatccagaatctgcaatcaagatatagtggaaacaaaaggaagagatttcttattccttgttaccgaatctcttggcaatgacaggacgaacatcgttggcatcagccaatgtctctaagaagggaagtaatgtaatcagaccatcatcagttggatc

SEQ ID NO: 30852 - DNA, 4321 bp, Arabidopsis thaliana landsberg
  unsure (1)..(4321): unsure at all n locations
gatcagaagcttttttttttgttggttgtaataatttataaattgctcagtgtccctatggattaggtgatggtgctaatgtaaatgtcacatatggataaaagttgttacatgcccaataaatacataaatgctttatattgtaataattttttatttgttttgcaactgtacatttatggtaacaatattggtattatatgtgtttaacagtcagcatcatagagacatattcttaggaaaatgtacagcatattatattctctgtcattttcaaaacataaatctgattaattacttgtaaacagcataattttattcattagaaggattaatttttttttccggcagaataaaaatttcatattattagttcaccaaagaaactgcgaccgagtggtttctttggcagcgctttgttgctgcacgtggcttatccccacaaatatttacaaactccaccagatattttcatgctttcacattttagtcccaaccttttgtttgaataccatctaacactttgctttttaaaattcctatttttaaaaaccgaagtcgaatgcttgatttgtattcaaagacacttcaccttcgattttgtcatctatatggttgaatgttttctttaagattgtccatggagaatcctacaagtttcaccaaaaacattaacaaatacatatacatatatggatggacataaccttgtgcattctgtaattgaccagcttcaaacacatacttgacaattcacagaaaattatctctcattctcttaaagatacattttgaataaagagaagatggagcttgaagaacagaagaagtactttcatggaacactagagattacaatcttcgatgcaacacctttttctcctccatttcctttcaatgtaagtctatatcatatactgaattagtgactctgatgatgttatcattgtgttcattttcatgagcttttgttatctttgttcacagtgtatatgtacaaagccaaaagcagcttacgtgaccatcaagataaacaagaagaaagttgctaaaacaagctcagaatacgaccgtatttggaatcagacttttcagatcctctgcgctcacccggttactgacacgactatcaccatcacgctcaagactcgatgttctgttctcggaagattccgaatctctgcagaacagatcctgacatctaattcagcagttatcaacgggttcttccctctgattgcagacaatgggtcaacgaaacgtaacttgaagcttaagtgtttgatgtggttcagaccggcttatcttgaaccgggatggtgcagagcgcttgaagaagcgtcttttcaaggtattaggaacgcaagcttccctcaaagatcgaactgcagagtcgtactgtatcaagatgcacaccacaaggccacatttgatccaagggttgatgatgttccttttaatgcaaggaatctatgggaagatgtttacaaagcgatcgaaagtgctaggcacttggtttacattgcaggatgggcactaaaccctaatcttgttcttgtacgcgacaacgaaactgagattccacatgcggttggagtaacggttggcgagcttctgaaacggaaatcagaggaaggtgtagcggtgagagtaatgttgtggaacgacgagacgtctttaccaatgatcaagaacaaaggtgtaatgagaacaaacgtcgaaagagctcttgcttacttcagaaacacaaacgttgtttgtagattgtgtccaagattgcacaaaaagctccctacagcgtttgcacaccaccaaaagacaataacactggatacacgggtgacaaattcaagcacgaaggagcgagagatcatgagcttccttggcgggtttgacctttgcgatggtcgatatgacactgaggagcattcactgtttcgtacactcggaacagaagctgatttttaccagacaagtgtagctggagctaagctaagtagaggcggaccaagagagccatggcatgattgccatgtgtccgtggttggaggagcggcttgggatgtcctgaagaacttcgaacagcgatggacgaaacagtgtaacccttccgtgttggttaacacttcagggatcagaaacttagtaaacctaaccggacctactgaggaaaataacaggaaatggaatgttcaagttctgagatcgatagatcacatatcggcaacagagatgccaagaggtttgccggtagagaagagtgtacacgatggctatgtcgcagcaattcgaaaggctgagaggtttatctacatcgagaatcagtatttcatgggaagctgtgatcattgggagagcaagaacgataagtacgaaatttctcttaacgaagctattaaatatccattgggagattctgatctattttagtatttctttttttgatggatagaatctgcagcggatgcacaaacttgatacctgtcgaaatagcgttaaagattgctgctaagatacgtgcaagggagagatttgctgtgtatatagtcataccgatgtggccggaagggccaccggagagtgaaacggttgaagagatacttcattggacgagagagacgatgtcaatgatgtatcagatcattggagaggcgatatgggaagttggagacaagtcgcatccgagggattatctaaacttcttctgtcttgcaaacagagaagagaagagagatggggagtttgaagcagtttcgtcgccccaccagaaaacgcattactggaatgcgcagaggaatcggagattcatggtctatgtccactccaagctcatgataggtaacaaacaatccgcaattcacaatctgaaatgaaaatatattgaagattcgttaaactttcacaaactttcacttaagatttaaattacagagattgtcatatgtttgtagtggacgacacatacattttgataggatcagccaatataaaccagagatcaatggatggttgtcgggacaccgagattgcaataggttgctaccaaaccaataccaacaacaccaacgaaatccaagcttaccggttatcgctctggtatgagcataccggtggcaagatcacggcagatgacttatcatcgtcagagccagagagtcttgaatgtgtccgagggttacggacaataggagagcaaatgtgggagatttacagtggagacaaggtcgtagacatgctcggtatccatttggtcgcctatccaattagtgtgacaggagatggtgcagttgaggaagtcggtgacggttgctttcctgataccaagaccttggtgaaaggaaagaggtccaagatgtttcctcctgttctaaccacctgaaaaaatgtccgaatcagaatcattcttagatcataacttgcaatacatatatataaataacattcagcctgttaattatgatgaaatacgcatataaatgtttgattatgagaggatgtatttagtggttaacacacttactggtttctgttataaccattccggtccctttgtcgtttccaacttgtagatgaatggtcttttcaagctttgtcgcctgtaacaaggagaagaataatcaaaacctgtatatacatgaaacgagcagttttcaacagctaatatttatgcaaagcatacaatgctacgtgacttagcagactggatctctacatctaatgtctaaaaggtgaaccggaatggagcttgaagaagaatcatttcctatccgtgtccaagctcatctaatggctaagtaacaaatctcccttatttcatcgtgtactgttccaagaagcttcacactactggaaacttgcatctttgcagcaccgcttcaattctagatctggagtaacaactctgttaatcctcagagattacagtccaatgctattcaatatgtccttgataagaacacatgagggcaaacatttctgaagatgtaagtcgtttctaactcactcttaagctggaaagttctcagagtcttcggaaaagcaagagggaagtaaactaagttcctctagatttaaatcgatacaacctttcatccttgtaaaacctacacctaacttcagagcaatataaagacttaaaacttaaacccacagcagtaggctagtagcagtaaactccaggataaagtgagctaatcctatgtatttcttatctacaaaacctttgcctttattaacatgggtaagataatcctttccaatctctaaagaaactttgtttcgtgctactncagaaaccaacgtagtgaaccatcttcaagac

SEQ ID NO: 30853 - DNA, 3049 bp, Arabidopsis thaliana landsberg
atcctgtgagatgttcttgtcttccatattctctttttcgctttcttcggatctactactgtcatggccacttgtaggatttgaggagagtgaattgacatcatctataccttctggacactctaatggaattttttcatggctggattctgcagggcacaaagaaagaacaggcttttccccggttccaaccagtttgaacttgaaggaatctccagctttcaaaccgttgccttggcagaaactggtccagcctcgtttgataatagtaaagcagtttgatttgtagtgtttcaagactaatttccattctcttccccatttattctttaaaattatcttcttgcatcctttgtccagaccattagagctcacaaaactcttccataaatactgcaagacattgcatatcaatacaccaatcaagaaagaacactataagttccaatgatccttctgtaagaaaggagtttagtttaagatagtggaataaaccaaagttttgtattcaccagtttatctttctttatgcttgaagcagtgacagatcctacaaaataggaacggtgcgatgaagattctgactttggtctatgttcactgaggctcaaatacatgacaggtggtccatgtttttggaccagtttgaatgtaaattgttgaccttggctcatcccatttgcatcacagaatcttgaccaaccaggtctgacataagtatgcttgcctgcttggttgtacttcaaattaaacttccatgatagtccttcttcattaagaagaacgatctccttaccgttcattttatctagaccgtttgaactcacgaaacttagtggtaaatactgcaaaataccatcacagactaataatttaaaccaatactaagagaattttttcttaaaatgtggaatctgatcttaccagtcgatcatagtttaggcttgaagctgtgacattagccacaaaactagaatggtctgatgaagactctgctttctttactggatttttcttcactctcttctcttttgaactgtttcctgtcaataagaacaattataaaatctcagttttgcaattttctacagtatttgagtacatttcatagattaaaggtttaccaatattggtctgatcatcatctatgttctctgcagaagctctgcatgttgaccaatacttccttttcttcacctccaagcaatcttgtgaggtattcttgtcttcagtaccctcctcttcactttcttcggatttgttaccctctgaacacgctaatggagttttgtgatagttggtttctgtagggcacaaagaaagaacaggtttgttccatgttccaaccagtttaaacttgaaggaatctccagctttgatcctatttacttgacagaaactagtccagccttttttgagaaaagtaaggtcttttttgaagtgtttcaaaactaaagtccttttttctccccgttcattctttaaaactatctcactgcatcttttgtccagaaaatttgagctcacaaaattccttggaagatactgcaagaacgccagattatgcacacatcaagacaagacacagtttgcatgtcattaaacacatcaagaaaaaaaatacttctaagttccaatgatcctttctttagcaatgagtgtagtgaaactatagtgtcagtttattaagataatggctcaaaaaacaaagtttgtattcaccagttgatctttgtataggcttgaaggattgacagatcccacaaaactagaatggtctgatgaagactctactttctctcttggattcttactcactctcttctttcttgaactgtttcctgtgaatagaaacaatcaaaattctcagttttgcatcttttctacagaatttgagtacatttcatagagcaaaagcttaccaatgttggtctgatcatcatccatgttttctacagaagctctgcatctcgaccaatacttctttttctttacctccaagcaatcctcttcactttcttcggatttgttaccttctgaacactctaatggagttttgtgattgttggattgtgtcggacacaaagaaagaacaggttttttccaggttccaaccagtttaaacttgaatgaatctcctgctttgatcctgtttacttgacagaaactagtccagccttttgggagataagtgactgatttgaaacgtttcaaaactaaaggccattttactccctgttcattctttaaaactatctcactgcatcttttgtccagacgatttgagttcacaaagctccttggaagatactgcaaaaacgccacattaaacatatttcaagacacactttgcatatcaataaacaaatcaagaaaaaaaacttagtggcataaaaaccaaagtttgtactaaccagtagatcatttcttaggcttgaaggagtgacagatccctcaaaacaagaatggtctgatgaatattctgcaactgatctttgttttggtttagcttttgcgcggcacaaacggatgacaggtggtgctgattttcggacaagtttgaatgtatattgaccttgcctaatcccattttcagagcagaatcttctccaaccggattggacaaaagtttgcatgcctgatttgtcatgtctcaaaactaacttccatgatcttccttcttcgttctgaagatagattttcttactgttgattttgttcagaccgtttaacctggcgaaacttagtggtatatactgcaaaatcccatcacaaagttaggttaatgtctcgaagactaaagaaagagatttttgcttaaattgtagaaatctaatctaaccagtctatcattgcttaggcaccaagctgagacttttgccacaaaacgagaatggtctaaagaagactctactttctttcgtggattcttcttcactcttgaactgtttcttgaagctaacataaaaacatcaacaacctcagttttgtcttttttctacaagatttaatatagagcaaaagcttaccaatgttgatctgatcatta

SEQ ID NO: 30854 - DNA, 3090 bp, Arabidopsis thaliana landsberg
tgatgaagaagaagtcgtggaagtagaaggaacgggaggaggaggaagaagtggattggctcgcttcagggcttgaaccgcttgaatcgcttcgatactgagcattcgtcctctctgcaatggtttcctgttcttgctacggtctctcatttttatcaccatagctcgctggagaatctgaatccggccaccggtaccaccgcgtagcttgaatccgagacggagaatatcatctccgcaacttcgcagtccaatcccttccatagtcgccgttaagctctgttcctctgagtggtgtgggaatggcagaggagcagaaaatgaagcgaaattacaataatacccttttcgcttatcttggtttcatatcttgtaatgaacccttaaccggttctcagataaaaccggtaagtgtttcaatttgtcgtataaccgtagaaccgtataattagtgaatgtaaaattacatgtagcattcaagaactgaatccgattacatttggaagagataagtctgattattgttttacatctgagatattatgaacattgtctccctcaccttgtagagctcgaaacaaattatcaacactcctgtcagtttcgcttttcgtttgaaaatctgaagacaatgttgtatgattctcagagactttagacgcttgcaatggtgaaatgcatggagttaaagatgttgcatcacccaagcctttggaaaggcaaacatatttgaaaactagctgtttataattattaagcaagtcttcaacatctcctatctttaaatcaccaacactggcaaacatgtaaggatattcttgaaatattttggttgcctcacttctatcattcaaaagcgtagcagcgcccttattttccaaatcggtaatggggtcagctttctttattggtgtttcactcagtgtttcattggtaccagagaaactatcagttgattttgtatgcagaagcatgttttccctcttagtattatgagcagtgggtaatgcagcaccgtgatccgtttgataagactggcttcccggaccagaaagacgtgcatgtgcagatttcattttagtttcaaagtcagcttcatccatggagagggattttgcatcaatatttgagatgaatgactctgcagagagtatgttggtgaataagtagccagcttcgccaaccagtttagattgacgcctatatctttgtatatacaacaagtttgagtgaaactggggagggttagcctggagaaacaaagcaaataatgtcattttcagaatccaaggataagagttaatatgaagtaaacatgagacatattcagaaatagcttttgcttaaattgtacaatccttgacaacataccttaatggtaacatatatgagaacaggaagaaattggtcagctccaggttcattctggtttgaagcaattgaagcatttagaagtaagttattaatgactttgcagcacctaaggatacacataagcttatcacgaggagcattgtacatatttatcttctggagctctttttgagctagctgccataaaataagaaaaaaaaacatcacaagtaagaaccattataagaaaacaagcaacactatggagagatagatgtgacttacaagccaagatgtttggttttgaaaagttggttgtatatccaagttttcaggagatatgaactgttgaaccaaggaaatcttctgaaagagtttctcatcggatataacatcctcggtgtttgatgcaaaaacccggggaaataactttgtcatgacatacttctccaggccctgtgtatacataaattaagtcaagaaagattattatagataaatcatgagagagataagcaggaaaaagggaagaagaataactcacatctcccgcattgtctaactcatcatcggaacaaccagaccaaagtggatgagccctgaaagcagactccatcttgtaaaagaagtcctgaactgcatcacaatctttttcagggtctggtgcagtgttcaagatcgaaacaatgaaactgcaaaacatcaaaaaacgttcacaactcaaaaaaccagtggcatgtgatgtttccatcacaacaaaaatctgcttaagtttatagcaaatcatcgatatcataacattgtcgcaaaaacgaaaaaaactattcataactactagagagcaatgtgaaatcagcaagatatcttatcttgcacacatgtaatcataactagagagtaaataaacctaaagtatacaaaaagcgaagaagagaagcgagagagagagagagagagagataaccttttgattgatttgatgaaatctttggcggagggtttactcaagaaattatgcagacccgagacgacgtctgtgttctccatcaatcccccaagataccgtacgatcgacgacaatcaaaattgaattctttgtcagcaaggtttttagtggaaagagatcaaatcggctttttaatacacgagatgatgaataatgatgcggtgggaaagctaaaatattgggccaacgaaataggattcgaaacgaagcccatttaagccctacatctacatcatctgttatggtcctaaatctggtacgatactttcttcttcttatttacttttttcattcttcgtttttacttggaacttttgttcctcccgattagtttttgtgtttttcagtattcatcattaaaattccttttagtattaatgatatgatttagacagaagaagtatatatacaataatccatagcaaaatagaaacaagaataaatgttgagaatactctgaagaaatacgagattctaaggatgaaacagagaatgttgatagggaagtttcgacacattaaaaagattttgactaataaaaatcataattcaaagacaagaaacaaaggtgcttgctcctccttctattcggtctgatttgcatctgttggatttgtaaatcctgcttctcttctcttcttcttttttacatttttggcctatgtctcatggaagcagaaaagccataaggatcattatcattaccacccaagaagtcaaaatggccttga

SEQ ID NO: 30855 - DNA, 1003 bp, Arabidopsis thaliana landsberg
gatgagcctttgagatgttaggcataccaaagaattcaagacacgacttttctcatatatggctatatgcatttttaaaatatataaaagtgttgacttaaatgacattttagtttttgctttccttttcttattttcatatgaaaattcttgagatctttttcaatttatgtttatccagtatataataatgagtttatcacgatgtgattggagtactagatcaggaaagtacacaaaacaagaaattatatttataatcaagttaggcgagtttcacatcacacaaataacataattacatctaattgtataaaaaatatcctatattgttgatgtatgtattcatgatggtgaaaaaaatattaagatcttagaaatataaataattataaatttatatataaaaatgtataaatcgatatttcaagtcaaaaaaagaatctaatcataaaaattgtaactacctaagattaatttgattaaatacacaataacaaataaaaaaagtaaacaaaaattagcaacaagaaaaattaacataattttttttaacaatttttgaaacaaactcaggcgtagtgtgaatattcatctagtaataataaaattatcccatctatttccaaattttcaactttttaaaatatgatttatttttccatggcggtatgaccgataaattctggttttttctttcttgtttacaatatggtttttaagttaatcaagtaaatatctcaaaagctggattattttacaatgaccaagaaaataatcaaagattgcacaattacaacaatcaaaagccctctacatatataatctttctactctctgtgaacggagaatgagatcggttagcgaacaacacaatcccatctcaagagacgatcatatatcctccataccggatttgggtggcaacatgcggaacaagcttgtatccttgtagtggacgaagaattggcccgactaaagatcttagctaccaacttcaact

SEQ ID NO: 30856 - DNA, 3305 bp, Arabidopsis thaliana landsberg
cgaatcgaaatcgacaaagtttattagtttatcgtgtttattaatttatagagttttttatgtagcaatatgttattgaattatttagtaaaatatcttcgaaatctctccttataaaaaaagaaatatctacggaaaaaaacaatttctcacgtttacatactttaaagttgaaatctataatatttcgatattttcatttcaagaaaaacagattcattgccttataaagaaaaagttggagaaaaatcaatgacaatccataaaaatatttgaatagtaattattgacaatgtggtaaaaatctataaaacactttaagatctctccacttttaaaatcaataactcttcacaaattcatttcctaataaccctcaagatattttccatttctatatatatatttcagagagtcttcgatgaatcgacattcatatctctctcccatgaataagacgatcatgaatagaggagcaaactcagattccatccctatcgatctcattcttgagatactctcgagattgcctgcaaagtcaatcactaggtttcattgcgtctcaaagctatggggttccatgctttgccgtccatatttcaacgagttgttcttgaccatatcgtcagctcgtccacgtctcttatttgccttttcaaaacccggtgagtgaaggtttttcttgtcgcctcagcctcagaatccatatgggaagtcatcttttgtagcaattgcggattttcataagaagttctctcaaaacctaaacatttgtaactatacttctggtttggtatatttctctgctatgtggatcacaaaggcagatgtcatatgtaaccctagcacgggacattatgctatgttacctaaattgttgttgacgtatggagacacgagaagcttttttttgtttgatccggttggcaagcaattcaaggtattgctcatgaataagataaccaataatgaaacaaaggacattcatattttgacattgggaactagaaaagtgagatggaggaagatccaacaatgccccttgatccatattgtttctcatgaatggatatgcatcaatggggctttgtattacatagcttataacattgatgatttcttggggtatatagtttgctttgatgtcaggtccgagaaattcaaatgtctaaatctaaaccaagactgtttttctgaacgatctactaaattgatatactataaaggtaaattaggtgtggttaatttgaagtatgctcatggcggtggatttccccttaagttatgtatgtgggttctagaggatgtggagaaacaggaatggacaacatctgtgtacactttgaggcctgagaataaagtcgaggacaatgactatgtatatgttgttggggcaactgcttcaggtgaaattgttttgacgaaacagaatgcatataaaccgttttatgttttctactttagtcctgaaaggaacactctcctaagcgttgaaatccaaggtgttggagaagaatggttttatcataatgtttactactttgtagaccatgtcgaggatcttaggtttgatgttatgaagacaacatatgctggaacatctagaagcccaccaaaacagagcacatcaacatcatctagagaagatcatgaagtgaggacccttgctcaccagaaagaagatcgtcttacgtttgagagtgttaaccaatttgatggctctgcgtcttttagaagatgattaaaatttacaggtgtcaaaacctgattgcttaccttactcctcaagtcagctgaaaaagctctgtatttgatgcaagttgtatttgtactctctatctgtaaacattaagttatgtcaaagaatttctttagaaattatgcttttatgaagatcttgtcaattttccttttcatctaaagtcactaagagtctaattgaggatttagaagtagtaaagacctttggtactgtcggaaaaaaaagcatacacatatcaagtaaataaaaatgaaatttttatcaagatatgtgagctgttggcccagtggtaaatttcccaggtgtaggtgttgggttcaagacacattaagacagatctcttctccaaagaaaataaatttaacctgatgtaaatctcccaccgagaaatgtaaacctttgcgcttgaatttctagatattaagattttttggtttgtgacgtgtaatttggggcttccaaaaataaaagtaaatatttcgattagaggttgcaagaaattatgtgttttaaaatagtttttttttcttccgccgactaactttgagttaactagtttgagctcagtggtcaactattaagctgaatacagtaaaacttctataaattaatactcaataaattaataacctctataaattaataaatttttggaacttcccgagttgggaccaatgtaaaaattgatacaaatcgataaattaatgagatattttttttgaaaatcctatgtaaatatatgggcccatcaatattataaattaataattatataaatttatgaatatatatatgtatatttatgaatatatattatgtataatatatagttagtaaaatatgactctagtatattttttatacaatttatattaattttttctagagttcagatataatatttttaccaagtagaaaaaagtttattttgttttgaacctaataatggttttctacttgtaattgattttcaacagattattcattatatagaaaaacttactttttagatcgaaattttataagaaatttcaaaatttagaaaatctctctataaattaatacctctctaaattaataaatttttccgatcccaacattattaatttatataggttttcttttacaacaattaccacactttagattcaatactaaaaaagagtttacaaattatgataagttttcagtacagcctttgaaaactcgatccatgagagtgattgagccatttgttgactattccatcactaaatctctggccacggagtctctggtctactgccattttccattattgtcaatttgtcatataacatttataagttaatctgaactttagttaacgaccaaaagtattagagaggggattaacgttataaacttctaatatcaaactaaacgtatagtaatatttctgattcaattgtatagtaaataaaaagaacattgttttaaatgattcaattcattaaaaagagacaaaccgtcgatagtgtgaatgaaaatgcaacttgcatttttgtattaatatatattctgt

SEQ ID NO: 30857 - DNA, 2271 bp, Arabidopsis thaliana landsberg
  unsure (1)..(2271): unsure at all n locations
cacaaatttaaaacatcgtatagaattactgaataacagtcaataaattatagattggtttataagtttataattatgaggtaattgatcaaatcaaaaaagtttgggagttctttttttcaagtatataccagttaattttaaatttaacataatttttcaccaatgatattagtaatagcttatatattttgtataagctcgccattcatcatatcttgtaggctttatatcatcctcatccatttaatttctctctgaattacctcatttacccagaaaggcataaaaaagggagaattacgatgatcactacaagacttaacaaaaatataacgtaaattcaacataataactaaaagataagcactctttcaattattatcatcataaaatgacgccaactcacatatgtacatatgtcaccttcttctaactttcaccataatttattgtttactagataacttttttttctttttttttttctgtgaggagcaaaagtatattaaagttttcttacaatcaatgaatgtaagaataatatttaataaaacagtattccatcttaaacattccactcaaaaccatgcataattaagaccaatattctttagatatagttaggaaaaatccggactaagatctaaggatacagaaaaagaaacgcaaaacactttgggagacagttatcttattaagttattattccgtctgacccaaacaaaactataagaaaaattaacatcatctgatagaatctcctaccatcgaatgaaataagaatggacctctatggtttaagcttctttacttgattagggagatgtggattagagtttttttttttgaaagcacttcatattagatttaactatgaaagtggaaaataatttacagaagcaatgtgagatgtgaccgtgagattcccaattgataccatgatggccaacggtttcataagtaccataaattgagaacataacacaaacactaaaaacgaatacacacacagtagatccatttcgtactttttagtctctagacaccaaatcaacttactttaacatgtaaatgcttcctctacattcagctaaatgtggtttagatgtcttgatagttcgacaagatgttttcatatgtatggcggaagttagaggcttgttcaggttctttcaatcacatcgtgatagactatatcactcattcattattatatactggatacacataaattgaataagatctcaagagttttcatatgaaaataagaaaaagaaagtaaaaactaaaatgtcatttaagtcaacatttttatatcgtctactattgcatatagccatataagagaaaagtcgtgtcttgaattctttggtatgtccaatgtctcaaaggttcagaacttgaaaattttgcatgtcaatattaccaacttaccataagacacaaaaataaaaatagagaaagtcatatattgagtcatatatgaacaacaaaacataataatgagaaagactcaaagtaaaattactaaactaataagtgtttatgtacggtagcaaacaactaaattacaacaataataaaatggtgaccattgataaaatctttttagtaaaataagaagaatataaagaaagtagtgctttttcttaacataattttttatttttttttgaaaaaaaatttgaataaatcacttaagagtagaattgatggaggatttaatgttataaagaacttttattttttctcatttaatttggctaatttttaatttaaataatgtaaaataacacatgtcattttttatttttttntgtgatgatgtgccagtcatatggagagaattgaccaactttcaaatatatgatttagctttttttttctttttaatgttaatcatatacactaaattttttaataaaacttttggttttcaaaataatttttttggtttaaatcataacttttaaaaactttggtttttgagagaactaaaatcacgaagctttttttttttctattgctacaacttctctaaacttttgtaatgaaagaggtaaacataataattgaatattctcctaatctttagaaaatcaaattgagaaactaaatttgcatctttgttcaacatcacagtagtcatgactcatgagtcatgatgactcatcatactagagtctagcaaatatattcaatatttatataaaattatactataattaactttgaccatacaagattttatcatttatattatgcaac

SEQ ID NO: 30858 - DNA, 4329 bp, Arabidopsis thaliana landsberg
atatccccctttcttgttcctcaatcatatcttcttttggtatattattttatattttcactttccttattgtatgtcccaggcgacattattcccaagtagagataatatattctctttttaaaacaaaaatttaattactgaaaccgtaaaacatgtaatggtttctttcttttcttcttattcttttagtgggtcactcctatagaccccatctgcaaaattaccaaaaagtgaggttgttgttgtcatgtctggttgtgaattgttgtcattttcctctaggaaacttctcaattctcatgtaaacaattgaacgacatttactgtgtgtatgcagatatttgatgggccaaaaatgggcaagtaataaggattaatctcgtatgcaaagttttgggtcactaaaaatcactttttggactgggccagtatgagtttgacttctaactaatggactcattaaccaaattcgatttctccaacttgtcagcgactccctgaaaatgttgacgtcagcttctcggccatgagacctgcgacggagcttgcggtgaggatcggccgagagctgctaaaagtttccggaagctctcgagctgctcggatatggagtccattgattgaacagagtcttcacggtctcggttttcgtcactcaataagcccttcgcttgtggctcgagtcatagacccgtttctgctgaatcatcattctcttgctctcggtttcttcaattgggctgctcagcaaccaggttactctcacgactccatatcttaccactctatcttcaagtctctttcgctttctcgtcagttctccgccatggacgctcttttcaacaggttaaatcgaacaaaatccttctcgattcttccgcgtatcgctccctcattgatacgcttgtgctgggtaggaaagctcagagtgcgttttgggttttagaagaagctttttcaacgggtcaggagattcatcccgatgtatgcaatcgtcttttagctggtttaacttctgatggatgttatgattatgcacagaaactgtttgttaaaatgcgtcataaaggtgtttcgttgaacactcttggattcggtgtctatataggatggttctgtagaagttctgaaacgaatcagctcttgagattggtggatgaggttaaaaaggctaatttgaatatcaatggctcaatcattgcactgttgattctccatagtctttgtaagtgttcacgagaaatggatgctttttatatattggaagagctaaggaacatagattgcaaaccggattttatggcttatagggtcatagctgaagcgtttgtagttactgggaatctgtatgagagacaggttgttttaaagaagaagagaaagctcggagtagcacctaggagcagcgattaccgagcttttattctggatttgatttcagctaagcgattaacggaggctaaggaagtggctgaggtgattgtgagtggaaatttccctatggataatgatatcttagacgcgttgattggatctgtctctgcaattgatccagattctgctgatgaattcttagtttacatggtcagcacagggaaattgcctgctattcagactctgagcatgttaagtaagactctttgcaggcatgacaagagtgatcatctgataaaggcttatgagcttttgtcaagcaaaggttatttctcagaacttcagagttacaatctgatgatatcgttcttgtgcaaggctgggagagtcaagaaaagttacactgctctgcaagaaatgaagaaggaagggcttgctccagacgtttcactctataacgctctcattgaagcttgttgcaaagcggaaatgatccgtccagcaaagaaactgtgggatgagatgtttgtggagggctgcaaaatgaatctgacgacatataatgtacttattaggaaattatcagaggaaggcgaggcagaggagtctttaaggctgtttgacaagatgcttgagagagggatagaaccagatgaaacaatctatatgtcactcattgaaggcctatgcaaggagacaaaaattgaagctgctatggaagtcttcagaaagtgcatggagagggatcataaaacagttacaagaagagtattaagcgagtttgtcttaaatctatgcagcaacggtgagagagaacaaatatgtcttctagtcttttctaattgcctcatgtcaagatatttattgattcgtttggtgtgtatgtgtgaaggccattctggtgaggcatcgcagctgctgcgcgagagagaacacttagaacacacaggagcacatgtcgtgttgctgaaatgtgtggcggatgcgaaagaggttgagattggaattagacatatgcaatggatcaaagaggtatcgccatctcttgttcacacaatatcttctgacctgttggcgtctttctgttcatcatctgatcctgattccattcttccatttattcgagcaattgagaacacatggttgcacctatagtcaatgagagtagattgttctcactgctgtaaaaatcaatcgaattgtgcatactgacctacttcaaagatggcagctagtcgaaaggtctgactggaacctacgctaacggatctgacttcgactctactgaattgctagcatatagggtgcattgcaatactggcaagtatttggaattttgttgaatgcttttccttggactgaattctgttttccagttttgtttttacgtcaatgcgattttcaaattacttttcatgatatatggtgtgaaaccatactgatactaaataaaagcttgtagctatctaacaactaatgttctgtaattgttgattgcttgttgttaatcaatttcctctttcctcttctccccaaaatgaaagatacaggaaggtgtttttctgttgacctgatatgcatatattagttttggcgttttctcttactggattcaaaatgttacaaattcgcttttgtaaatatctgatgcctgtttaaataatgtttcattgtagattgccgaaaaaatctttgtgggtattttgaagatttgtttaatatctattgtatggcgatcaatggcggtggtggttataaagtctctgctgaggattcactaaatctcgttgaagctttagggtatggattcaactgaatgatggattagatctcatttgtgtgttattgacatctctaaaatttgattgtgcagtatggttgttaccgaactgcctttagatcaggccaagggcgctcttgaaaaattatgcttttcagccgcctctcctctagaggtttgccatcttgactatttgcatggttgtttgatatactgtcaagacttataatgatgggaactgtgaatctgtgaatcaggaagcggcgaaagaagatttggagaagaagcatgcacgtgaattaactgttcatattgaccgatttgccttcctcttcaggtttgtgtattaatatctcaatgatgcgatacatctccatgtgttttgtttagtgttactaacaaatgctaccacattaggtatgtgaaccaccctgaagcggtggctgctgagattaataagcattgggcaattttccgagttatttttgatgcgtaagtgaatctaggcgcatgatgattaacatgttctcttcaaattgcttttatgtggcctcttactttgaaatggtttttactgcagtcgtccttgggacatgaggactatggaatctctatgcagggcatgcaaatatgctgtgagattcatttcctttttctttacctacttccttcctggacattcctgaacaccattgttttgtttgctagacattccatgtctatgaacataagagaaaatctaaaactatatgtcggatgacaattttgatagaggataattcactaaaagaaggcaatgattgtaggtacgtacttctggaagatacataattgatacaattggagaaatgctggaaaagattcaattccattatcagcagcatcatcagccatgctttctatacttatccagtgaagttataaaggtaatttgtgttctttccattcagtggaatgcttatagaaaagctttagagactctaatttttgtgggatttgcagatttttggttctgatccatcgtgtgctgtctacttgaagaacctgattgaaaccctctttgcacatacaacatgtcttatgacaagtatcaaggttgacgaatttcacatagtaaaatactatcttcaagttcttagttttaatatccgatgtggtgtctgattctgttt

SEQ ID NO: 30859 - DNA, 2462 bp, Arabidopsis thaliana landsberg
  unsure (1)..(2462): unsure at all n locations
tgttatcgcgtgtaatttcttgcatgatggagttactcacacatataatggatatgagaaccatgttcctagcatttgagttaaagttcaatatatactcttctaaagagttgggtttaggagaagcaaagacgacttttttaaggggatgtaatgagagtataacctcgtatgttttagttctcatagatatgtaactatctcaaaccaaacaagagtagaggagagtgtgcgaagtagagaaaggatgtcgacgtgcaaagagggaggaccccacaaaaacacaaagaaaatccacgtaagcaaaaataatagcaataagagatatcgacccatcacttcccaaatcacaagtctcaagtggtctctctctctctctctctcaataaataaatctcaaaaaaatctcatctttcagagagaagcaagacaccaaaaacttagtctgacatcaaaacccaaaatccaagaagaaagaaagagagagtcttcacgctcacactggctttggctttggctctggcgttgtaaacaatgctcctccctctcttcttcttctttctccatctccatctccatctctcttcttcttcttcaatctccttccctgattttcaaatcatcgacgttttacaacctcctctcaccgtcactgcaactcttcccgatttcaacaacacccatttctccgatgaatccagttctaagtacactctccgtcttctccaccgcgacagattcccttcagtcacttaccgtaaccaccaccaccgtctccatgctcgtatgcgcagagacacagacagagtctccgccattctccgccgcatttctgggaaagttataccttcttccgattctagatacgaggttaacgattttgggtccgatattgtttccggtatggatcaaggaagtggtgagtatttcgtcagaatcggcgtcggaagtcctccgagagatcagtacatggtcattgattccggtagcgatatggtttgggttcaatgtcagccttgtaagctctgttacaaacaatccgacccggtttttgacccggctaaatccgggtcttacactggagtctcttgtggctcttccgtctgtgaccggattgaaaactccggttgtcactccggtgggtgccgttacgaggtcatgtacggagacgggtcttacacgaagggaacgttagctctcgaaacgctgacgtttgctaagacggtggttagaaacgttgcgatgggatgtggtcaccggaatagaggaatgtttattggagctgccggtttattgggtatcggaggcggttcaatgtcgtttgtgggtcaattaagcggtcaaaccggtggtgcgttcggttattgtttagtgagtcgtggcactgactcgaccggttcattggtattcgggcgggaagcgttgcccgttggtgcctcgtgggtcccgttggtccggaacccgcggnnnnnnnnnnnnnnnnnnnnnnnnnnnnnnngccttggagtaggaggcgtccggattccgttaccggatggtgtttttgacctgactgaaaccggtgacggtggtgtggttatggataccggaacagccgtcacaagacttcccacggcggcttacgtcgcttttcgagatggattcaagtcgcagacagcgaatttgccgcgggcttccggtgtatcgatattcgacacgtgttatgatctgtcagggtttgtttcggtacgagtcccgaccgtgtcgttctatttcacggaaggtccggttttgacattaccggcgaggaattttctgatgccggtggatgattcgggaacgtattgttttgcgtttgcggcgtctccgacgggtttgtcaataatagggaacatacaacaagaagggattcaagtatctttcgacggagccaatggctttgttggttttggccccaacgtttgctagcggttaagatagagaaattacgatttttgtttgctagtaagtaaaaagcttttgtctcaaaactatatatgtatttgtctctttttttctttcttattagtttggtttgagtttttaataaatctgattagtatagagagataacaaaaatgtatatgttttgaccaaatttgtcttttgatttctgattggtttggaatctattattttgagttactgtttggtttgttgtattgtatgaatgaagtgaaacaccttttagagcaccaagtcaaaaagtactacacagacaaaaggttaaaaaattgctaacactttgtggtgaagcgtgaagacattggggagtgaacttttctattttaccaatgttcacattaacagtaactaagttttactaattacttaattagcatcacactgctccaatgtttttccaagtttagtcaaggcacagttaggcatacacataatctgatactccttacgttcttttttgtttgattgaatagaaaaag

SEQ ID NO: 30860 - DNA, 1629 bp, Arabidopsis thaliana landsberg
tggatttcactcacaagctttgtacttctttaatgttttctactttcaggtaagctcttatcatccattccttagctttacttacatttttagctaatactcatggaattgtgcctcctttagcttcctcaaacgatacttaaattcagtttgttgctgttttcacagggacactagcagtcctctttctttagtgattggcaggcaagtttcttgacttaatgctacagcttacagaaatattgttggtgttcatataatctgcagaactaaattttcatatctttcttttcgattcaagtgttcatttggatctgtttgttgcagcctctgtatcaaacatccaaatttgtttggaggaagcgaaaagcttgatgtatcatgggataaaggattgtatgattccaatgtacttgtggcttttaggagacctagacctgaatggcgtccacaacagtgtttcttcatacaggtactcaatgtttatttgttattgtactaatctgtgaagctatcttaaaaaagtgaattctaaagctatgttacatttaaatttgttaatctggcgcagcattctctctcacccgagataggggtccacggcaccccagttgacaacttttctcggtcaggaagtggaggtgtaaatctgtctaaattggctcttggtttagacttgagtgagccagcgagttcaaaatggagcagcacaaccagcataaagtttgaggtgcccgcacattaccttcttcagacattgtagaacaatttttttctctttgctgttttgctttggggtaaaagagtatcattttccattggtgcagcatgtgcgtccgattaacgatgatggacgcgcgataaccagagatctggacggatttcctataacatgcaggtgatattagatctcacttcccttaatttgtttctttaagtactagcataaactgatatttacatgtgtagaattctctgctatgcagtggaaatacccatgacagtatggtagttttaaagcaagaatcccggtttgcaaaggctaccgaccaaggtctttctcatgtaagagactcatttctgtttcatagcctaggcaaaccacagccatttttgcacttactttgtcaacgttttttttcttgctttttcagtttagcatgcaaatagaacaaggtattccggttgtgtccaagtggcttattttcaaccgtttcaaatttgttgcatcaaaaggtgtcaggtttggaccggcttttctcttagcaaggtactgacaggatcttacacacttggtctagaaaactacacgtagaagatgctttgtaaagatgtcctagttttgccgtggttcttacctcttctgtgacagcttgacaggtggttcaattgtaggagacatggcaccttatcaagcatttgccattggtgggctaggcagtgttcggggatatggtgagggtgctgttggatccggtcggtcatgccttgttgccaatacagaattggcgttacctttggtacgtggatctgctgcataatttggtcttcagaaccatcaaatggtttcccctgttaagctctcattgagctttggtttctttttgtgtacagaacaagatgacagat

SEQ ID NO: 30861 - DNA, 2758 bp, Arabidopsis thaliana landsberg
gtcagtacaaagttaggtatatcatattcgaggaaaaattccttgatttcagatgttaaatgtgaatgcaattgggggactctgctgcaaccagtctttatgaacgattggttcaccaatttattcatgtcggcttctgttttaagaaggtgataatattagtaccttgtacaaatctgtgtttcgtaattctgcttctcctaactcttgccttagttggagagtctgcatcctctctttgttcagtgatgcctccagctcttccttctcagatttaatagtcgcaataatgtgttcgctgtttccttcaacctggggattaatcacccaaaacataataagagtgcgagaaggtgatgatccggactggagtaactatattctgtgtcgacacaatcactaccacagcatatatgcataagatgcttcaattctctcaaacaaatcaaaaggtggtgctatgcaaaatatattaaggagggaaatttgacaagaagatacctttgatccagggttaacattgtccatgacaatttcccgtaccctgccttcttggctcacctcaacctcagactcaatgtctctggttgtggcattattaacagcagaaagactacctggcaaaggcgcttccagagtctttgtttgcaatgttgatttgtggcttggtttaagaagattaatctaatgccagataagaattagaagcagaactaaatgccaaattaagagaaatgaacttatgggttcagatcacagtccctacttcgttattgtaacgtccattgtatccaccaaaagcgactagtacatcttcaccattgtatgaactcaccactaaacttaatccctgtcagtagcaaaggaaaggacgatggaaatgaaataagcatgacttgacttttttcgaagtcttgaaaaggcttctaccgtgtttatttgtatagctatctgggaattaatatggataaagtctgtttatttaagtacctcgctagcaagaggtacacgtccttgaactgaagcaacgaccgaccatgcaagagttgacatgtttagtacaacactctccgatgcccctgcagtaatttgtcacaaaattagtcaccccacacacacaaaaaaaaaaacccaagcaaatatcttttgttctagggggtgataaacagaacggttgggaagagaaaatttccaaggaaaaagtgcattaacataccactcttgttatcaccgccaccaacaataaaccagttctccccaattgtcacgccagcatgtccagctcttggagttggtgcatcaccttgctgtgctggtcttgaccactccatctatatgtgacaattatatcagaggctgacaaagcatgtttgagagcagctgaaagaatagactcttagcttaacttacagtttgcaaatcaaggacatgcaggtcatcgaaacaggttgcatgtgagccgccaccaaagataagaaggaaccgttctgcatgcactgcagcagcatgatcagacctcggagatggagatacacccctgcaatttgacaccaatttaaatcctgaattgctaatctttcaataacgactaagatactaaaggaggtaggaggtcgatttctaacatattcatattctggttatatatctaatcttaaatgggtttgacttcttcgaaagagaacaaaatgcagaaacatcataaaatcttacacggcatctatctcatcccaggtcatcgtgtctaggtcaagtatatgcaaatcgttcagaagtgatctctttgcatcttgcccgccaaatatcaccaaggttttacccaccattgtaactgactggcctccacgtgaaacctaaaagcaagagataattataagaaagtctaaatttaagtaaccaaaatgcatatttgacttccaaattagcaaggagaaattctggatttagatgcaccttaaccctgaagatattatgggagggtaaggaagaaaacaacttttatttttttgtcttttgacggccaaaattttttttgtataaaactgtaatattttcatacaaaggtgacaggaaagcaaatgagacaacatgagagaagtgaagatataccggtggttttccatatgtctttaacattgaccatgtaatggtatggggatcaaagaccttcactgtgacaggaaacagtagaaagtgatatgtaatcattgagattccagaaaaatcttataaatatgtgcaaattatcgtcttcaaaggtatataaacgctaaccttgcatagattctgagggatcctttgtgtgaccaccgatagacagcagcttgttgtcccatgctatctacaaaacaagcaaagaaggtaagtgaataatgtatagctagagtcttctttattacaaactaatatagcaagtgactttcatgagaagaaaactttgctttagctgaaacccctctcctgaatatttctgggcaggaaagcaaaacgataataacaaaaacaaaacgaaaaagttaataaacttaccaaagaatgaccagcacaaggagctaacaatgtcggagttgatgtttcctgagattctgttgcaaccttggtttcaactcttgaccaagtccaactttttaaatctagaacctgtatacattccacagaagctttgcttaggaactgtagccgggactggtattgccaagctaggagctgaatatctcaattacattaggagcttatgcttctcaaccatagaggttgc

SEQ ID NO: 30862 - DNA, 1394 bp, Arabidopsis thaliana landsberg
tcttctcattcggtaaggacgcttcggagtttccatggcttccgcatgactattcttgctctctcccttcccactctcttatttagcttccgtctcttcgttttcttctcaattcaattttcgattgattccgtttcttcttcgttcgttaatacttagatctaattccggtgagtgaaattctacgaagcacagatctggctttttatacgatcagattcgtaaaatctctgttttgcgatctttctctgcgttagatctctgttttccctagttgtgattcgttttgatctttaaactctctcatactctgttttcaataaatacgacaaaaaaaactgcaaaagttttttacttttttaacgattggtggcttttaccatatgacaagaagtacattttaggattgtgtttggtttactgactgattttggttttgtttgtggttcaaatgtagtaaaaaaacaaaaaacaaacaaaaatggcttcccacattgttggatatccacgtatgggacctaagagagagctcaagtttgcattggagtctttctgggatggcaagagcagtgccgatgatttgcagaaggtgtctgctgatctcaggtctgatatctggaaacagatgtctgctgctgggattaagtatatcccaagcaacaccttttctcattatgaccaggtgcttgacaccaccgccatgcttggtgctgttccatctagatatggatttaccagtggtgagatcggtctcgatgtttacttctccatggctagaggaaatgcctctgttccagctatggagatgaccaagtggtttgacaccaactagtgagtttcttctctactctttaacttgtgtgttgacattgttattggatttgtgagttgtgttattaacgtatttttttaatgtttctgtttgatgcagccattacatcgtcccagagttgggccctgaagtgaaattttcttacgcatctcacaaggctgtcaatgagtacaaggaggccaaggctgtacgtactcaactaattttcctatttgaacatatataggcttcttttggtctggtattgaatgttctaatatagtaatgtggtgttgttaatgcagcttggtgttgagaccgtccctgtacttgttggccctgtctcttacttgcttctttccaagcttgctaagggtgttgacaagtcatttgatcttctctcccttctccccaaaatcctcccagtttacaagtaagagattacttttgctctagtactcaattattctctttgacgctaggaaatttgtttctgacatactattggaatggtgaatcttttctcagggaagtcattgcagagcttaaggcagctggtgcctcctggattcagcttgatgag

SEQ ID NO: 30863 - DNA, 3014 bp, Arabidopsis thaliana landsberg
tttccctgaagcttggcactctgatgctgcaactgttagtggtactgatgctcttgccaacatccgttccaaggtttatctttctcctaagctttggtacctcagggttaatgtaattgaagctcaagatttgataccaactgataagcaaagatatcccgaggtttatgtgaaggctatagtgggaaaccaggcgttgaggactagagtatcgcagagcaggactattaatcccatgtggaatgaggatttgatgtttgtcgcagcagagccatttgaggaacctttgatcctcagcgtggaagatagagttgctccaaacaaagatgaagtcttggggagatgtgcgatcccgttgcagtatttggacagaagatttgaccataaaccggtgaacagcaggtggtacaatctcgagaagcatattatggtcgatggagagaagaaggagaccaaattcgctagcaggattcacatgagaatatgtttggaaggagggtatcacgttctcgatgagtctacgcattacagcagtgatcttagaccaacagcgaacgaactatggaagcctaatatcggtgtactggagttggggatactgaatgctacaggtctgatgcctatgaaaaccaaagacggccggggaaccacagatgcatattgtgtggcgaagtacggacagaaatggattcgaactcggacaatcattgacagctttacaccaagatggaatgagcaatatacttgggaggtttttgatccgtgcaccgttgttactgttggagtttttgataactgccatctccatggaggtgagaagattggaggagcaaaagattcaagaatcgggaaggtaagaatcaggctttctactctcgagactgatcgagtttatacacattcataccctcttttggtgctccatcctaacggagtcaagaaaatgggagaaattcacttagctgtgagattcacttgctcttcattgctcaacatgatgtatatgtactcacagcctctcttaccgaagatgcattatatccatccactgacggttagccagcttgataacttgaggcatcaagcgactcagattgtatcgatgaggctgacccgagcagaaccacctctaaggaaagaagtagttgagtatatgcttgatgtgggttctcacatgtggagtatgcggagaagcaaagcaaactttttcaggattatgggagttttgagtgggttaatcgcagtaggaaaatggtttgaacaaatctgcaactggaagaatccaatcacaacagtcttgatccatctcttgttcatcatccttgtgctctatcccgaactaatcttgcccaccatcttcctctacctcttcctcatcggtatctggtactaccgttggagaccgaggcatcctcctcacatggacacacgtctctctcacgctgactcagcccaccccgacgagctagatgaagagttcgacacttttcctacttcccgaccatctgacatagtcaggatgaggtatgacaggttgaggagtattgctggtaggattcagacagtggtaggtgatctagcaactcaaggagaaaggcttcagtctctgctaagctggcgtgatccgcgtgcaacagcgctcttcgtcttgttctgcttgattgccgcagtcattctctatgtgacacctttccaggttgtggctctttgtattggaatctatgctctgagacatccgaggttcagatacaaactaccatccgttcctctcaatttcttcagaaggcttcctgcaagaactgattgcatgctctgacctgcaaaaactgcttccaataccgaagaaaacttctataagacttgtagtttgttcttgttaaaaatatcatgatgactctttttagtttgttcattgttaaaaatgtcatgatgactcttttcttggtgatggtgatgatgtatccgtctgtcttttaacattattaagacttttgtttgaaagtagtaaagaagtatcttgtgtggttttgatgttcttgtcactggttagtaagtcataatctatgcctctctggtttttgtgttttatcactggagctttaggagtttggtgccattgggttggttgctgttgagattagaggttgtcacagtttggtctaatggtcaaatacaagtttcaagaaaaaaccatttttctaatacatccaaagttggttataaccaaaaaaactatcatattgggaatatatgttcgctaaataacattcttacacaaaaattcattgaaagctttgatattttattttttttccgaccattctgtttgacaaatgtttgccaggtgagatacttttattctagaaagaccaaccattaagaagaagaggggaataattaaagcaagcttaagagttaagaacacaaagtaaatgggcccagatatggtaatgggccacgtgacaaatgggatgatacgttatggcagagaaagaatcttttggtagcttttttgggtatcatcgcgtaggtttcacgccacatttatccattgactttttcattacgtcttttcatttattttatgatatagtagataataattatacctggttaaaatttaataattgaccggtcaataaccattaaagtggaggaagtaggacgaaaggacatttattcgccgcgaaatctggaccgtacgatactccgattacccttctaaagctttaacataggggtacatctgtaacttcacattccatcttcccccaatctcctatttgtgtcttcttcgagtttatatatagagagatagagattggagagcgagcgagacaaatcagaagagagagatttagatattgtagagtgagattctaaagagagagagagagagagatatggctagtggaatcgctcgtggtcgtttagctgaagagaggaaatcgtggaggaagaatcatcctcatgtaagtgatttcgtgtcttctatttctccaaattcgtgattt

SEQ ID NO: 30864 - DNA, 6114 bp, Arabidopsis thaliana landsberg
aacgccggagaagaaggatactgaaatcgattatatatgttgctgccgtagtttggttttattagtaaaccggatcagattgtaccggttatgtctgttcggtccgattcttattttttaatccaagcgtaaaacgatgagtggttttgatccactggttctcttagtgaattcgtctgagaaaacaaaagaaatcgaacgaagagtgtgtgcacttgaggatcgaattaaggtgagaacaaagaagagagaagaatcgaaatagcaaatctcttgatggtaaattttacaaattttgttctttgtagatattgttctatttcgtaggtttatccaagtttatacataccccaggtttcagctggaattggtttattgattagtacttattggattgttcgcgatcctgaaaaggttcgaattttatgggggtttcgagagaatctgtgggaaaaatatgagctttatgttttgttggtgacactgttgaatatccatcgattcagcttctcaattcaatgtgcattggatttgatttagtttcagtgggtactgaaagataatttagttgggtcaatgtaaacttattccgttttcaaatctttaccaattttgcaggtcttgatgatcattaaaggtatatttcggagatatgaaaaatggaatcctgtgcatcctacttatggagcattttggggaatggggattgggattggttgtggcgtcggatggggacctggttttggccctgaggtcattggttatgtcggtgctggctgcggtgttggttttagtgttggtataacacttgctggtctcggcattggtcttcccacaaattttcttcttgcagctccttataacagtatgtacctcagactctctctctttctctcacacattttttcataaatatgtattctccataccaagtaaactcttagttttgaactttcttgattcgggtctttggcaacttgaatgcacaggtcatgtagtaatcttttgtctgctgattttattttcagctgtggaagcaactagaaagggtgcttttaatttctttggtaaaaacctctcaaccaatggttggagtgatttgatgcctcaaatcgcggggttgcagagacaagtcagtgagatatgctctggttttaacaagaagcctcatttaaataatgccattgacctaaaaagttttcctttgttcatttcacatgattgtggcaaatttggaagtcatcttctccatgtgcgcaaaggtacaaattcaattagtcttaacattttgctatatcactgtgcaaagttcttctctatccgttttctttgtcaatgataaggtacgttagtcttagtatttcaaatagaaactaggctgagcatttacctgcctttatcagacatataactagctggcactccaacactcatttcagtctcatggtaatgtttctctagatagaaaaggtttctgttattcaatggcaacccctatattctttagaacaaagtggatagagaacagttagatttatcatttttctttgcaggttcggaggacaataaatcatcagctatgtaatgctacccaccacgaggatcttaagcatctgagacgcatttcgagatagttactttgatggaatttgtgaatgtgactgaaatattcagcacaaatcagaacatggttcctgtcttgtttggagaagcactatgaaccaaacctgaagcccttgtgatttagagttacagagatacattaaaagggttcgggatttcacagtagcattcatagacagttcaggttagttaaacgtgcttcacaaaaagaaaaaaaacagaagtgtagttgaggtcacaccacaggtttatgctttgctcttaatcaaatatttatctttctcttttttgttatttgtcctttttaattccatttgctttattccttacttgtggggattaaatgtttgcagagaaagataattcgactgaataaatacacttttacctgtatacttgttatatatttgtgtcaccccaaagtgaaagctgcagactttgaaacacagaaattcttcccattgtagtgtttttttctcagaaacacaagaagagcttatggatattgctaagaagttcatatctgaaattgatgacaagctcgagtctaaatcagaatttgataaagagctcgagaaaatcaagtcttccttcaatgaagaatatgagaaatggtcgtctggaaaacagaggggatcttcctctaagcatggaaaccagtccacacatggtgattcatcaccaactcgtaacagcagcggcagcagtaaaaaagggcggcctaaggcgaaccgtgtggagacaagctctgagcttccggatcacctcattcgtggtttcattaacgagaaactgttcttgaagaacttcttgctgaagcaaaaggaatccgaagagttcaagactctagcaattgtggggaaatacggagttgggaaaacgacattgtgtcaggctgtgttcaacgacgaagatgttaagcaagtttatttcccgaggatatgggtttctatgtacagcaaagaaacaaaagaagacgaagatcccaaaatagatgttgtgaagaggatcttgagatcccttggagttgaagatgagatgtttacacatcaaaacagaagcagaagaagagaagagtatcaaagatgaagctggggaaagagaggaagagacggtcaaagaaaaggagcttgctcgattattgtatgctcttcacttgaatctgattgggaagaagtatctgatagtgttggatgatgtttgggaagacaacgagtgggatcaaaggctcgatgatgagaagaagcaacaggaaaaatcacatctttcttgtgggtttcctaaagggtttggtgggaaagtgattatgactagcagagacgagagattggcgaaggcgatagtcggagaagaagagaatctgcagcgtttgtttccaagatccgatgcagagagcttgtgggagatttacattgatgcagtacccaccaaggtggacgatgcagcagccacgaatttgggcgatgcagtagccacaaatgcgggcgatgcagtagccccgaaagtgaatccgaggtatccgggaagatacaaacaagagcttatggataagtcttgtggtattcctttggctgctcgaatgctggcgaagattgagcctgtgaaagtggatgaaattggaaacatagataggaagcagagcttctaacttctaacgcaatatctatgtatttactatttactctctgatataaggaagctattcaagattactatataaagttattttattgttctagaaactgttaagagttgtcacttgtgtgagtgtaaacctatggcagttaataaagattaaaaagagattttaatacatatttttatcatcttagagtttcacgattttcttgagattgatcctcgtagcttgttgatgatgatttgtggattaaaaaccacgacatagcgtattgcggaagtgctgcttgaactaccgatttgacagaggacctcttggataattttcatttctaagcttttagacactttacttatacatatctaaaactactagttattttggaaatttggaaaaatgataatggtatttttttactatcacgtgtgaaaattcctcttaaagaatactgatctttcaaagtacttcaattttgaaagaagtaatgaaacagtattagaatattaatttcctttcagcttaagagaagtggcagattctccctagaaatatgttaagttaaacatctgtaccctcacttttgtaaaacgtgtatcacatatcaccaaacataagtagaacaaaggatcatcaaaagacaaaaaaactagagcaatacatgtgattagcatgtaactttttcctttgtatgtaataaggaaagaaaagtttttgcttgtgtagtaaacaattccaaaagtcatatattcgaaaaatataggggcataattgttactctgaattctgaaataataagggtgaataattattggaagaatctaatatttatacttggcgtttttgtttcgacagagtgtaatctaaaacttgaattttgttattgttgttttacaaaatcaggataggcttgacatggaagttatcggagctggacttgtataaataagtgaatcaatcaacgaaggataacaaaacaaaacataaacaaaaactagaaagaaaaaactatcagtggagaaaactaatctgattaagtcactctaaacaattaaggttcttctcatacctctctctttgtttcgaattttaaattttagttttgtattgttagttgatatttgtcatatattgcatggatatataggggtagtgtggtatactctctgaatacatctcttaagttcataaaaataaagttactatcctagtagcaatctcaataattttgtttaacaatgatctcttcaagaaaactcaaatcaaaggtttaaatatttcctctctcattttttattttcctagagatggagaagcaagatcaaataagcagagaagagattctgaagaagataatggattcattgggacaagacggtgtaccttcaaaaaccgtcctcgttggtgaagctggtatagggaagacatggcttgcaaaagaagtcagccaacgtgttactcaagaaaagtacaatgtcctctggttacacctgaacaaaaagattgaagacgagaagtcgctttacgagattctagctgctcagttgtcgataatttacgagtttgaagaaggcgaagaacctgatgagcttgattatccattggagagcttgaaagagaagattaaagaagagatgatcaaatacaagaaggataatcttctgttgattttggatgatgaaggaagtatgacaactgaagaagatgtgatgcaagaattaaacctccaagattttcttaaggagtactcggctgtgaagattctagtcacaagaagagatgaaagagaggagaaagaatccacaacgatcaaagtcggtccgcttacagaaaaggagtcattggacttactccgcgatgccgaggacttacttacatcatttacctctgaagattggcctgttctgctaaagagactttgcgataacaaagagatcaaagaacctactttgatgtcttgcattttaagcaagagcaagggcttaccagctgcgatcgttgtcttaatcaagtctttaaacagcattaagtcgatgtctgcgaagcagaggaagatctttaaagaactgattctatcttccaagtcattagatgaagcagctgcttccaagaacgctatagatcgcagccgctacaatcctgtcttgcgattaagctacgagctgttaaagcctgacgagacggtcaaacgtccggtgattgcttgcttttggcatatcttggacttctacaagtactctggatgcgcttactaccgtgacctaatagtgcattggatgcttgaagggtattttgatccggttaagtcggttgacaaagcttaccaagaaggacattccattttaatggactttatgaacagaggaatcttgaaaatacaagaagacaacatggtggttccagagttctccatgagcaacctattagatcttcaagattgtggattctttggaagatcttctcttggatttgacagagtttacggtggagacaagagaaaggggctagggaaaatcatcttgatcgatgatatgatacagacaattcaatcgaagaagaagaatatcacgacgattatcgctagcggaaaccgtttacgtagagaggttcatgggaagttctttgagaaaccagagatgcaagatcttgaagttgtagtcctctttgagccaacgttccatgaacttgttctgtctttatctaagctaaagaaactccgagtacttgttatcagagactgtgatctaatcgataacatcgataagctcagtggtcttcaaggcctacatgttcttgaagtctctggtgctagctctctagttaacatccctgatgatttctttaagaacatgact

SEQ ID NO: 30865 - DNA, 1186 bp, Arabidopsis thaliana landsberg
actaccatttttgttgttagatgtatgtgtatggtttatgatattaacaattttattgtgatggatcaggtatcgagaatgctgttgggtggcatgaaggttgttggtatctatgtatgggctagtgacattgcttttaagaattctactatgatcctttgccaggtaactttgttggagatttgttttcttgcagtaaatttcagttgagatcattctagtaggtgcccgtatgattgtcttggaaataggagatttcttatgattgtgtctttgcgctgagaatttgagatttaggcttaatgagttaatcttatggatgctactaaaactctcatgttgatgggttttaagttatgggaacatttatcaggctatgaaggcagtttcggatgcaatacgacatttgggatcctagcttgaataaagctcttcttattcacatatgttacagtccgaggaggtattctacattttaaggatttagtttgtagaaatttagtgaattatcaggtacttaaagtaaagatgatgaaatgtttgtagatggaattgccgaacttgtttgctgagttcaagtattacatcaagtaatcttcgaccttgtgactttaagctgggaaaggtgttaagttctctacagaggtttaggtgcagctacaactttagtttcaggtatgtcattgcatttagatttagcttatgttcatgttttagaagcattcaggcgcattcatctgagtcttctgaatgcagtatctatgaactcttttttctttctttttttgtatttattcctgacctcattctattgattgttttcttcacttttacacaagtagattaccaatttacggtgagggtgggtcaagtgcacaaacgtttactgataccatccgtaaagaacttgcaattcatgcaaaggagctaaatagtgcaaatgcaatgattgatggagacttggtgaggagacagtaatccctatgcttttttatatgtttctgtgttaacaaaattactagatgttgaatttttgaatcgttttggagcatgaaaatcttgaggttttgagtgatttaatttgttactatcgtttagttaaattatccttgtgaatggcgtctgtctgaaacacatcaaccattgctattagtctgtttgaatatagtttctttgtaggcattgc

SEQ ID NO: 30866 - DNA, 3663 bp, Arabidopsis thaliana landsberg
tcactacccaacaagtataaacgacggatcaaagcaaaacaagcagacaagaatttaccttctgtgaagcaaaaaagagcttgtgtggtcacgacaagaagagcctcagataaaagtccagtgagagggttgacccaaagtcaaccttgtctagctaaccaatccattggctgaagtggtttcttcacaataatatctcttatattattaatctcttatattattaatgatccatcgccacctgtaggttcttcattctaatcaaatctcaatatatgattgattaaaaaaaaaaaagagatcatcaaagaagtcagcatttaataactagtttcttcaatctactgaacattaaggtacattgagtaggccatagaagttaacaaaatattacatcaaaatttctttacaactaaaatttcagtggtcacaacttcaccacggtaatactcttccctccggtcgtatctctgacccatcttcgtctttgaaatcaaaatcaagctccatgcctcttctatctccatctatacattcaccatgaagaacctcattgcttttgtttctcactgtttttttgcaggactggcttgggcttacttcgaaatcatcatcctcggctacatttggactaatgttctcgtctcttcttctcttccctgaatcgggactatcgttgctgatgatggagtctttcttattggttccatagtactcgttcaccgttgtttcttttgtttccaacaactgatcaccgtacttgcttactttggccctgaaagagagtttaaagatacacaccatcatcatacacttttggacttttcttcattttgagtagaggttttaagataaagaactacttacttcccaaggccattgatttcaaggagttcctctttggttctgggtatccgtctgcttatctgctgaagcgttgaattgctgccaccacaaacacagagactgtgaggaaagaatcgaattgaccatgatcaagtacaaagcttggaaaatgaaaagcggaatggtttttcagacatacatgaatatatgatatgccatgacaccatcaggggcttctttgacaagagctgtacgaagcttcctcaaggctgtgtacatgttggcagagagattctagagaaaaagatcaaggaaccaacctcagcaattcagagtggtagattcatgtcgacaagaaaaaaagagactgaactaaacagaactataccacatcttttggaggagcatcttctgttgtaagtggaagagtactttgcttctctgatgttagcggaccttttgctgcggttgccccctgtttacttggctttaatacttttacagaagaagggaacctgcaacagattatggaagtcttaactaaagtaattttaacaagccgttaacacataaaatacaggtaattgcaatgatttgcttaaacctagttcctataaaccataaagaaagatataagcgcaaagtcatacttcatcactatagtctggcttccagaaaatagtatggtagcctttgcgttattcacctagatacaaataggtaaatagagacaattagggttccagttagcttactatcatcctcaatcattaatgagagggagaagcgaaatggaaataattcacaattaagtaccttgagcaacgatgacacagatccatacatatcacttttcctaacatcttccacaagaatatcctctgttacgagataatgcaagatacgagagacttcaattttcgataaatgtattccagctccatggaactgcatagtctcatgtctgtgttttttgacctaaatgcaaagaaaacagttattttttcaagagatcgacccacactggttggattacgctttcattattaattagtctttaccaagtatagaaaagagactatggtttatgaggccaaacaggttttaataattagcataatctggaagaaaaacaaaatatatgtgtagaaatatctcataaagcttgaaggaagtatggataattattatttgtgcataccatgtggtttaaggaacctttgtagacttcaagaatatgagctgaagaaaacctttctcctgtttgcttcaccagttcaacctgtgcaacgcacagaagatagtgagatgtgaccaaaaataacacatacatagtgagcattctaatgatttctgtaccagttgccttgtgatcaaggtgacatctttgtcaatcaaactctgactactgcaacaattatcacacgtttttttgcagtttgtggaatcgaatttttcccccaaatgcactagttgtaggaaacgtcggcattccacctcattttcgcagtatctaacctgcagcaataaaataggagaaatatctcagcaagtataccattgaaagcaaaaaagtaggattcttcacattaagtaccatgcggagaaggttttcggtatttgtttcaagtaacctccctgaacttgctacacgattatacccagttgccatggggctttggtcaactcctccttggctaatcatatgcttaactcgtatctgaaattatattttatatgcataaacatgatcaagagcggaaagatgaaagaacttcatcgttccaggctaccaaagcggataagaaaaatacaatatgttggtttatatgcacttacatagtcgccataaccgtaatataaaacacaagatgaccgctggccatccctgccagcacgaccgcattccttgattacaaataatatagcttatgtgagtttctagacgagataacagtatctagccttatgtggaatcagtttaataagatttacatgattgattgtataattaaaaatacctgatgatagccttctatagactttgggagcgagtgatgaataacaaagcggacatcaggcttgttgattcctgaaatgtgcaatgttaatgggcagcaacattttcaatgaattagaacaacattagcaaaaaccagtacccattccaaatgccacagtagcacatattatattgatttcgtccttgctccattgtgtctgtataaaggcacgttgctcaggctccatactgccatggtagaatgctgctttatgaccaaactcctgaaaatagtatccaattctatggttcaacataatatttgtggtatgcacagaacttgataacggttcaatatacaaatgaccaacctgcaaccgttcagagactttttcgcagtccattcttgaaagacaatatataattccacactcatcaaaatggttttccttaataaatttgtcgatgtcttccagacacttttttgtcttgggaacaacagaatacctgcaaacttcttggtaagcagcattctggaatacatatatgggtttaggtagttgtagattaccatagatttggacgattaaaactttgccggaacacgacacagttaacaaggccaagggcttgtaccacatcttctttcacactggctgttgctgtagctgttaaagctaacacgggaatgttgggaaatttctgcttcagaataccaagactctgtgtattccacaaaaatttggtacgtaaaaaaggacaattatgtttctcgaaagtaagagggtaatgttgtatgaagcttttgatggcct

SEQ ID NO: 30867 - DNA, 2020 bp, Arabidopsis thaliana landsberg
tcgggaatttcttcatatcctagcatctagattatgattgtacacatacaaaaacagaaaagaactagacttcaaaataatgcaaattagaaacaaaaaattgctccaaaaaaaatatattcaaaactataaataaaatattattatgatttttcttctattttacgtacattgtatatctctagagaagaaaataatttttaaaaaatagtttgggatcaacgtcgcacttattgttttgtcttacaatctcagagtctcaccgtatccaccacgctggtcaacaacttcaacaaaactctcttcctcgaacttcaatcttatcccttcatttcattaccattaattcacaccaacggctaacattgtcctcctcgctaaactgttaattatacgtttggccgtaatgttttgaagtctgcctatatttcttttcaataaatgctcttttaattaggttttaatttggtgaaatccaacctttaaattttctgatgctgttaaatctaagagtttgaattttctaaaatcattgttgtcggttatcatttgtacatcttgatagaactataatatgatcaatataaacttataataataaaaatacaaatgattttgtttgtttgtttataaaaccactgaaaaatgcaagagttaatccactgagttcaaccaaaaaataaagaagtgaattctatgagtcataagcttggaccaaaaaatccatctagaagaaaaaaaaaattgaaaaaaaattacaagtttctaagaagatggtgcaatggttagaaaaatctctcaagttattaaatgcatcataaactaatactgtatattactatacacaaaaatcaaagactctcttttttttaattgaatcaaacaaaatccgaaatttaaaggtccgacttttcctcacctgaacccgcgttttctctccccctcccaacccaactctccaattcgccggaaaatcaccgccaccgtcacttccggcgtccatatgaactaaagagataagcttttttcttctataatccttcttcttcttcttccttgatctcctttctctgagtttgctaagtttcttaactcagccatgggtaactgtaacgcctgtgtaaggccagactcaaaagaatcaaaaccatctccaaagccgaaaaaaaccaatcgagatcggaaattaaacccattcgccggagatttcaccagatccccagctccaatacgtgttctcaaagatgtaatccctatgagcaatcaaactcagatcagcgacaaatacatcttaggtcgagaattaggtcgaggcgaattcggaatcacttacctctgtactgatcgtgaaacccacgaagctttagcttgcaaatcgatttcaaagcgaaagcttcgaacagctgtcgatatcgaagacgttcgtcgtgaggtagcgattatgtctactttacctgagcatccaaacgtagttaagcttaaggctagttatgaggataacgagaacgtgcatctggttatggagctttgtgaagaaggtgagctttttgatcggattgttgctagaggacattacacggagcgtgctgctgcagctgttgcgagaacgattgctgaggttgtgatgatgtgtcactctaatggagttatgcatcgagatttgaaacctgagaatttcttgtttgctaataaaaaggagaattctccactaaaggctattgattttggcttgtctgtgttcttcaaacctggtaaagattcaatttttagtgtttcttaactcagtggatggttctatttttagactatcctgccatatcttcatgtttatggaagtttgtgtagatatctgagattgggtaaataacgtttctttattgtaggagataagtttacagagattgtaggaagtccgtattatatggctccagaagtgttgaagagagattatggaccaggggttgaaatgtggagagccggagttattatctatatcttgctctgtggtgttcctcggttt

SEQ ID NO: 30868 - DNA, 545 bp, Arabidopsis thaliana landsberg
ataatgctttgtgagttgtaaaacattattaccttagcaatagttacctgcggaagaatctggatgttgtgcaaataatcaaatttcctatattaccacttcgttttcactttgttaatggttatgtgtttgtgactcagttgcttgttaagtatgaaccgtcaataattaaaaagtcattttagtagaaaaacaaaaaaaatgtataattgtataacaagttaacaacccacatatgttacagagttgatttatagaaaagtgttatgatgctttaatttgtgagttgtaagatattattaactttgcaaagagagacttacgtaagaatttggatgttgtgtttgtgcacacgctacaaacaaggggtttccgatccttaagctttgtaaactctctatttaaggaaggaggatcatatccctcaatttcatcttcaacacaagtctttttttctatccaaatgtttgatcaaactagatatatgctctacttcgcaagttccactctttattcttaactctgttaatccacgattcaaactc

SEQ ID NO: 30869 - DNA, 3008 bp, Arabidopsis thaliana landsberg
attaagaaatagtactaatactttattggaaaataagatatgatgtataataaaagatgagtagctgggagcgtgcaacagaaaaatagttcacccaactttctcctattaatacttctctcttctctcttcctacttctaaccttctttttctccttcatcacacacatatacacacgctttcgtttaaactctctctgtttcaatcattaatcagaaagaagcaacacaaatatggatcacgacaagtctacttcttgttgctgcgttcttgatgcttccacttatgttggtttctggattctcaagaaattgcttagcagaggatactctgttcacgcagcgattcgtagaaacggtatctttctccgtttgttcacgaatgatttcgggtttgttctttttttccgatgatttcgaggtctttggttgggtcttgattcgtttatatgtgtttggtaattaggggagagtgaaattgaggagatgatcagagagatggaaacaacagaagagttatttttggtgtacgatgtagatgtgttggattatcaaagcatacttgtctctctcaagacatgtaacgttgtcttctgttgcttagacagccctgaagggtacgatgtgagtgactaattcatcttgaagtgttttgtgttgattcgttctgagtttggattgaaatttgaaactgagattgatgatttgtgtgaatttatcatcaatcataggagaaggaggtggatttggaagtgagaggagtgatcaatgtggtggaagcgtgtggaagaacagagagtatagagaagattgtgttttcttcttcattaacagcttcaatttggagagacaacattggaactcaaaaggatgttgatgagaagtgttggagtgaccaagacttctgtcgcagcaagaaggtttctaatttttctttatttatttattttggttattaaatattaatcctcattagtttaagtgaaatttaaaattttggggaataaattggacccacaatttaaatattataagctggattggaataactaattatttcctgacatcttatttaatgtagctagctcatattattatttattatacatataaaaaaggaagccagttctataaattttgaattttgaaacactatataaggaattattttgtggtgtttttttaatagtcaaatgttggtcttcatcaaatgtatcatcacattatctcgaatcattttattggacgacatagaaaattcgtaaggggtcaggttaattgaatatattcatttccatgactcttaaatacattgtacaactcttgattcggttatagttgccttttggaaatttaaagggcatatattttaaatttttttccttcatgttttgataattagatacagatgatttagtagtagtgtcttttatgactatcacttagattagacggtgacatgttttttttttgatataattatgattgtcatcactggacttagctaactttatgcaacaaattattcggagacaatattaacgtgtatagctgtctgtcatcaaacggaacagtcaacaaaacgaaatcgaagactattcctttacttttttgttgctgcaatttttaggaatttcattaccctctctttttgtttgttactactatttactgtagtagtattagtacaagctcaaactcacgtgctaacaaactgtatgtggatgcagttgtggcatgcactggcaaagatgttgtcggagaaagcagcttgggcattagccatggaccgtaggctcaacatggtctctatcaaccctggtcttgtcgtcggaccatctgtcgcacaacacaacgctaggcccaccatgtcataccttaaaggtacacacacatagagaaatttcataaacctcacaaaagagtttatgagcatttaatcaaagttccggaattagttgcgaaggttttgtgaatgttttaagaaggcttttttaatagcataactggaatttgtttttaaacaatcatagtgttgaagaacgagacatactaattcatattcatcaattgtgatttgaatttgatgaaatagtgtttttggtaacaggagctgcacaaatgtatgagaatggtgtgttagcttatgtagacgttaagtttctagcggacgttcatattagagcattcgaggatgtttcagcttgcggtcgatacttctgcttcaaccaaatcgtcaacacagaagaagaagctctcaagctagtggagagtttgtctcctttgattcctatgccaccgaggtacagtttcttgtttaattctatcttgtgatttattgtttaatgcaacttatagtctaatactatatatgtcaattaggtatgagaatgagatgcacggaagtgaagtttacgaagaaagattaaggaacaacaaattaagcaagctggtagaagctggctctgcttgttaaagaaagatttcacaatttaaattgaaagagacgagattatacaaaaaaaagttgtaatttgtatattgatcttctcatagatgcatgtgttgcttgtgaactattaaaaagaaagaaaaaaaacacatttcatctcattttataactaatagtatatgagtagttttttttttttggctgggggcacaatatgaatgttttctaatttttgttaaacatattaaatcttggtgggagagttgtcgtatacgaaccttttaaagcgatgtttcctataattgtgcaataataatatgaatgcattacgtgaaagattgtgcttgtattggtatatgaacacatactattatactaaaaaatttgataaagagttttttttgttttgattttatatgtagaaattataatattttcaaattatggttgaaaacaaagatgattttcttagcaagccataagcttttcttatattgcaatgataaagtacttcacataatatgtttccctagattacgagtttagatcatatcgt

SEQ ID NO: 30870 - DNA, 1011 bp, Arabidopsis thaliana landsberg
aggggtaaaaaaatcaaaaatgaaaagaaaaattaatgatcaaacaacatcgattatcaataccttggaagaaggaaacaagaattttatggagcaattgaagaggagcaaagacaacaacagttggatattcaaagtaaaaattatgttttaaaagagctgaaagaagaaaacaaaattttattttgtgatttaaataccattgatccaaatgtccgtaaatattttcgggccaagcaagcacgtattttacaaaaacggagtgatcaacaacaaaaccaacaagctcttcctccatctacttcatttggtttgtttggacaatatttcaacgatattggtggatccagagataatttacagagtatttattaatttagtctttgttgtattaaaaataattattgtggaataatttatttttctttatttataagattttatataatttctcttttgcatatagaagtctcaaattttaaaatagatacttaaaccaaaacttctaaaatcaatccaaattattagttttatatattttaatcagaaataaaagtaaaagtacaattttgcaaataacaaacatatacagagatctctataatagagtatagaggcaaatatagaggtaggttgaagatgctctcaagcacatcatcttaaggctcctttgtactcttgattcaatttacatttcttaataaaatccaatttgtcctactctgatatctatcttacgcatacaccaagaatcttacctgaaaaaaacataaatctctaaaacaacttagaacatcttcatcagttggttgaatgtaaatagcttttttttttttaaatacccattaaagtcaatcaccaacatcttgttgaatgtaagttcctaagaacattcattaagatgttttttttttattttaacacgggatccttcatctttcttaaaaatgaatcttttactctttatatatatcaaaatttatggtgagttatatatatagatataggggg

SEQ ID NO: 30871 - DNA, 794 bp, Arabidopsis thaliana landsberg
aaaatctcactctccgcatatggagctcggcttttcaacgcaagcctctagaaaatcatactgtttttgcgagtaatggggaagcttcatgtcatattccattgcgggtgaattagcttcttcgaatggagttggagatatggctacatcttcatgtatctcctgggagaaaattggacaagccatgtaaaacctacaatggatacaagcatgatcatgagaagagattttgccatatttatttttggttttggatgtaagattgataatatgaaacaaaaaacaagagatgttatatagagcaatcagtaaggatatttaattgataaattgtttatttattaatagttttatgttactacttcataaacttctacctttactagttttgtttagaagacgtttgcagtagagactagagacttgtaaacgtttctacaagttgtaacttacaaggtgtgacaactctttttttcttaaagttattacaaatcaaagtgatacattagatacaacacggttagatacattagctttccgaatacaggcgataagcacttctgtgcaaattaaatattttttaaattacttaaaatatagtatttttcacaaaataaatatcacactaaatattagagattaatatgttgttttcaaatttttaaaaaaagacaaaactaaaaacaaatagtaaaagtaaaatgttattttaacactttctaaacgaaaaccaaattatgaaataaaatattttatattgcaagaaaaatatacatttaattattatcatatac

SEQ ID NO: 30872 - DNA, 1251 bp, Arabidopsis thaliana landsberg
caagaaataatttagacgatttctaaaatgttatccaaaacatttaagattttattgatgtaaattattgcagagactacacggatacaaacagcgagaggcaaaagagcgtcgaacatttctatgcaacacaacacactaaccaaactttagactttgtaagatctcttatatatcttatatggtttagggtttattagattgtgtgatcaacattatagttgagtcctattatttttgcatggacgtgatttatgaattactaatgaaaataaaaatctttcctaacgatgttagccgaaatgaacatacgatacatattgttgtttctcatctgttataaaatatattgttactaacttatgatacgtttgcaggtacagaaaatgagaagtgagtatggaaaattggacaagatggtgatgaacatttgggaatgttgtgaacttttaaaagaagtggtggacgagagtgatcccgacctcgacgaaccacaaattcaacatttgcttcaatctgcggaagcaatccgtaaagattatcctaacgaagattggcttcatctcactgcgcttatccatggtaattaattgtcatttatgacaaaaatcatgcttataagaatcaaaattatcatattataagaatcctaaaaatactaaaaatgactgaacttccagatcttgggaaggttcttaccctaccacagtttggagggcttcctcaatgggctgttgttggtaagtttaatctttgatttctttcattaattaatcctgatttactaagtagtaaacttatcaattttaagtaagtgatttatgaattctctatccgtttaggtgacacatttcctgttgggtgtgcatttgatgaatctaacgtacaccacaaggtacatataactcaatatattttgctagttactcaaagtattgatagttctttttttgacatcctcaaaatattgatagttagaacctagttgattaatatttaccaaacaagtgatttctataatatatttttttccttttcaaccttgattgtagtattttatggaaaaccctgattttaacaaccctaagtacaataccaaagctggaatttattctgaaggctgtggacttgaaaaagttcttatgtcagggggacatgatgactacatgtgtctggtgaattggcggatcacattctatagacaatcaactaccaacattaatcatgattacatgactcacaaaacgatta

SEQ ID NO: 30873 - DNA, 1438 bp, Arabidopsis thaliana landsberg
taatttaatggtataacaatgataaagcttttattgaagtaccaaatcaaaattctattattagttaccattcatgtatgatatgcaccatatgaagatgtatatgtatcattaatatgatctttccaactaattgtgcatcacagttctatatgagattcatgttccctaccctgttgtcttatttaatcttttctattaacctcacatcaggctcttgtcgaaaaggattggcttgcttttggtcacccattttcggatcgtgtaggaatgcctaacatatcaggatctggtaattttgactttcctaggcagtcttcgtctgctggaagtttcccttcatctcctgtgcgtcagtcttcaggatcagcagcctcacaatcttcaagctcttcccatgggcataacaattattcacctatatttatgcaggtgaccgagcaattattcctcttgcaattatagtaatacttttggtttgtttagatctatttcaatgggttggcagaccaacagcttatagtatgtttacatctatgtgtttccagtggattgatagcgtttcacagctaatgcggatgtatccttgtgcttttgagttttctccggtatgtatgaagtcaaacatatttctgaagatttcatgttcaacttcttccagtaataatagtgtagtcatttgccttcatatttggtgttgcagactttcctggtagattttatggattgcttgctttcatgtcgttttgggaacttcttatgcaacaggtaaaactttcttttgaagctccaaactgaagtgattctgaaaataattggtattatgatttatcaatatctgagctggtgtaaatttcagtgaaaaagagagggaacaatgtgggattgctgatgcctgtggatgcctatgggcgtacttgactgatctgcgttcatttagtgcaacttctcatgtccattgtaacccattctatgatcctttgaagtatgacggcccattactacctcctgcagcatctctagctcctaccctttggccccagttccatctccggtgggcttgtcctgaggaagctaaagctgcagatattggagtccaatgtagagccatgacagtgaaatattccgaaatgcaaaaggtaacttaattaactaatctcccttacctgctctctatggctctataatgtatcaaagtttttaacattctaattgatttgaaacaggagaaagaagcagcagaaagaagagtggacgagatatctttcgcaatggagtcattaagtgcagagttgctaagagaaaggcatttgagttgggtagctagagaatcagcaaatcgagctaccaaggaatatgcagctttaacccgagcagtacaatcactcgggtgcaagattaacttcaccacatctgatgtcgaagatgacccaaggag

SEQ ID NO: 30874 - DNA, 4698 bp, Arabidopsis thaliana landsberg
ctaaggtccttaacgatctcaacatatctgtcttcaaacaccattttgcaatcgatctgctcacttctcaggttccacttcacacccttgaaaaacacatgtgcatatatgatcaattggcttatcagatcatatctttttgtatcttaacaggatggcttgaacacagtttgtcatggtgtggacactttgaatatcaaaactaatgaggtacacaaagatcttgtttctggtggtttgatcattcaccttatatcttagattgtaatgtaaaaaaactcatgtttcttcaggtagtacgctttatatcgaaggtgacattgcttgcttcaggtggagctgggcatatctatccatcaaccacaaatcctctggtaacattttctatagactctctttttaacaaagctctatggaagtttcattttaccaattttatcagaagaaagaatgtgcaggatcaacacaacagttttgtgtgtttatgggaaatatccaaaaatgaaactttgatttagtaatgtgatttatcccttgaatacaaaagaaaatgtcgaaattatcacgggtatacacaaacatactgcattagagttttagatttaatagttcaaacagttgcagaaacaaagagattttagtcatagagtacatttttttgctaaattcggttgtgctagtcgcaatgatatttctctaaaagtgatatattatgctccattttaattatcgacatggtttttgtataggtggctactggagatgggatggcgatggctcatcgagctcaagctgtgatctcaaatatggagtaagtgaacaccgaaaaaccgactgaagaaacttgttgacaataaacttatgttttgtatttgtttttggttagatttgtgcagtttcatcctactgccctagccgacgaaggtcttcccatcaaactacaaactgctagggaaaacgcgttcctcatcaccgaggcggtgagaggtgatggtggcatcctctataatctaggaatggagcgattcatgcctctttacgatgaacgagctgagcttgctccaagagacgtggttgcaagaagcattgatgaccagcttaagaaacgaaacgaaaagtatgtgttacttgacataagccataagccaagagaaaagattcttgcccatttcccgaacatagcttctgaatgtcttaaacacggtctggatatcacccgtcagcctattccggttgtccctgcagcccattacatgtgtggaggagttcgtgctggtttacaaggcgaaaccaatgtccttggattgtttgtagcaggtgaagtagcatgtacaggcctccacggggcaaatcgtcttgctagtaactcgcttttagaagctctggttttcgcgagacgggctgttcagccttcgactgagctcatgaaacgcacaagacttgatgtatgcgcatcagagaaatggacaaggcctgttgttgcgacagctagattgctaggagatgaagtaatagcaaagattatagctttgactaaagaagtgagaagagagcttcaggaggtaatgtggaagtatgttggtattgtcagatcgacaattcggctcaccactgccgagaggaaaatcgcagagctagaagcaaaatgggaaacatttttgtttgaacatggatgggaacaaacagtggtagctcttgaagcttgtgagatgagaaacttgttctgttgcgctaagcttgtggtgagcagcgcgttagctagacatgaaagcagaggtcttcattacatgacagactttccttttgtggaagaaagcaagcggattccgacgattattctaccgtcttctcctacaacagctagttggagctcaaggcggttacagaatataagtagcagctcacttattgattgctaaaactgcaggagtttttgttcttatttgaatccaaacctctctgattattgtatcaatttgaaaaaatttggatctcaaaaggaatctctgattctgacactctgtaatacaaaaggaaataaattattcatttgagatatcaatcatattggtaattcatatttcaattcctttgttatggtttattgatgactttctgaatgaaagaaacaactgtgagtgtggatttcccaagcaagaagcaggattgagaacagtcttgtgttcactgactccatatcctcggttccttttttttctgagtaaatcattccaaaagcttctatccttctcctgaggaaatcacgagctccaagctcgggtatggcttccatgaccagaccaaacatgaattcattcttcctgtcttcttcaactagaccagggtgtgatctgagaaggctgcacaaaggcacatccattaacaatcagagatctcttctgcaatgtcgctttagaacagcctagttactagttacatccagaaaccagctagatcataagtcttgcctgctctgcagctgccatcgccgttctgctacaatgaaattcaaagggtattttcaggagatagttttggctcgtgcaatttgatttaacaaagaataaagatatcctgaattacaatgtgaagaagtactatggtgcaccataatcttaccagcactaacccaattgcggaatcacagattcacaattgcttaggtgtcctgtttggagctaaatctgctactgtagtatatatctgagaaaatgaaacatttgagtaaagttgcaactgaaaataggaggagactagtattggaaggatgaaacagaattaccacgttcacgaatttgaggaacgagcattctttttcttgtaacactcctttaagaatctttcagcatcaaccttcattccaggtttagaaaaggcagcacttatccagtaaatagtttgattacacggaatatatcccttttcttcaaccatctcttttagcaacccttttgcctctgctaagtacattgcttttttattccactcaacgtctggatgagtgcaaagtttgcacaaaccagatatcatggtacaataagtcgaagtattggggctcactcctctcttacccatctctttcaatagctctctcgcctgaagcatcttcccaacgttagcaaattcactaataagcacattataagtgctggttttcggtaccaacccatccgcaatcatctcacaatatatcgtcatacttcctttcatattccctatcttagcttgaccagagattaaagcattgtatgtaaaatcgtcagggcgcatacctctactcttcatctcactcagccatttgtccacttcctttattagcccagcatcagaaagacctcttattatagtattataggttgcaacatttggggatattcctgcttccatcatcacagaatatgtcgaaagagcttttcttacatgactgcctacaaagtacccgtgcataagggaattgaacgtcacagtatcaggaataaagcctctcgcttccatatcccccataaccatagctgcctttttcgtcatacctagtttgcacagagttgcaataagagtgttataaacttgccgactgagtttaatcccataactcaatagcgtctcatgcgttttgaatatagcatcagctcttttatggttcgaagacgtgtcaagaaaaatccggtatgtcgttaagttaggatggatctccataagcatcatttgattcaatatgtgaattgcttcctccattttaccgttttcgcatagcattccaaccacaatattgcaactcatcagactcggttttattccacaactcttcatcttatcccaaagcttaaggataccttccgaatccccttgctttctttgtgaattcatcattatgttaaatgtagcaatatctggttctatacccttctctctcattcctttgtaggcccagtctgctccgactttgccaaactttaacatcccactgattaagacattataagaaacaacatcccacggcatccctctctcttgcatttcttcagcccaagcaagagcagcttcttcgtctcctcctttgaagaatacatcaattaaagatgtgtagttaatctgatccagcgtcactcctttagataccatgtctttgactaatcccttaacttccttaatcctaccaattctcttcaagtggttcaccagagcatcaagtatgtagttgttttcctccaccccaatcagcctcatttccttactcagttcaattgccatttcttctttccctgccttaaacaagccatcaattactgtaccataagtaaaaccattcggcacaacattttggtcctccatttttctcaaaagactaacagcttcttcgagcatccctttcttcacatagccgtttatcatactagagtatgttacaacattcggaataacacttttctctaacatctgcgttatgataaattctgcactgcttaaatcccccgctttgcacaacccatcaaccaaagccgtatatgtaaccacatttggaacttggttatcttccaaaagcatcttaaatgttttctcagcctccctaaggtccccagccttaaacagaccatccatcaaaacagtatatacaactaaatctacaggtatcccacgcacaaccatctgactgtaaagagccaaagcatggcggtaaatatttgctttaaataacga

SEQ ID NO: 30875 - DNA, 3014 bp, Arabidopsis thaliana landsberg
tacgatgaattacatgtatgcatacgtattagtagtataattagcagtaatgtcggttttgtaaaacatacactgtcaaatggaagataccgtgtccaaggattctcaaattgcaatattatatttttatatccggataaaaaatatcaatatcccagttaccatcacgtcgtcacacgtggatgactcaaaacataaaacgcatcgttttctgcttacgcaagaagaacacaaagctctctgaaagaggagaagaaaaagacgattccatctgttttcttaaggaaacttcttccgttgcaaaagcttacgaagtcctccattaatggaagcggccttatttcactcttgctgatgtagtagcttccataagcttcttaaagtgtaagctgcgtaatttctgttattggaaacaaatcgaaccttctactttcagcttaaagcccaaagtctccttttttactctctatctctctctctaccgcaatttctctctgggaaaaccactcgtgtagttttttgtctctgttttgaacttttttaagtctaaaaatgacaactttagtcgtctcttttgtttattaggctgagatgttcgggaattgcattttgtaagttttgggttttgttggaactttttgcaattcagtgagagatgtgcgtgttgtttgctgcagaaatgtgctgctggtttcgcatttgttgaattttgggctttctgtcttattttgtgcggtgatatttgtcctctttgaataaagttttcccctttttaaaaaaaagtttgcgtttagagctaagtttatgttttttgtaatcttattgagaaagttcatgaactgatatcgtgacgtcttctatgttgtaggttactggtggaggtttgattcattaaattttgctacgttgtgggatcttcaagaagaatcctttgtatgtaagattccgtttgaagattctgtcttttaatttgttagtaatgtttagtttgttattcatcttgatgtgtcttatttttcatgctctagcagtttaaatctgtcatcgaagatatggaaaacccttttgcttctagagaaaaggggtttggtaattattcagattttccaacagaacaaatggatggtttaagctcaaactttggttctggcgttaggaatttgatctctgatgatatgttcaacccttcctccgagcttatgaatttcgactctttggccgcatggtgtaacagcccttccgctactgatatattgttcgcccaatatggtctgtcgaactcccaacctatgccttttggagctttcacttcatttcatgtagctgacccgaaggctaccagtctcactcgttcgttctatgatttggaaagctcttactatggtgaagaaagatcgtcagcacaggaaatgaattctcagtttcatcgctcttcagatagcgatgagttaagtggtaaacgacgcaaggttgttaatcagaagattggttttcctaacgtactcaactgtactattcccaggtctttgagccactcattagatgagaagatgcttaaggcattaagcttatttatggagtcctcaggttcaggtgaggggcattttagcgcaagtttggacccctatcaagacaggagatcagtacttgctcagtacttgtgatcaggcctatttgcttgatccgaggttttctcagtaccgtgaagtgtcaaggaaatttacgtttgctgctgaagcaaatcaatgttcttttccgggtcttcctggccgagtctttatctcgggagtacctgaatggacatcaaacgttatgtattacaagaccgatgagtatttgcgcatgaagcatgcaattgacaatgaagtccgtggttccattgcaatacctatccttgaagcttctgggacatcttgttgtgctgtcatggaactcgttacatccaaggaaaaacccaattttgatatggagatggactctgtttgccgtgctctccaggttgatacacttttctctccctctctctctttctgctttgttctatttttttgcttatatgtatgtttgcgtgtattactatcgccagcaagattgctatagtatttcattagttggttattcaaactttttcaaagtagaaaattgaaggtcttctttactctgaagtctaaagtttttctgcggttatttcattctcccacagaacattttttttatcacgttcaacacatgttgattctaggtccttccaaacattctaggcaaaaccattgaacatagagaacttgtgtcaattttatcttgaacaatctggattttgatgttttttgcagcagcaattgtatatatataaacaacttttaaatcttatgcaagattgatttagggtatgagaatctttgttggcttaagacctgcctgagtcctctgcctttgtcaatgaaagcttccagggcagctctggagacagtttgttgtggttgcaacctgaggttacaaaacgcagttattgtataccaaaagtgttaaaaaaaaagatagtataaaatagtatagggtctgagagattcatgttttcctcttctttttcaggctgtaaacttacggacagcagccattcctcgtcctcaggtaccatctgaattagaaaaaaactatctacaaaccattgtttctcgttacgttttatacctcaataattttgtattcgtgttttctagtatctttcaagtagtcaaagagatgccttagctgaaatacaagatgttcttcgaacagtatgtcatgcacacaagttgcccttagctcttgcctggattccttgtagaaaggatcaatctataagggtttctggacaaaaatctggtgaaaattgtatactttgcatagaggagacagcttgttatgtgaacgatatggagatggaaggctttgtgcacgcatgtttggagcattgtctaagagaaaaagaaggaattgttggtaaagctttcatatccaaccagccgtctttt

SEQ ID NO: 30876 - DNA, 824 bp, Arabidopsis thaliana landsberg
cctctaaaatcctaaaagctgtgctaaactgaagcacatcctgcatcaatatgagcttgcatctggtcagcaaataaacaaagagaagtcctctattaccttttcttccaaaactgattttgatactagactaagagttcagagagagcttaatatttttaaagaaggaggacaaggcaaatatctaggattacctaagctctttggcaggaaaaagaaagacctcttcagctcgattgtggatcgtattaagcaacgaactctcagttggtctactaggttcctttctactgctggaaagctctactgctggaaagctcaccaatctcaaattcgtcctttctgctatgccttcatataccatgtcctgtttcaagatcccaaataatctgtgtaagagaatccaatatgcgcttacaagattttggtgggatacaaaagctgagaagaagaatatgtgttgggtagcatggagcaaaatgacaaaatcttttaaagagggaggattagggttcatggatatacaaacctttaatactgctttattagcaaaaatcagttggagacttctccttaatcccacatgcctgctagccaaagtgctccttggaaagtactgcaacttctccagctttacggattgtcaggttccaaactcagcatcccatggatggcgcagcatttgtcttggcagggacttgcttaaacctcacctgggacgtctcattggctctggcctctctacacctatctggcgttccccctggctatcactaatctcacctcaggctccaatgggacctcctactgaagatactcaaaac

SEQ ID NO: 30877 - DNA, 4423 bp, Arabidopsis thaliana landsberg
  unsure (1)..(4423): unsure at all n locations
atgaaggcggttgtgtaagcttatcataaacccatttcggatttagtactttgacttgagatagattgcaaagtttgtaacttttttgttgttattgttgggattgattgatgcaggttcttggtggtggctaatgggatagctgcggtttattctttgttgcaatcagttcgttgcgtggtgggtacgatgaaaggaaaggttttgtttagtaagcctcttgcttgggcctttttctctggtgatcaggtgagttttagtttgtgtttctctttttacatacattttgtttgccaaaattagtgaattggatgtgggatttttggggtttggctttgttattttgagatctcaggtcaaattagagaaaagtagggtactatgttgaaaagtctctaagcattaaatgggtttggttggatatcagaattgaattaacttaggtaggaatgttgcttgtttgcttgcatttggaattgaagtttcgttggccatttaagagtgtagttgtgattttgaatgagcaggcgatggcgtacttgaatgtggcagccattgcagcaacagcagagtctggtgtgattgctagggaaggagaggaagatttgcaatggatgagagtgtgtactatgtatggaaagttctgcaaccaaatggctataggagtctctagcgccttgttagcctccattgctatggttttcgtctcctgcatttctgcttttagtctcttccgcttgtacggtgccaccaaagaccgcagaaccacgccgtggtgaagtgaatgcggctttgtctttagtagtgttgaaaatgttgttgttaaagaaacatatagtaacaaaagtgtaggctcttgttggttcttcttcttcttcttcttgatgatgttatatgtgacaaacaatatgtaaaactagactattgatgttctgtgtcaatgtgccatatgctgtgataaaaaacgagaccaaggttattgacttattgttgagcaaagcatcaccctcattgtgtcaccgacctctattgcttctctatttgcatttaggcccttacacaataagattattactaggcccgctatgcaatttacatttttgactttttcaaccccttttaggtaatttgagaccccagtttgcaattttagaaccaatagaggaagaaagcacctttcgacgccgttctagttttccgataccctcagcttctccgacaccaatccttaatctttgctcctttgttttggttatactagtttcttcgtctctaaagattagatttagatttttaagttttgaatagaaagcgatatgtcagagaagttttcaccgactttgaggctcggagatctcaacgatttcattgctccgtctcaagcttgtgtcatatctcttaaggactcaaaacccatcgtcaagaagtctgatcgaccccaggtccgaaatttccatgctttgccattgaatttcattctttcttcaagttagtctctttttgtgttttagggaatagcatatcctagtcttttgttatgaatcctatatatatcttcactagctaaacgtgtccttctctgtgctaatttgaatttgaaggttgtgattgccccaaaacagcagcttgaaccggttaaaatttctctcaaggattgcttggcttgcaggtttgtcctctcatttactttgtctgagtcagttttagagtttagagtgtaatggtttatgtatacgattatacagtggatgcatcacatcagctgagacagttatgcttgagaagcaaagcttagacgagtttctctctgctcttagcaaaggcaaggacgtggttgtgtccgtttctccacagtcgagagcttcccttgcggttcactatgacatctctcctcttcaggttttcaagaagcttactacgtttttgaagtctctgggagttaaagctgtgtttgatactagctgcagtagagatttggtacttattgaatcttgtaatgagtttgtgagccgttataagcaagctaattctgatgatggtgaaaattctcaatcccctctccctgtgctttcctctgcctgtcctggtaagcaactttactagtttgacgtaatgctatgtgtcactatgtgagagtaacgtgcggaaattttggtgaatcaaggttggatttgttatgctgaaaagcagcttggctcatatgttctgccgtatgtgtcttctgttaagagtcctcagcaagctattggagctgcgatcaaacaccatctgtgtcaagcattaggactcaggtacggtggtacacttgaatctttggttacctttctgaaattttggattcaacgtgagcatttcatggaactaggctgcatgaggtgtaccatgtgactgtgatgccctgttatgataagaaactcgaggcagcaagagatgattttgtctttgatgatggaacacaagataatggagaccttaagctgacagaagttgattccgtgctaacaacgggtgaaatcatggatttaataaaggtgatactgtgatagagattaaaccctattttcattgtaattctgcttccataccgcagaaaatgtgaatttgattttggatttctatatgtgtcgtgcagttgaaaggagttgactttaaagatttggaggaatctccacttgacagagtgtaagaagcattattatttcctcttctctgctagtgggtgatgaatacatacgaagtaaacatttccattttcatgcaaaaaacaggctgacgaatgttactgaggaaggagatctttatggtgtagctgggagttctggtggttatgcagaaacaatattcagacatgcggcaaaagcactatttggacaaactattgaaggtcctctggagtttaaaactctcagaaattctgatttccgtgaagtgactcttcaagtaagttcttagccagactatgaacagttttgaaattttctctcattaatccccctcggatttgtctcatgttcgtcatctttttcttgaagttggaaggtaaaacagtgttaaaatttgcgctgtgttacggtttccagaacctccagaatattgttcggagagtgaaaacgcgcaaatgcgattatcagtatgtagagattatggcgtgccctgcaggttcatcttctgcaaaccctagttgaaaaacgtgtcttatatgttgacttattaaccgttccccaaaatgctcgctctcaacaggttgcctaaatggtggtgggcagatcaagccaaagacaggacagtcccagaaagaactgatccactcactggaagctacttatatgaatgatactgtaagttatccttgagtctcataaatcacttttaactaagctagtaataaataacctgcccttttggatccagactttgaatacagatccataccagaatccaacggcgaagagattattcgaggagtggcttaaagagcctggttccaacgaggcgaagaagtacttgcatactcagtaccatccggtcgtgaaaagtgttacgtcgcagctcaacaactggtagaccgtagacaaactggaagtgttcaaattttttgactgacaaggcaacaaaaacggttctatattgtgtatttagataggagataagtgtgaagctttctgctcaaatctttatatgtaaaagacaaatctcaacattacatataaggaaaattacacgatcctactaagctggagttttttttggttggcttgcaatagtacattgatacaacctccaacacggttacacttattacatagcagttactgctgtgatagttactgtgatagagaggcaaggagcttgtccttcaactgctcagcggtgcagccaccctgaggccggagagtgaatgtgtgaaccacaccctcctctgtgatggccacgttggaatcatgaggcataacttcattctccctcaacgtttgtatcacctttgaaactggatgagtttccaacggacagcttagccttacaactgcatcatcatgcctctgttgataatcaacctctgctggagttatctgattactctccctcctcttcattatctgcttctctgtttcatacaccctgattttcttctgcatatccgtgatgtatgtgattgcgtctgcaaggagcgaagccttgtccatcttggagatgttaggcaccaccgctctcaaagcgtagaatctctggttcagcttctccctcctctgccgttccgcttccacatggtttagagcctcttctcttccatttgctggttttctccctctcttcctcggcttttgctcgtcagttagatacaatngtctcatctttgccttgctcataaccatacacttgattagagcctccgatcgcttgcacctcatacgattccaatgag

SEQ ID NO: 30878 - DNA, 1413 bp, Arabidopsis thaliana landsberg
acttgaaatctagcttattcctctttcgtttcttctttgcatactctgcttaaagttaaaaaaatctttttacctcaggcacgagagctttgtgctacactgcccggtatgtttcctgagagtgttattcctacattgcttcaagctgctgttttggtgagagaaaacaaggctgctaaagctgaagaacttctgggacagtgtgccgaaaacttcccggaaaagtctaagttggttctcttggccagggcacaaattgccgcttctgccagtcatcctcatgtagcagcagagtccctgtccaaaatacctgatattcagcacttgcctgcaactgttgccaccattgtcgccctcagagagcgagctggagacaatgatggtgctactgctgttcttgactcagcaattagatggtggtcggattctatgaccgatagcaatatgcttaggatattgatgccggtggctgctgccttcaagctcaggcatggtcaagaagaggaggcttcacggctatacgaggagattgtgaaaaaccataatagcacagatgctttggttggtcttgtgactactcttgctcgtgtcaatgttgagaaagcagaagcttacgagaaacagcttaagcccctaccaggtttgaaggctgttgatgtggataacctagaaaagacctctggtgcaaaacccattgaaggcatttctgctgcttcattgagtcaggaagaagtgaagaaagagaaggtgaagaggaagagaaagccaaagtatcccaaaggattcgatccggaaaactcaggtccaactccggaccctgagaggtggcttcccagaagggaaaggtcaagttacagacccaagagaaaggacaagcgagcagctcaaatccgtggctcgcaaggtgccttgacgaaggttaaacaagaagaagctccttcaacctctaagtcaaaacaagcggccatttctaaagccaatgcagctggcccttcttcctctaaggcctcgaaaaagaagtctagaagatgaacgaaacaaccctttaagatcgtttcatctgactagctaatataatgagtggaatagtgggacaaacaaaaacaatgaaacacttgataacatattaacaaaaatttagatgatttaagttgtttcacttcagaactcaaaagcatttgtatctagtttttatgcacactgctatcaaaaaggtctatgatactattgccaaataaaccattttcaaagatgtttttagtgatgaattttacataaaccaagaataccagaatgtgctccgcatacctctccttctgcgtggttctcaaggatattctcctttgccatacaaacaagtgtcactttcacatattaatcaaatcaacctttcatacaataggacatgcacaa

SEQ ID NO: 30879 - DNA, 1483 bp, Arabidopsis thaliana landsberg
  unsure (1)..(1483): unsure at all n locations
cagtgtaggactaatactctcaggaaacataccgggcagtgcagcacaaagttctcgtgcctgaggtaaaaacattttcttaactggggaagcatatgtaaagaagaaacgaaagaggaataagctagatttgaagtnnnnnnnnnnnnnnnnnnnnnnnttgcatggaggagtagaaggacgcgattggcatatatagcctccttatgtttctgtgaaagctttgcatcaagtgcttgagaaagctgaaaagtttgggagtctttgtctttcagcagatcaaacttcctcaagccatcagaaatatctttgaaacctttcaaggcaacaaggttgtttacagcaacagcaagtgaaggttcatcagccagatttcgtttaatgaaatctacataagagctggtggattcttgagtttgtccaaggatctgataaaggaaaaaaactatgttactaggcactggaatatatcttgacaagatgtttaggagaggacaaacagcatataaaagtacctgttggacatatgctaattgaacagcaattggggacagatcaatctccccttcttcatcggttaaagcgatgtcgtcatcattgagggtttcctgaccaattctgtctcaaagtaacagtacatttatcaggtatgcgtacattgtacaagacttgggaaatcaatagtcaaatggtcaatgtacttgaaatgttgataaggatacagagaaaggaaatcatctatatatcccaaaatactaggctcaaatttctcagaaacagatgagagaatatatacctcctggcagtgagcaaaagttgttcagcatcagcatagttattgttttcaatcaaagagcaagcagtattataagccaactcaaaactactagttggtttgatcttcaaactctccaatgttttctgcacttgagaagcttttccagctgaaatcaacccggcgactaaattaacctctaacgtctcaatctgggacttggtcagtttctgatacacatccacacaagcatctgccttccccaaactgtttgatgctttgtaagttcaaaagttaaaccgaatctgtattttagtggaatttttggtttagtcggtgaatttgtttactactgattgtctaataagcgaaggaggatgaataaaccaatatgcaaattctctctttaaccggtttggtcaacggtgaataaaataagaccgttaagaagggtaaaagcgtaaatacaacaaaatatttaggagcctctcttcttctctttgtgaacgttacgaatccaaaaaacaaaattgcaaactttgtgaggaagaagaagacgacacagtaatgaaggatacaatctcaaaccctagtttggaatctctgcttttttctgttaatccaatgtcagatacacaacaaaaactcaagcttttggttaacaatcgcgatccccgattcgagagaggatctagaatcaagaaataa

SEQ ID NO: 30880 - DNA, 4051 bp, Arabidopsis thaliana landsberg
  unsure (1)..(4051): unsure at all n locations
ttttcttgtaatgatgagagtcctatctgatactgattgtaatatgtttttcgctctgctagaattatataaaggaacagaagaatacattgtcacaaattttcgttttgtttgttcttcgattaaagatcttgagttgttttgtttatgcttataatttgtggggttcaaatgtttcttgtcatgattatgattaatacttgacccaattactatattaaacatccgtaaacgttttggtatgtactaaattttatctaatgtccaccaaaacaagtttgttcatcgggttatttcacattccaagtctgatctcagagactaaagaaacagcattcgctccagagaaaatcaaatcaattttttttatgacaaaaataaaaaacnnnnnnnnnnnnnnnnnnnnnnnnnnnnnaatcgacgctcatcgcgtcttcaagacactagcgatcgatgtatttgatttcatcaatctcttcaaaactaagaaaaaaagaaagaaagtgaagactgaaattaagaactgaacaaaaacgagattaggagcattatggtatagaagacggaaactggatgatgaagatgactttatatagggcacaagtatttaccctaatttctatggatttgggcttttgttaaggcccaataagaaaaatgggttcacattttaaaaatgttcaaaaacgtgttttaaggttttgtataaaaagaacgtaattagtttttttattctttacgtcacttctcgtcggagtcttacgccgcagggttcatcagagtttcaggttcttcttcttcttctcttcctccacctccattttcaaatattatacgattcatacttagttagaatcttactcttcatctctctaaatcgttagtcgaatccataagaatcgttttattagaaattcaaattagagaactaattcagtgttatattgtatattgaaacgatgtaggaggagaagaagaatgtctcacaggaagtttgagcatccaagacatggttctcttggtttcttaccaaggaagagagctaatcgtcacagaggaaagggtatgtctttttcaaactttggattcagtgttatcgaaatgcttacttgggtttttataaagtttctctctttttatcaatactgaatttgattcaaaaaaggttactcttttatttgtttgtttatgcgtacacgttactgttggtttatcagtgaaggcttttcccaaggatgatcaaaccaagccttgtaagttcacagctttcatgggttacaaagctggtatgactcacattgtcagagacgtcgagaaacctggatccagtaagtgaatttgtgtttaatctgttttttttatagagatttttgagttttaaagtcttttaacattattttttttgctcttgttgtgcagagctacacaagaaggagacatgtgaggctgttactatcattgagacaccagctatggttgttgttggagttgttgcctatgtgaagactccaagaggtttgaggtctttgaacactgtttgggctcagcatttgagtgaagaggttaggagaaggttctacaagaactgggctaagtctaagaagaaggctttcaccggttacgccaagcagtatgaaagtaatgaaggcaggaaggatctccaggctcagcttgataagatgaagaaatacggaactgttatccgtgttttggctcacactcaggttatatttcctatcgaatgtttagagcatcttcgaaattttgttcttgctgacaattctaatgttacactctctttacagatcaggaagatgaagggattgaagcagaagaaagctcacatgatggagattcagatcaatggtggtaccattgcacagaaagtcgactttgcctacagtttcttcgaaaagcagatcccaatcgatgctgttttccaaaaagatgaaatgatagatgtgattggtgtgactaagggtaagggttacgaaggtgttgttacccgttggggtgtgacaaggcttccacgtaagactcatagaggtctacgtaaggttgcttgcatcggtgcatggcatccagctagagtgtcctacacagtagctagggctggtcagaacggttaccatcatcgtactgaactaaacaagaagatttacaggttgggtaaagttggttcagagactcattcagccatgactgaatacgacaggtcagtagcattttacttttatctggctctttctcctgaataccagttcagtagaactgattgtgatgttgtgtggctatgatataggactgagaaggaaataactccaatgggaggattcgcacattacggtatagtgaaggatgactacttgatgattaagggttgctgcatgggtccaaagaagagagttgtgactcttcgtcagtcgctacttaggcagacttctcgtcttgcgatggaggtgattaatctcaagttcgtcgatacctcatcaaaggggggacatggtcacttccagaccagcgaggaaaaggctaagtattttggtcgtgctgcaagaaaggcttaaaccaagtctctattcttttattagctcttctttaaaaattctttgaaagataactattttttgaaccatctgtcgcaattttgtattttagttatttggtgaatttttaacattttgcttccgttactattgttcctcaaatttcttctaactaaattattattaatcatatcttatagatttcttataagatgcgagtttaattgagtttatccaatccgagctagagtctatgactaaactggttagagtaatagagtgctcatgaccctttttagaataccagaactaaaacgtaattgatttgaataaaccaaaccattttgaggattttctaaccagtccgaaccaattttgattggaatttatttaaactaaattaaccgaaccgaatcaaattgaataagaaaacaaagaggttggtatgagaaaagccaaactaaaccaagagtgtgaatttggattccaaggttagagcttcatcttcgtttgcttgtttttgttctctctcccagttcctgggttcaagaagaggaaagttgatagttgcatatggctttatctcaaagactaatacttttacgaaaatctcactcttctgcaaatgcccttgttaccaaatcacaaaattctatccccgagttggttaaacatattgattcggatctgatacgtaatgcacacaaggtgttcgacgaaattcctgatttaaatgtcgtttctgctacagcggtgattggtcgttttgtgaaggaaaacagacatgtggaagcaagtcaagccttcaaaaggttgttgtgtttaggcataaggccaaatgagttcacgtttggcacggtcattgggtcttctacaacttcgagagatgtcaaattgggtaagcagcttcattgttatgcgttaaagatgggacttgcgtcgaatgtgtttgttggcagtgcggttttgaactgttatgtgaagctgagtacgttgacagatgctcgtagatgttttgatgacactagagacccaaacgtagtttctattaccaatttgattagtgggtaccttaagaaacatgaatttgaagaagctctttcgttgtttagagcaatgcctgagagaagtgttgttacttggaatgcagttattggagggtttagccagacggggcggaacgaagaagctgtgaatacttttgtagatatgttaagggaaggtgtggtgatacctaacgaatcaaccttcccttgtgctataacagccatatctaatatagcttctcatggtgctggtaagagtattcacgcctgcgctataaagttcttggggaagcgattcaatgtctttatttggaactctctgatcagtttttactcaaaatgtgggaacatggaagatagtcttctggctttcaacaagctcgaagaagaacaacggaacattgtatcttggaactctatgatatggggttatgcgcacaacggaagaggagaagaagc

SEQ ID NO: 30881 - DNA, 337 bp, Arabidopsis thaliana landsberg
ggattcttggcttgcttcttcacctgtcttgatcaaattctattgtggcagatctatcttttccaagaaattcttccatgaatacagtcttcgaacaggtaatgcttgtttcatcagtagctgagttctctcatattgtcgatgcctaacgtctctttcgcatcttttatgtatcttacagaaagaaaatgtttcaacagagtctgcagcaccatcatatctatctcctgcacagttgtctctttcactagcttcacaaccatcatctttccctacgtcaccactttcgtcccaaagctacttgcaccctgcaagttcatctacacttaaactgaca

SEQ ID NO: 30882 - DNA, 5238 bp, Arabidopsis thaliana landsberg
ttttcttttatccaggttcaactacaacagaagatgaaccaagaagctgaacaattccggcagtggaaagcttctcaagagaagatgttgttgcaggtactttatctctatcttcatcacctctttattgtccgttgaatttttttagttgaactgatctcatgttacactttttaattgttttttgggtagcttaagaaagaaggaagaaaaactgagcatgaaagactcaaactcgaagctctcaatcgacgtcagaaaatggtaaagattcttatgatataattgtcttttttcccgcttgagagaaacataagagtctcaagagaaaatgcatcttaatgtcttgcaggttcttcagagaaaaacagaagaagcagcaatggctaccaaaagacttaaagagctgctagaagcccgcaagtcttcacctcatgatatatcaggtaactagttttccgaaacacactttattttgttcttgtttcgatcataatcctttgctttcttttccagtgattgccaatggccaaccaccaagtcgacaggtgataagaattcctaattcagttatgaatttgcaacaagtatcaactgtaacaaattcttactctttgcagacgaatgaaaaatctcttcggaaatggctggataacgagctagaggttatggcaaaagtacatcaagttcgttttcaatatgaaaagcaaattcaagtgtgcgtcttcaaaaatctgtttcagtcatgtttgttatctgcaaatttctttctaatcaataagccactctgattgcatatagacgagctgcactggctgtagagttaacatcgttgagacaagagatggagtttccttcaaattcccatcaagagaaaaatggacagttcaggtacaacaatatactttaaacgactcagtagtgtaaactatgaagttgtttgggagtggactatttcactttatgacctgtttatttttgtgtatgcgtcagatttttatcaccaaacacaagattggagagaatagcttctcttgagagtatgttggatgtttcctcaaatgctctcacagccatgggctctcagctctcagaagcagaggaaagagagcatagcctacatgctaagcctcggtggaaccacattcagtccatgactgatgccaagtatttgcttcaatatgtgtttgattccactgctgaagcaaggtaacaactattacacccgaataaactcagtaaaaatacaaactttgggatgaaatggaagattgatttggtcttgctttaaacatcaaacaggtccaaaatctgggagaaagacagagacatcaaagagaagaaggaacagctcaatgacctcctctgcttattacaactaaccgaagtccagaaccgagaaatccttaaagagaaaaagacaagggagcaaacagtgtccattgcgctggcttcaacatcatcatcatactcggtttttaaatttaatccatatttccacactaagatccaaaattctttattgggaatttctccttaaaaacgtatgcaaaatttcacttgttgcagggaagttcaagaagctcatcaaagcactatggagataataacgctagtgacgacccatcatctccatcttctacttatcatcgagcaacaaagcatctcaaatacactgggccgggtatagtcaatatctcggtgagagaatcagaagctttattagaagagacgaggaagatgaaagcaatgaagaaaatgggacagagtggcaagctatggaagtggaaaagaagtcaccatcaatggctgcttcagtttaaatggaaatggcagaaaccatggaaactctctgagtggataaagcagaacgatgagaccactatgcacgtcatgtctaagagtcatcatgatgatgaggatgatcactcgtggaaccgacactcaatgtttcaaggtgcttaaagctgtatgtatatacaagagcctttttttttctctgtcaacagattcaatattgttatacttttattacgaaaatccgtcgatattaagaaaattccaatgctaagaaaatttacacttttaatactctttttctttctcccaacttaaccagttaacccctcataaacacatacttgatcagaggaatttttcgttctcttcagtcatcacaacactccccttaatctcttgaatcattttgatcacttctttcatagtgggcctttgctctggcgatgttacacggcaaagacaagccgtttgagtcatcatctctagcccattctcttcctttgacctttcttcttcttgcctcattgctcttacccaatccaacatatcgtttggctccataatcggttgcctcgaagcggttttaccggtcaatagctctaagaggaagaccccgaacgagtaaacatcgcatttcgacgtgggacgactatctgttgatttccttatctctggtgctttataggaagagatgtccgggtcattgggaggaacagatgagtctgttaagacacttaaacaataatctgtgacacaagcttcaaagtcgtgaccaaggaggatgttagtggacttaaggtttccatggaatttggctgatgattggtgaatgtaatgtaatgcttgagctacatcttctgctatcttcaaacatgatgtccaatgtaatggctttgcctttgatgttctcgaacctggattttatgaaaacgtaattgagagatcaagggataaaacagagtcattagttagtctattcatatcaataaccacaagataaaaaagaaaagactcttttactatgatgattcagatgataagtttagtaatggatgtttgtttatatacacttccaatcataaacgagtaatatgcaaccaagaagccactctagctcaagtcctaagacaaaacacaccaaattcctgacaaatgactagagtttcacgtgaaaatagcacagattcctaacagattctctgtcttatatctacagttgttcaacaaagaaaaagtcacaacatattttaatcataaactccgtcattgtctctatgtggtcaagtctagagttccttcaaaataataggagctgcaccaaaacccatcaacgcgccaaccgtttcagctttataatggagacaaaagtaaaaatcatagtatcacctcaatatgatcgagaccaacatggtaattacttaattaactagacctaaaaaagcaacaactcttacgtgactcagtgacttcaactaaaaccctaacgttcccaagagaaaaagaaacagaggagaagaagatgaagaacattaccatgaataagattgaagagacttccattaggttggtactcatagatgacaagtctctctccatttgactggaaataagctttaaccggaacaagattcggatgcttaagtccaccaactatctccatctgattctcaaactctaaatcactagtaatcgctgttttcgacggagcaaatctcttcaccgtcacgatcatttgattaaccatcaccgctttatacgttgtacctactgatcctcttcctaaaagctctgctgaagctctcatcaactggtcaactgtgtacattgcttctcctcctcctcctccttcgccgcagaatatcaaatctccgtttcttgggattcgctttttcgacgacggcgcagtggtttgaaattggatcttgatttctttgttttcttcttctcgcttaggttgcgtaattatcacgtcatcgtagtcttctctccggttttttataaacaacgagaacacgacgaggcagagacctagaactatcaaagaagcgagaccaatggtgaaaccaagaactaaccaaccgtttttaacctttttaaccaccggtggaacaatcatcgctgcttcaccgttctgttcactttgaataaccggtgcttcagacgaagaagcagaagatgttgatgacgtggtgtttggtttaggtgaaccaaagaacggagaagaagaatgtaaaccgcaagatcggttaatgatctcaccgcagagtccagggtttgacgaaaacgaagacgcgttgaatcgtaacagagtctttgttaacggaactaaaccggtgaggttgttactggaaacgttaaatgaaatcagagaagaaagatttaacggcgggagagttccgttaagtcgattaaactcgagatttaaagaactgagtcgactcagagcattgatccccgacggaatctcaccggagaagttgttaaacgatagatcaagttctgttaaccgacgaagagagagaattgaagaagaaagagtaccggagaaaccattcttgcttagggttagggttttgagattgacgagaggagatagatcaggaatcgaacccgagattgagttattctcaaggctaagaacacgaagctgatcaagacgactaagagtctccggtgagaaacttccccggagaccaacaccgtcgaggataagacgaacgacgcgatcttgagagcaatcgacgccgcgccattgacagtagtcgtaaggctcggtgagagagtatagaagcttgttgtcgagatcagcggtggatttgaaggagagaagtgcgacggcgtcggatggtaagaaggagtcgaagtagttcgtcgccgggagagaggcggtggagatacggaggaggaggagaaggaagagaagagagtagaagaagaagagtgtcattttgtgtgtgtgtttttgtgttacggagcagagcatctagctgtgtcagttattattctgaaaagttttgaaatatgtttaatcttgtggcacgcgtgtgtatgtatattatgtgttggatgatttttttatgatattatgaaatgaactcgattttagtgaattatatacataaaagaactcaaaagattaagaaacgatcggcccttaatgtgtatttcgaaaccgtccatgtgtaacgtgttcatatgatatgatttgttgtggtagacaatataacatataagactataagtagacaatgacaagatgaaaataaacacgaacacgagatagaagcatagcttgttttgcaaattatacctaacaaaattggatcgtagttgtataaattttgtattggtacaaagaaaatgacatcgtacgttcacatttgttcttctgcacgcattaatatcacatttgttctttctcaacgcattaatatcatc

SEQ ID NO: 30883 - DNA, 1637 bp, Arabidopsis thaliana landsberg
  unsure (1)..(1637): unsure at all n locations
cagcagattagaatggctcccaaggctgtagttctgcttggtctatttgcagctctaatcgtcgtcacaaaaattgccgctgcatccgctacgtaaatattaatgtggaaaccttattatatgtaagagaccatctcaactatttttatagcatgttttatatagagtattttcaatgttgtcaatattatttttaaaagtcaaaattaatttacattcgtatttttcatagttggtttaagagaagaaatagttttgaaatttgggagagtaatatcttatgaaattatgtgttgttttggataggtacagtgaagtcagagagtggggaaaccgtgcaacctgatcaatataatggcggtcacggcggcaatggaggctacaacggaggaggaggttacaacggaggaggaggtcacaacggaggaggttacaacggaggaggaggatacaatggaggaggacacggaggaagacatggttactgtcgctatggctgttgctacagaggttaccatggctgttcaaggtgttgttcgtatgctggagaagctgttcagactcagcctggtcactaaattaaacaatataataagttgaccaccatgcatgattgtacctagatatacacttacgtgtatatgactataggttaattaattatggtgcgtttgtaatgaagtgccttataagtaatgggaataaagtttcatgtaatgtctgtgtttaagttgtgatctgagatgtttgcataataaaatcttgtttgttgtttacactattatcttaagtttttgtgtaagagttttccattatcatactttctaggtcgaagaaaaacacctagagactctatcgaggttttgcacacacgtacctatacttccaaagttaactaaatatacgaaagtaccataaattatctcacatttgatgtgccaaaagatattggaaacttattgtgtcaggttacttgaggctcagaaatttgacccttttgtgtctcacaagcttgcactgactcggtgtttaggtttcagtgcctcccaacgaataaaaacagtcgctaagtgtagggaggagtagttgaatgccatttaatcagactggaagattggttaagagctgagactaaaaataaagtttgcatttatgtttaattatattgaagactaaatttgtaatattctaaacgatggtggtacatgagcaagagttaataaaaatttatttggttacttgtagcattaaagtatcatatttatacaacaactactgtacaaaccttttcaacagacttgcgcatcaatatgctggatgtcttgatcggacgcagtttgacaagattattgatagacctctgcgtaaagacgttgttatcttcttcagaaggtacgaaatagcaatggacgagataatttggaaggcaaagagttggagtgctagtgggaagcgatggaatgcgtaagagtgttgcttgcaaccaatcaagagtttttcaacatcagactcttctttgaaacttgcgataagatccaatgtaaggaggaatgacgtccttcctagggatattngcagaagaaatccaggttcttcatcagctcaactgtcataaatnttggtctcatgggaggaga

SEQ ID NO: 30884 - DNA, 4990 bp, Arabidopsis thaliana landsberg
gacacccatacaagtctctctacggcttcatgagctgcatctatagtttttccatcatggactaccttcagcgatctcttgaaatctctatacctggaatgtatggcatcaataatcaattaataatgtagggtagatttttacaaaaacaagtcattttcatagagagtaagagatgacaaattacttgtgaagaaaatcgagaccaccagagatctgtgattccgaacccagcaactcgactaggccttcccattgctgcatgtatgaaatgaaacaacgtcatctagggcacagatagaagaacccacagtgatattatatactgaaatttgctttgagtatgtcttagagaatatataccttgagactttcatcagacaatgattttccaacagaatcaaacagctgttgagcaatcacgctgagacaattttcgtcccgagcttgctggagccagaaaatccctgagcctttcctcccatgtttccaatgatgcactccagaaatctgaaaaccataacttcagattaaatctgtttttcctttttccgcccaatttggagattagagaatacaagcgtaaaatagtgcctcaatatatcaataccttcattagtttagcactgacattactgagttcatagagacggcaaatctctaggctctgcaacaggagaaacataagtaccaggtgaaggcttctgacaagatcctagaattgtaaacgacaaaccagaactagaattgatgtacaaatgcaactgaaataatgaaaccttaataagcatctgattctcttgaacaggctgcctgtagaacaacagctctaataagcctaatccctgtttctcgcacgatgctagataaataggagctatctgcaaatttcaaacacaatatggaagagtttgatataacaagaagcgtaataagaaaggtgccgatttgattacagggaaggtacttgataagtcataaaagaaaggtacctgccaagtcaaagcatgagaagaaagaacttgagcataaacaagtctatggagctcttccatgttaattccacccaacttacgctgttcctcatgtacaagaacttctccttcttcgcttccagctgtcaataattccatggcatgtgcaaccatcctaacaaaaacatgaaaagtctcgtcctgattcatatagataagagtatagcgtactcaataaacttagtaaccagaaacaaacatcgcctgcctaccaggagccaaattctttggaacactctgccagaacaacctgcatcatttaattacaccatgctggattagaaagtggcgaagagctgaaacagttgcacctctgactaggtataagatgtactactgacctcagtattttctccaagaattccaataagcagtcttagaagcttatgggaagtgttaactggctttgactgaacacacttctgggctaggctatgcatgccatctaatccctgcaatgcaaaatggtattaatttgattttcaagtttaatattagaatgatagcaagactcgaatttaaatagacaaacagcaggtaaagcaatccaccttcgtaaatggcctgagataaagaagatgtgaaacaaaaagctccatccagttacatgtcgcagctctgaggcaatcagcatttcctatcatgatcttcaacatatttctcaagccctcacgggtctgatggtgagcacattgaacccagaaggcactgcactctagtttagttatctgagactgccatctttctcgtgtctggcaaaaacggcaagatgagtctagacacataatcagatacaataaaaagagttagaatgatacatgtttctaaaataccttcataaagtcaggctttgctgcagagcattcaccaaatttcccatcttctagttgtggccgcattcgtggcatttttgaaatgagaacagcaaccgcttctaccaaaccattttctgtctatttcattaaatttgtattacattatgaataatcagaaatctgtgcatatacaaaagtactagcacgtagctagtcacttcatatgacataaatcccaaaggacctaaacatgaacaacttcattctaacctcacgatgtcccagctggtctagttgataagaaccatgtaggtgtaacaacttcacctgaaaataaaaagtatgggcagaacatttctcaaattgtaacattcaagatcaaattacaaagaacccccaatcccaaaaaaaaagtactaaccactatttctagccaaccaactgataaagcagaagccatcacttcccagtatcttggatcatcctcgatggcctgcaatggcacataaccccgttaagaaagtcaggttcttcaatcacttattttctgagaactatcgacttcttagagatgagcaaacctgcaggccaacaagttccttttggaaatcctggagctttgagtagattgttggatgtgagctagaaaggagtatatcgtattcctgccatgttataaatggtaggtaagaaaacactagaagtttaaaaaaataagatagctcaagtgtcgaaggtaaaaactaattacagataaccaatcaacgagccgttctggcaaccaagacagacatgtcttatctgcataaaataattccatcaactcccacgcagcctttaaagaagttggttcctcagcattctgcatatgtatgttaacaggaacatccattaacaaagctccacactcaaacctatacctcactcgcggaggagttaaatttacaagtaaagttaaccaattgtagaaccagaaagaccaacgtacctttataactgatctcgggtcttcaatcaaaggagcgggcaaagatattgtattactaaggagagatttaatatctctgctgtattccattacgtactcccacctgattaaaattacgacaatccagaattgctcaaacacgctttagaagtctaatcataagataatccaaaacagtatttcagtattgaatgggcaaaatctgggaatttacaaagaagatactcaccacgcagtctgatacagagaggaactcatatccatcttagacaaactggaaattgagtttcttctgctctgcaaaagcgcgaacggagataccgatccataagcgatccttcgccactgtgggtcactgatttcgccatcctcgccgctaagcctaacgtttacgaccttaccaccaacttctccgtcgtcatcatcgcgtaactctggattccttaaaaccgtgacgcgtaggttgtttccgcaaccccaggagatggagagcctgtgaaccggagacttgaggccatagcttagaggatacaacaccggagttttttccttggtcgaaaacagaaccaattctccaccgccagattccgaagacatacccggcattttcggagctccgatggtagaaatggccgttagggttttagattggggttgtagcttttccggagggagaagaactgaagtggaaacagaccaacaaaaaggagcgacgacagtaaaacgcaccgtgtgttcgagagatattctatagtaattacattagtagctatatactgttaaaacttttctaattggtccatgtatttttccagaatgtacattaagccccaaacaacgcgtcgttttgtaatcagagatatgaacaccctgacgtttacggttactaaggctgctcttatctcccttcttcatcatactcatgggcattcgattttaaaggcttagctttgttcctctgtcgccttggagaatctccagaagcgtatcatgtggccttcgtctcgaaactcttcgcagcctcaagctatggtattgatttcgacttattttccgtcttttctgttgataatttgttcttagttttgttgcttcttttttgtcaaaatttatctcgggctgaggaattgagtctagtttgatcaaaacttccgaatggcatcagttggctagtgaattggaaaacttgaaactaaacaaattacaaattctgagctctttcttcttttggttattgatgtaagatcagttaagctcaaagagtcaaagtctgattctttcttaatagtgtactgtgctttaagtgtaagtgtttggctttatagtgcacaagtttcttatatgtatgtctatggttgatttggcaaataaaattgagagatttgtggtgtaaatttgaatgtttgcctctcagttctcaccacccaaacgagaatttatcatgtttttgtctctaaaatcttactgagactgcaacaaacgagcttatttactcggttgtttcggtcatgttctgaaattttcttgtagcttactaaaccagcattcttgttggacagttaaaaatgtatcattgttttttttttccggtgaatatgatcagagacaagaaaagaagtcgatatctgtgagttttagagcagagaatctcataccaggggttgtgataggattcatcataggtatgatattggatttatcacagcaagtgacctccccagtgaaaaggagcagacttttatccagcaaggtccagaagcagagttctgtaccaggcaatggcaaggaccaagagcttaaaatggtttgtctatcatctagtgtaacgatagtctcttgtctctgcccctagattttattggtttggagtaaaatattataacttaaatccttataacaaaacctagtgataatgcaagctgatttatgttccaaacccatcaaatgattgaaattttagcttcataaaagagacttgcataatctatacaaggatggtgatgagttttcaatgatgtcagatttttagattacaagttaaaatcagaacatttgtgtaactaatttgagcttgttctgatcacaggtaatggtagttaggcaagacttgaagatgagaacgggcaaaattgcgtcacagtgtgcacgtagat

SEQ ID NO: 30885 - DNA, 2801 bp, Arabidopsis thaliana landsberg
caataagaaacaacttgaactctgaaatcaacactcatcttcttgctcaagaaatccgcagcgatcaaatccacaagcgccatgtacacaagtatccccgcagagagagaatcgagcactccttcagccaccaatgctgcaacgctataagagttgtaagatgaggcaatggccgttcccaccgctacaccgatcggagtagtgatggcgaagaagaaagccatcatggcagatccacgcggggttagtctggcctctgcgacgcagccaccgagggcaaaaccttcgaagaattggtggaaggaaagagcgagaaggagaggacgtatggtgcatgggctatgtgatactccaagcgatattcctatgattattgaatgtgacactattcccatttcaagtatctgaatacaaaaatataagggtatcatcaattgattttgtgcatcgacactatacaaggaaattatataaacggattggtttgactaagtcacataacgtcaaaatatattaacacacacacacacaccaaaaaaaaaaaatgtttccacaatgcgtttaagtcgtcatttgtatctttggaagaaaacttaaataatagtatgatattttagaattatcttattttttcgttttcatattaataatgttttggtagaatgaacatgaagtagtactaaatataatagttacgaagataacattaaataattacttaaacaagcaataaaataaattttattatttttttcaataacaaaatctatatagtgattagcaactaactaaacttggcattgtaaaactttatagttgattactataacaactctaaaacagcttatgcaagtcatgtacagttattagaattcatccaattgacttggctacattgtatatgaatgaagtcaactgcatttgaaataaataaatcttattagcattaaagaactcaaaacttaaaagtcagagcttacgaaaaacaaagtcaaagtcaaaaacatatgaagaaaagaaaaaggtcgtttacctgagaaacaacaacgtgcctcacaccactgtccaagcctacgtccccgtggccgtggctgtggccgtgtccatgaccggaaacaccacttctcttagagagagcctcaaaaccttcggcacccatggagaggctatgacggtgatgctccgcgtgagcccgcatccccacgatatgcaacgcccctccatcttcttgatctctcagaaaacccgattcaagacctgggtcagacataaccgaaacttgcgtaccaagcgactcgacggactggttcatcatcttctcctgtttcctctcgtagtatcccgtgatcatgaaatccgcgagcagagtaagaagcgccgcgaccatggcgaagaattctggaaaagggaacattttccatggaaactccggcagacatgggtcggacaaagctttggatccgcccgagagcatgtgaacgaaccctgttgcgaggataactcctgctgcgaacgctttggctcccctcattaagccaccgtttaacggaagtagggttccaactagaggaatcgagactccggcagctccggagataaggatcgacgccatagctgcgaacttgagggtaagagcagctgcgtcatctcggcacgggtctgagtcgcccgagtcacagctagttgtgaacgactctgttttgttacatgcaaaaataaattgagttaactttgctaagaaaatctcaaaatttgcatttaagtgtgtttaagagcgaaatgaagtaattgctttgagatttgaagtgacaatacctgtcaaaccagatgataatggtcgaagaaactgccaaaaatcctgaaaacattatgaggcaaaattatgtgaggaaacaggattgaagaagcaaaataacattaaatagatgaagtggaagaagtttcagacctgtaagagagacatttactaaatccgattaggcgattaaacttgtagaattatataaattattgtcaaggaaaccagcaagctaagtatatatgggttattaatattatggagttgtctgtgtgttttataaagaaagattgggagaatgtcaatcagtgcgagggtttgtgtgtgcgtgcacgtacgttaacaaggtcacatgaggttcacgggaatcaaatgaccatagaatgtcgtcattttcatctagtaccctcattgacaagaatattaaagtttggaagataataactacgagaaaacaaatatagaattagagatgagatgtatgagaatgttttgttataattgaagtctttgttcgtatcttgcatcagaagtatgactcttgtttggtcaacttgcagaaaaatgactattacaatgcgaaatactagtaatgttttgcgtcttaataaaatttcattcaaaagattatgtaagttaggtttgcattttacagttgattttgtttttctcctatctcatgattctctgttttaataattaaaagttaaaatttagaaaatagccacaacatattcaaaaagtatatatttgggccaaccggcccagtaagggaagaatgttccttaagttgcctaaatgagcgactgagaaactggcccacaaaggccggacctgtatcattcacaaccggaaaactttaaaactaataaaccaacgttcttaaaaaagcgacactttggggccataatttgttgggaagggaataagtaagaatatgctttgggcatatctgatgatttatatctgtctcatctcatctctcatcgttccgggagaagag

SEQ ID NO: 30886 - DNA, 1420 bp, Arabidopsis thaliana landsberg
tcaaccgtcgaagctgtaaactcctctccttccgttgctcatcctcttccttctccgagaaacaccacaacaacgcgaatccacccaaatcagatgacttagtcgagcttcctctatttccactacctctcgttctcttcccaggcgcaacaatcccgcttcagatcttcgagtttcgttaccgagtcatgatgcaaacgcttctccaatccgatctcagattcggcgtcgtctactccgacgctgtttcaggctccgcagctggaatcggatgcgtcggagaaatcgtgaaacacgagcgtctagtcgacgatcgattcttcttaatctgtaaaggtcaggaacgattccgagtcaccgatctcgtccgtacgaaaccttacctcgtcgcgaaagtgacgtggcttgaagatcgaccgtccggtgaagagaatctggacgaattggcgaatgaagttgaggttctgatgaaagaagtgattcgattgtcgaatagattgaatgggaaaccagataaggaatctcaggatctgaggaagaatcagtttccgactccgttctcgttcttcgtcggaagcacgtttgaaggagctccgatggagcagcaagcgttactggagcttgaagatacggcggctaggttaaagagagagagggagacgctgaggaatacactcaattatttgacggcagcttctgctgtgaaagatgtgttcccatcgcagccatagtttaatcggtatttagatatttcttctggtctccgtttcggtgttttcagttattattggatacattatatttgatcaatgtgtaaagtttcagaaacttaggtaatagatagtggagatgtgtttcataggatcgtttggattgatcaagaaatgggtttttacttgattgcctctatgataaaagattactctagtgattcaagtgttgttcttaatacgaagcggctcgagttggcatttacattgaaagcctctcaagatgctatcttttgcttattcggatcaatgccagactctggattgcctctatgttcataggattatatacagtagtaggattgatcaagaaaagggttttacttgattgccactagtagggttcttgataccaaagaatggcttcttgagttggcatgttcaatgaaaagcatgtacattttcatctaaataagtttgcttgatcagagtgtttcaatgcctcatagcgttttagtactgaaactgttacacccatgatgactcgaagaaacatgtctaaaactagtatagaatctttagatgataagctgaaatgtaagatccatgaaggttagtaattgttcctttgtctttctgagtttattaataagaggataaattatgcacacttgagctatgcctctggacaactttgggtgcctcagttt

SEQ ID NO: 30887 - DNA, 3913 bp, Arabidopsis thaliana landsberg
cactcttcaggtaagggtttgttatccattggattagcaaccaggcaatttgatgcttatgtgcactcaatcctgaagaacgcaaatagaacaatactatattgtttcctaccatcgttcttgataactattggagaggaggacctaccgtcacgtctgggattgcttgttgaatctaccaagaagcaaacttcaaagttaagcggcaaggaatctggaattgatgtctcagcagttcttcaattgttggttgcaaacaagaatatcatattatgccctagcaatcttgatacagatttgaattgctgtctgtgtgtgaatttaatctctctacttcatgaccagagaaagaatgtgcaaaacatggcatctaatattatcaaatatttgctggttcaccgaaaatctgctttggaggatttgctcgtcaaaaaaccacaccgaggacaaaaatttgatgtactacacgggggttttgatagattgctgactggaaatcttccagaattctctaagtggcttgagagctccgagcaaattataactaaagtactggagcagggtgctgcagttatgtggatacagtacatagctggctcggcaaaatttcctgatgttagaatgaaaggcatggatggtcgtcgcactagagagatggggagaaaattgcgagatacgtctaagttagacctgaaacactgggagcaggtaaatgagcgaagatatgcacttgaagtagtacgtgatgcaatgtctgctgagcttagagttgtccggcaaaataaatatggtttgatacttcatgccgagagtgtgtggccaactcacctccaacagcttgtacatgagcgtggtatattcccaatgcgtatttcccatggagttgaagatcttaaatggcaactctgtcctattgaaggtccatatagaatgcgtaaaaagcttgaacgatgtaaactgaagattgatagcctccataatttactagaagggaagttggaacttggagaaattgagctactcaaatccaaaagtgaagatggtcttgttatttctgatatggattctgagccagctttcctgctaagtgaactttacagcgagtccttttccgaagaggctgatgatcttaaggatgttccatctgctagaaatggatggaataatgatagagcaactagtacaaatgaggcgagtcttcataattctctttcttttggtggcaagtctagtagtacagcagtatctgttccaataagcgttaacacagatgaaaaatctgagactggatctccaataaagtcatcttctggtaaaatggacgaaatcaaacatgtggaggaagaatcagagaaggaattgaaagatgatggtgagtatctgatcagaccttatctggaacatcttgaaaagattaggttccgatataactgtgagagagttgttggtttggacaaacatgatgggatcttcttaataggggaactttgcctatatgtgatagagaacttttacattgatgatcatgggtgtatctgtgagaaggaatgtgaagacgagctatccattattgatcaggcacaaggtttgaaaaaacaatttcatggaagcttggaatccaagtccaagtctagcacattgtggagtacaacaataaaaatcggtgctgtagggggaagagcatgggcatatggtggtggagcttggggaaaggaaaaagtgcgtgtgactggtaacttgccacatccttggcatatgtggaagctggatagtgttcatgagattctaaaacgtgattacgagctgcgtcgagttgctgttgagatatttagcatggatggatgtaatgatctccttgtgttccacaagaaagaaagggaagaagtcttcaggaatctccttgccatgaatcttccaaggaacagcatgtatggcatcttgttgcgtttcatatcaattttttttggcgctctcagcatattccccattttccccatttttctctagtcatgaataaacatgtctcgttaagctccagagctgagcattatatagctcagtcgtccatgaggcccttcctaaatctatgaatgtgttgtttattctgtttgtttttcttttcaggctcgatacacccatatcaggatcagcgaaacaggaaagcaaagagggtagccgtcttttcggattgatggcaaagtcattcacgaaaagatggcaaaatggggagatcagcaatttacaatacctaatgcatctcaacacccttgcaggacgtggatacagtgatctcacacagtatccggtatttccgtggattctagcagattatgatggcgagagtcttgatttgtcggatccaaataattttcgcaagcttgacaaaccaatgggttgccagacgcctgaaggagaagaagaatttaggaaacggtttgtgatatgcccttaaacttgatttagagcttttcttgtgtgttcctcaccatacagctttcccttttaattagttatgctttcatcgtgtcgtaatcatattccaagaagtgtttctcatgctttccttctccctttatcatttcagatatgagagctgggatgatccagaggttccacaatttcattacggttctcactattcaagtgctggcattgttttgttttaccttattcgccttccaccgttcagtgctgaaaatcagaagctgcagggtggtcaatttgatcatgctgatcgacttttcaatagtattagagagacttggcttagtgcagctggaaaaggaaatacatcagatgtgaaagaactaattcctgaatttttctacatgcctgaattcttagaaaacagatttaaccttgatttgggtgaaaagcagtcaggggataaggtagcaagttgttctaatggtgcttatgttccttttacttcgctgtttccctttcatgagaaagttccttgtataatgtcaggttggtgatgtaattttacctccttgggctagagggagtgttcgtgaattcatccgcaagcacagagaagctttggagtctgattatgtttcagagaatctgcatcattggatagatctcatctttgggcacaagcagagaggaaaggtacattacatgttctccttttggtagtcaatagaaaaatctaactatcatgtcttagagatgttgcttcttaaaatatcgaatcatgaggctgtttattttcaggctgcagaaaatgctgttaatgttttctaccattacacgtatgaggggattgtggatgtagatgctgttacggatcctgccatgaaagcatccatactagcacagatcaatcattttggacaaacgccgaagcaactattccagaaacctcatgttaaaagaaggacagacagaaaattccctccgcaccctctgaaacactcgatgcatcttgttcctcgcaagatacgtaaatgctcatcatctataaaccaaatcatcactttcaatgataagttgcttcttaccggcgctaactgtctcctgaaacccagaggctataagaaatacataagatggggtttcccagacaggaccttgagatttatgagctatgatcaggacaagctcttatccacccatgaaaatctccatgaaggcaaccagatccagtgcgctggtgttagtcatgacgggcgcattgtggtcactggagcagaagatggtctagtctctgtgtggagagtcagcaaggatggcccccgtggttcacgacgtttacggttagagaaatccctgtgtgcacacacagccaaggtcatttgtctacgtgtaagtcaaccttacatgatgattgcaagcagttcagatgactgtacagttatcatatgggatctcagttctttaagttttgtgaggcagcttccga

SEQ ID NO: 30888 - DNA, 4466 bp, Arabidopsis thaliana landsberg
atcatctacacatcatataccatccaacaattagtaccgattatataacatcatatacacaagagaaaaaaagagaaaagcattaaaagagaggattcgatgcagcagtgacagctgacaacttcagttaagcagaggaaacttgttttgagtatacatcaacttaactccaccaatatcgaaaaatcccactaacagatgttgcaatcaatagcacgatgaagacctatagaataacattcctgagctcctaatcctagtgaatgttaaggtaaatgcatagagtgcatacacatcaaatattcccttgcctccaggttcattccagtgcaggtcccagtacctatacattcatttatattatcgattaacttggcttctcacagaatttgaaggaaaaaaagacttttgttctcctctgaagaaagcagtataactaaaatcatatattaaaacatgattcataccctctgttagtctccttgttacgttcttcgagcacattgtcaataccgttatactttatcccagtgataattccacctggctttgacagtgtaacttggaggatcccattgtccatcacaacctgcaccatttccgtctatagtcaaaacacattcaataaaagacacatgaaagggcacattgtcgactgaggacgttgcattacatatcgatcatggacatgcaggtggacaccatgagaggacatcctgtgatccttcctatgactaagaccacttgtaccttgatctgtcccctctgagcctgatattagtgtaaggaaaaaaatcaacacttttgaatgtagaaaaactaaagagattaatatgagaactcctctttacgcagaatgcagcagcacgagatactcaaagtttcataagtgcttgtgtaaaacaagagttttgaaatggtcatagatataggatctgtagaacaggtcttaaaacaaactgaaaaggcgtttatttccgataatcaagcaaaatggtttatttccgatattcaatcaattgtaactctgtgatcgtttaaagtcccttcctttctggatttatacgtagacccagtgaagggaaatcatctttcagcaaagaaacaaacccaatttgatgaaacaaggaaagaaaaacagtttacagtgtcataaaaaatgaagtaaacaacaaatttaagcttatttactaatccgggctaaaaatacaaactttgctgtcacaatttcgttgagcagcctaaaaaccattctcaagtgagagaaattcaagaggatgaagaaaccatgagaagagaagggtagacgagaaatcacagtggtggccggcgtttaaagcggtttcatgattagtaaaacgatgaaggagccgatcagccagtttcttcatcagtattcgacccaagcgatcaccaccgaagcccagagagagagagagagagagactgcgttagcgtttgttaaagcgcttctgtgccttggtttaggcgcgactgcgtttgtcaactgtcaaggcattgcctttgcgttcagttttaattctcatcaaccaaaccgaatgtaatttgattttagtttggttttaactccaaaaagaaatctgaaatctcttttattgaaatcaaatataaaagcaagtctcatggtgatcagctcaaacaatctttcggggtttctcttgtctgggtaagctttaaaatgtataaacccttccttagaatctgtctgaaggatttgaggcaaatttacagaattacagataaggtacgcctcctctactcaggcttcctctggaagaacaaggatcctattatcacagctattcccgttattgctatcgtgaagaaaagccttttgttcgaaacaccgttcccatctcttcttcttctaccgtttccatctccttctgctgctctcgggatccttctgtacatgacatgagtttagccaaataaaaaaggattaagatctgaatcagagagtttccaaaataaaacaatgcagataagaacatgtacctggatgattcaacggtgccagggcatttggtttcatggttatatctttctctcaatctaacatagctgttgcattgataacagagttctgtccggttgccacatacttcctaatattcggaacatcgagcggatcagaaaatcctttggttggagagaaatggcaaaatatgtgtgcaagtcagaacgaatacctgatgctcggcaagatcaaccgcaggcaatggaaactcacagaactcgcatgttacaatcctcttggggcaaatttctcctttatgactatcgaaaatctcacgttctatggtctctttgcacatcgagcatgctatcttctcaatacagaacagaaagaatatcgtaagaaaatgtaggtcatttcagtcatctagcagcatctagaaccatacaaaaatcctgagtctaaaacagaaacaaaacaaaatgtttgattaaaaaaaaacagaaacaaaataaattcctactaatcttaacctagtaattgaaacagtcacaaccttgcaaacacaagctgcggttgggagagttcttgtcaactagaaaactcaagaacagtatgcaatgacaacacctcaggaacaagcgttgataactagctgtttgtgttacagacttaagttaaggagactaataaatgcataagtgatctaatattttttaattgaaacaagcttaaaacccgttggagggacattaacaaaatatttgagagcagaatcatatcatatgaaacaatgtaaatccctttgatcaacctatttggacgtcacactagacaaagtatataattttgatggagctaacaaagagaagctcttgaaatcaaagatgatagatgtggaaattaatcaaacagaaaacagtttcacaactagtaagaaacagagtaatcagcgtaccggagcatgtgtgttcaagtagtgttcctcagcatgctttttgggtaccatatcaccacaaatcttacatttttctaaatttcgagcacaatgtacacgatgcagatcgatattcagtgatggaatgtctctgtcactgaaaacattaagataatcagtctcatgggatcaaccatccaggtagatgctaccactgaacatacacaagggattagatttactgatcccaaataagaattacggcattcaaaaatttccagcctcagcagactcaacacaacaataactagacaaagcatacacagatatctttagaaagtttagaaactaagcaaacaatcagacaaatcgtagaaagcatgacgataaacagaagacaataaaactcttgtacagacaccaggaagctgatacataatcaatagatttatcatgaaggactttaagcaaagtaacaaaaaagaatcaaccttttagtaggtgaccaaataaaaatgaactcttttagaaaaaaagattgtatatcactaatccatccatcgaatccctagttatacttgtaatcaccgacacaaaccgtggaaccaaactgaatcatacagctcacgagtatctttaatgtgacacatatattctcaattgcaatcaccgatcaattccaaaattgttataacctcgagtccagaatatcgaattacacaagtcatcatcgaacgattacgcaacaaagagaaagcaaccaatcgccgaaaaaaactatgatcaaatagaaacaagtcaacaaccacagacagagaaatcaatggttttaggggggaaacaaaccagtggttgcagacgatggtgatttctccagtcgcagtctccatcgtcaaacgagaaacaaacttctatttcgaagcaaataacagatcagaggagaaccaggacgatcagagacctgaagaaacgaaatttcagaatcacgaattcaaccacggatctttgaacctcgttttctcggattttgagatataagagagagagaagagagaagagagactcaaaattattattagtgaataaaataaagaaaaattgatgaatatggttgaaccaaactctcagattaatgaatcactttttttttttggcgtcaatccaaattgataacccacgctcctctacttccttctcgtgcacgcgccacattacaaatactgtaccttgtttagagtttttgcattacttgtataatctcatattttccactaatttagatatataagcttttttacgtaaacagaataatcccagatactcactcttaccaaattttagtataacagatacatggataaaaaaccattgagtctgtttttgttaacctataggattcgtaaaaaaatccaaaaaaaaagatcaggatcaagtctaaaaacgcacaaaagggaacaaaaatcttcaaaaaaaaaaaaaaaaaactggcaaatttaaaaataccagtaaaaacaatcttaaaagactttaaaaacagggcaaccataa

SEQ ID NO: 30889 - DNA, 1301 bp, Arabidopsis thaliana landsberg
agtcctcttatgtgcactagttagctaacttggactgcattctttcatattatgtgcaataaggtactccaatttgggattaggagaagctagtgagctctcagtccgcttggccaacaaagggtcaaacaaaaagctttgaagagtttccaaacagtaagctacactgcataactgaagctacatggcctagatacagagtgtgtcatatgtctttcggagtttgtatccggagagcgagtcaagcttctttcaagttgcaccatggattccatgtccggtgtatagaaaaatggctcagttcacactcatcttgtcccacctgcaggcactgcctcattcagacttgcaagaagatagttggctgcagtgagacagtatcatcacctaatcaaccacaacaaaacatgcatatagcaccgctaggaccggaatcattataacatgttgaatagacaacaacaatatgaagcaaagtcatatgcaaacgaatcacagccaaagcaaattcgggaccatatatgaatttcaacaatatgcaagtacacaaaacgaattttgattctacataaagcaagagactttgagacctagccctagaacccaaaaccagctcactactttagattttgtatcaaatttcaaaactcactccacagtacttgacttcaacgactccccttcaacacagatacaaagaaatcatgataaagacacaaaagatctaacctttttaagggcaagagcgagagaaatcatgatagaaaattctctgtttggaatttagagagaagccaagacactcttatatgagtatggttcgaagaatggaattggtgaaccaagtcgtcgatgatttggctcttctctcccgatttcatgttcgatacgccggagatcaaatcgattcgaatcgccggccgtcgtacaaaacaaaaaagtgaaaaacgagagaaaaaaggaaaacatgagtgttgtgattttttttgttttccgacgactcacagtcgaccacgtcgccgtctaaaaacccatccaaaaaaacctaatattgggatggatcctaattatttagttgggtttttatttaattttggacttttaattagctagaaacccattagaaacccattaaaaactgccgatggacttgatctaagaagtcttcaacggttttctaaaatctaggatcagagtaagcacgttgcatttccatttttttacactctctctcgtgataaaaaaaattacagaatcacttgcaatgtgtgggaacaaaaaaaaagaacttcaaaacaaaa

SEQ ID NO: 30890 - DNA, 4099 bp, Arabidopsis thaliana landsberg
  unsure (1)..(4099): unsure at all n locations
ctccaattctacaccaaaacatttgttcaagtgtgattctcattgacgaggatttcgatgcaaggattatagattcagggcttgcaaggcttatggttccctcagataacaatgagagtagtttcatgactggtgacttaggagagtttggttatgtagctcctgaatattctaccacaatgctagcatcattaaaaggtgatgtatatggactcggtgttgtcctcttggagttggctacagggctaaaagctgtaggaggtgaaggttttaaagggagtttggtggattgggtgaaacagcttgaaagctcaggtagaatcgctgagacattcgatgaaaacattcgagggaaaggacatgacgaagagatctcgaaatttgttgagattgctcttaactgtgtgagttcaagacctaaagagagatggtcaatgtttcaggcataccagtcactgaaagctattgctgagaaacaaggctattcgttctccgaacaagacgacgacttccctttgattttcgacacgcaagagaacgagaaagtgtgaaaatgaaccttttatgatacgaggaggaagtaagagtataattatttgttgtctatatcatcttgtactacttgtagagacactatatgttattgtaaaaacagaaatgtatatgttatttgttttctcttgtgtcaaagtctttagacatgttatgtgttgcaagtgtgtctttctatagtattggaagagtgacaaaataattttttcacttgtattttcttttaagaacaaaaagaaagtgaacaacaggataaagaagatgtctctgcagaatcttactttaggggtctgcttctcgatacagtcaaaatcaatcccagaaaagaagctaaagaaggcaagaaagaaagagaaagacaagtttttagcatctatggtcactcactccttttgaatttcactttgtaagatgctatcaaaattacacagagaatataagattcccaaagttcacaagaacccaaaaatgaaaatgtatgtgattctaaagttgtgcaaggacaagccttgtattaagatgcaaatatcattggagtgggagaatgatttttgaaaatggagcaactttagtttaatggttttttgctttagccagaggaaacataaaaaagcaaactttaaagttaacagattctaaaacaaaaggcaaataaagaaagatgaggaaaacaggaaacagagagttagataaagacataagcctataataactaaatacaaatgttattacaaaaactcttaagaagtctttaatatcttagcaacaatcttctgaatgattttcaatctttagacacaatgttccaaaacgaaagagagagcagagacttcaccttccaaaattctacagagcaagacttcacaaagctatgagttcatagcatatctctaacatctgaagttaatgattgcctcagaaaaaatagtagcttcttgacgtggaaacgtaattgagaggttgaatacttcactgtgtcttgagacggtagaaaaacccgaaaatgaacgaagcccgcatgacataaacattacagtcaatatcatactcttggtggccgtctcgaagtttctgctttcctgaagaaatagatttgaaacaaaagcttattaaagtagagttctttctgcagtaataaactttaactaaagtggtcaaagttcttcacaagtgcctttaattcttctctaaggctttaaaattagataaagaagaagcttttactaaaacatgataacattgtctgctttcaaaagacgagctctttaatgtacacaaaatgtatagtgacactgaaaagaaggaaagaacaagaattctgcatgctaataatctttttagaaaccagtgattatcggtatctgtgtatacagtgacaacaaaaaaacttgaacagaggaaacactaatattggatgattagtttttgtataaacgaactttaaacaaacttcatgacaaagttctcaaaacgcttgatctctggtagcaaactcaaagaagcaaaagtaaaagattgaaaattcgagagagaagggataagaacctgttgtggataggatcaggtccattaggaacttttcgcttgcttacatgaaacagattcacatccttaccactaaaccgcaaagtcttgacattttctgatgatggaacacttggtgcagagtttgctaagataccgacaagaagaaacacaatcaaacccaaagatgcaatcactccaaccaaagctctaatgccatttccacccatactgaaacctatgtccctacagcttcctgtttaacataaacaactgaccaaccaaacccaagaataaactgagcagaacatccatgatgttggtgaagtgactgtcacataaatagagagagatatctttggacagaagaggctcaaaaaaggggaaagcgaaatgggaagcaaaaaacaagcatttaggttgtttttatataccttggaagacaaatccgtgattggccctatttaaagatgaagcaacacaaagcaacaatatacatacgtaggtgtccacgtagagagagagagaggaggcaagagcaagtgaaagttaagaaaaaacatatctttatgtaacatatgggcccgttgagtacctttttctttgctttgatttgtgaattttcatgcagcaaaccattggggacctcacaagctcccttaactacatatattttaagccattttaaaagcagaggacagggtgcgcgttttgtgactgagtgtattagcaagcctactactttccttaccactatcttaaatcacttggatgtttcctttaaacaataacaaaatcaattaagaatgtaacaatacacaagtaagataaccaaacctgtgaaaaggagctagagcctacaatttttcttccttgttaagtattccctccctaccaaaagccaattagcagcaagaaatgtatgcttgttcttcataacctttaaacgataaactaaagcaaaaacattaagaaacatatctaaactgtgaaaaaaaaagaatctatatctgattgacagctaggnnnnnnnnnnnnnnnnnnnntccatgacacaagcaaacttccttttggccttggtgggaaagaaaagcttgccttctaacatagtaaagccaaagtttgaacagatctggccccacaatttcattactatatatcagtttctcctatatcatttagaatcttacacatggtcaggatagtgtccttatagcattgattctcacagtgattgtgtgagcaaagccatgccagtattgcactctagaggtgtcaagttacatgctctactgaagtgttatgcaccaaagtaaattaaattagaaataaagaaagaatgatttaacacatacctcagttacgtcactttcggtatggttttctttaatacgaagtgattcttacgattgttacggatgtatatgatacatagatatagaaacaatgagtagcatggtggctctctcagaccttaagagcatcaaaagaggccatatgtaatagtaaaaaggagaaactctaactgacttcatatctcaaactgtatacagattacagctatatctctacttcacagacacacacaagccgacatacaccattaccgattttagaactatcataagactgcaacttgtatccagctttagtatttggctacaaacaaaatggcgactgacggacaaaagcacctgcaaaaatttaaactgaggaactaagaatatgtgacatgaagaaacagaactgaaaacaaaatgatcatgtatcacatgacagaagtaaatgctcccagtcaaagcttttgaaatgtaacagccagaggagtagtgaatatatatactcatttacactggaaacacttacactagtattcaaaggttagaaggaactagctcttcagtcacagtctctcttcattgccttaaaccgaaaaaaatggccagatataactgtcgacaatcactgtggctttaagattttcttggcttctgagcccattttggtccatatatagctagat

SEQ ID NO: 30891 - DNA, 3953 bp, Arabidopsis thaliana landsberg
cagtgtaacagatctagaggatctcgtcacatcctcctgcacatcgtctagagagacgagtttagaagagagatctgaaccgtccgtggaatcttcaggtctaagcttgatctgccacgtcatcaaactcgagaagagcgtcgaaggagggaaagtgacacgcgcgtgggtcgcgaggaaggttctcacaccgtctcggaacggcggcaaagtcgtcgactcgccgttgatctccgccgtcgggaaagtagagaaatcgtaaagatcagctgagattctgttgctacgcctcgctcgcttcgtcgcacgaccaccgttcatcaccgccatgactgtgtaacaagggttttttccgacacttaaattaaaactagaataagagttaaagatacagagagagagatttgagatagatacagaggaggggagagagagaaggtgaagaggtttaaggagagagtaattttggcggagagattttccctctcaaaagttttggaggattttagggttttggggggtattgactaaaagcttgacttgaccgcttctgatgggggaaggaaggaaggtagatgctttttattttccttttctctactcaccaatttcgggagagagtgggtccccctgattccaaattcgaggcggtttcgatttctttttctccacgcctttttttgtttttatttgtttccctattttgttcgatttcttttatttcaataagttagctaattaagtccttttttgtcctcaataaaaccaaagctaattaagtcctatccattatccagttccgattgtgacaccttctgttttgtagaaattctaccccaataagatctctcagattcaatgatttttgttttaattaagttataggccaatgatttattagcaaaagtccaaaacaaataaaaacacaccactgacccagttaaaatataagatttctttctatttttttagttaagaaaattacaacataaattattttattttatttttgtcagaaacaacataaattatttattatctattattaataagattaatgtgaataaaatattcgattagttcagcttggattaagcatactcaatagaattattgttattattttactttatagctttagttttccgaaatcggcataatatcccataaattccaggatttaccatttaaaattatctcctttcttgctaaaataaacataaattcatgactcttaattgcaaatttgaccaaaaataaaacccataataacttaatcaccaaggttccaaaactcataaccaaattttccacaccaaaaaaaaaagtcataccaacaactttattactatagccttcccttattcattcaacgacatacttatcaaactaagcaaaagtagctaagtagtaaaacaagctcagacgaagaagcgaaaattagctagaggagtgtctccttcagcacaagctcgatgcacacgagccatccggtcaacggacttacaaatcccgctgcaagaccaatcgaacgacgcagcacatacgttaccagcttgtgctttccattgacaatcaggtggagttccacaacacattgacctctcgtccacatgctccacttctaaccctaacatccatgctcctaacgacacatcctcgttcgcgtaccggtgtagtattcctctgcggatatgtccaccgaatcaaacctcaaaatctgaatacttttacgtatatataacatccttgaatttgaaagcccttactggttagtggagatatatgtagctaagtctttagagattgcgtaaatttgacctgttgcatgcctaaagtatttgttaccttcttctccaaatttccaaaactctggctcgtggtacttcactcctctatacatttccaaaaatccttactttagttcagatttttatccaaaggtttcaaattttttgtaaagaagcttacttttgtgaaagaacaggaccagacttcatgcatccaatgtaaatccttggtcttgattgatatctcgcaagtgttgtaacaagcatacctaaattgacatgaacatcatcatccactttcacgtagaactctgcgtcatacattgcagttgctgttgagaagtacagtcttgtctttgtcgagagttggtgatatccttcaatgtgttttagtcttaagaaatctttatgctctgaatcttcttcatctatggctttatctaatactcctcctggtgttgcactgtgtcctatcacaaacctgtcaaataaaaatccaaactttctctgtttcatatgactgaggtttggttgtttagatttttaaagtagtgaaattgaggatacttgtggcttacttcacaaccttacaacaatccctttctctttctcgattttctttagcttttctcctgttggcatccacgtttgtctcaccgagtcacgtcttttcttgctgctgaatgctgtgttaatgcctatcactgcaaacactttctgcagacggctctggtttttcgccgaccgttcgctccagaactcactgcttctatcgctggtacgtgctgctgctaactccatctccaatgttgacattgttctctccaatgatctaataatataaacacttttagtgttacctcctctgttctaattatgtaaagaaacacaagaaagaataagattttattactttactgcttggtgagttctcgatacttctcctattatgtctctggatttgctttctatcaatttctgaatcaacaaagagtaacacttgttgttagtgagtaatatatatgatgagcatgagcaggtgttaatcaagtagccttacgcgtttatgttcatcgcagtccttttgaatctctaaatgtttggacaaatgctttgtgagatggtgatcttcttcttcaggtatgtaagagcgactcaaagttcgactcatgaacagtgagcctgcaagaaagctggctagacaaagcactattatggctttccccgaagcagctttcgccctcatctccgcgcctccttagtgctaaatctagaaaacatcaaataattgatcatgaattatgaggatgctataaacttcatagttacatagacatatacaacttttctttttctaatataatcaaatctgttttatatgataaaatgccatttgcaggagatttttctgaatcaagaacgttatggactaaggctatacattaaggaactcaaaggttagattcaatttttccacagtttcttacagtaattaggcttcataatcataagaactgataatttgaacaaacttgactctaaagattattgcgtgagaatcaagaacgtacctctctataagcgcatatgagacaccaaaaggactgaattttgagattaagaaacaagtcttgaatgttgaggagatgttatttatataaaatgaaaacaagaatgtagttgcagaacggcaatggcgtttatgttttgcttctctctctcaatctgactgtcttgtcatgcaatgtacatgtcccaactaactatttccatatagtatagatattacgaaacaaaaggagaaatcccacaaaaactatagttttggttttgtttttgctttcctttatttcgcaacattttaggttcttcacctgtgtgaatgcgcttagcgcgctgctctcataacacatgacaagttcttgatcagaaacctaaaactgcgtgaatgtggtatgaatgtaacctgacgttgcagcatatgttatatatgtacatactattgtagaattattacatgaaacaattctcttctcaagtttcaagtgatctcctacaaactaacctggcatgcaaaagctatgttttgcactgccatttgcatttcacttataattcctagtgaaagcgaaacacatgtctaccaaatttggttcagcctta

SEQ ID NO: 30892 - DNA, 2982 bp, Arabidopsis thaliana landsberg
tatgagattctcagtgtcactaaactaatataggtcttgtcgttttttcatcttttaaaatcctacaggtgaggtgccaggtggaccttttgtaagtctccctagggaagtacaagaagtggctctctgtttcctttactacttcatcatagacaatttcagctcccctatgctgaaagcaatagtttcatgctgtttatgtgagtatctcacatttcttgatgactcaactttataaaagttgatgacagaatgatgaccaaataccgtataatgcagatgaacaacttgaaccagctgtgttgtatcggatagtggaaattcttcaaactgcctatagagctggatatattcagattacagatcattttagcttcttcattaccttgatttcacgtttcaaagttgtcccaggtcttgtctggaatctgcaagttttctattgaacttttggttatgagcttatttgagagatgatcatgcttttaggctttgtgatagcttaccttatgcctataaattcatgcagagaaactgaactcgtcgattgagtgtgatgagaggaaggcaaattgtggcacatttaaaacacttacaaaccttgtgtgctcatatttgtcagaaatgggtgatagctctcttgtcctccatattctagagaaagtttttgtcgaacaaatagtaagtttgtgaagacatattaacattcttatataataggatggtaaatacttaatgagatgtttcctcttggttgcagattttgaagcctgcgttggacaatgggtgtgctatactcaggatgatctgcgcgttagactctaaacctacaagactttctgaaatcagtgtaaccactctaagtgaattcttaccgggatatttgatcgatatagtcaatgtgagcacttgcctgttaaatactttaccgggatatttgatccatataatcaatgtgatcgattgacacaatctgtttccgctcttcttcttgcagtgtataccagaagataaagagagatcttacctttatatgcaaacatgtctctactatttattaccttgctacttcctgttcgaccggagctccaaactcacagaacaggttctgaaaagaatgcgatctatggttagtgaaaatgtaaaagcattggaatcggttcaagacagggagagtggtcgagactcattgaatttgatacaatgcattgtctctgtgatcctgctgatgcacaacgatgtcaaagttaggaagataatatcatcatccaagtcagagattgatttgattctgcagaacgtttacacattgcaggtatcattttctactctcttaacgttatcgcaaactgcaaaaccacgagctgatgagttttacctcgtaaatgtgcagtcctcacgaagcacgagcttgactgtagaaggaaagcatatgatgaaaattgcagcagagcgacttagcattgcatccaatagcttactcgcataataagttacacaactgtgacatagaatgatttgtgcactctttaacaaggatgctaagaagatatgacttttctttgcttgtttgggaaagcaacaattttgatggaaaattttgtagacttacatgtgccactttacttgatcaaaagcatatgaattgctcaaataattatataagttaagaatccaaaagaagattgtataataaggaatcattttttgtacactcaaaacagcaaatttgagattttttaccttaatggcacaataagagcggccacaacagagaaagctttctctcacaatatacaaaacaacaaatatttgtctccttcctttttaaactctttacaaaactggtgtgttcatgtgcctaaactcagtctgcgttttccatctctcgttggtcgctgcggctgtgaatttactgtgttaggaggtctcttgcttggtgctgggatcagcgatggaattaaacttctgccacaagaaatagacaaaagttcccgattatatcagtacattagctgcaaagacttgtaaaaaagtatatatttgttacctagtttctgagagtttagcagttctgggctgaattttctttggtttggggtttgctgagttttggatattagaaactttgggaacattcacttgaacgctcaatcgccacagcaaatcggaatctgagcaatcgcttgttgcggcttcatcagattcgttatctgtaatactctgcacttcgaaatcttgtttcccaccatatctgtcatttgaaagatagtaaagatcaagactaagcatatgtagagagatacatgtaaattattaaaatgtattacatacagtgattgttgttgagggaccattgactggtagaattgctcgggagaatttggattctgattttgaattaattcttcatgcttatcgatccactcgcccgacttagattctctgtcctcgtcttttccattgagtgactgcctcggccaagccggagaagaagatttcattagctcatggatatctaagctgtgtcttcttgaagatgcagtactgtcgttaaaagcctgcaaccgtttcaaagcctatatgtattacatatctacacataatgacataaacttatagattctagttagtttaaatcagcaactttggttgctccttaaagaagccaaagcatacctctggtccacttagatccatgatctggggcctactgttgtttgatgtgtttcccatggtaggtaatttgggtcgaatagtaggagtttcgagtgatcttcttctcgatattctctcacggttgattggtatagctgttggttgtacatcgttaccatttcctttcctcactagagccatcttaagattagcaatctgaaaaccacaagacagtatcagattactgatatgatatacttatggcaagaatgaacgaaaacagcaaatgagtatgcagaacaaccaaagtctagtcaaggtgta

SEQ ID NO: 30893 - DNA, 2825 bp, Arabidopsis thaliana landsberg
  unsure (1)..(2825): unsure at all n locations
taatacaaccaatccacaaagcaaactcaatctagtctagagtcatttccttaatcaatagctctatatgatgataagtgtttaaacaaagacatagagtgataacaaaacaaacaagtagctatatctggattagaaagtaaatacatacttttcctttttccagatcggatcactctaaacatttcatcttcagcaactggacggacctgtaaaaggacagggcttgaatttaagctttgcccatttgttagagttcaaacactgaaggaatacaaaagcagagagagagatttcacctttggaagagggacctcccatttgccagctttctctttcctcttttgtttaatggtgttgctaagaacctacacccaaaaacacacacttgttaatgtaatgccgtcaccaagttacagaattatagatatctcaacttgaaaagaaaaaacaaacaaaccttggcacgagtggtgtcttcacgatcaagaagataagcaggaacagctccttcctgaacattctcatcagccttacgccttgatgatgactcttcatgcattttcaatctgttatgacaaaaataaaaatcaaaccaatgtaagattctcataaaaccacacctattaacttaggaatatccaatcaattatactacttaacactttcacttaatgatagattctcagagaataagacgaaacacttacgttttcttcatgagagctttctcagcatagtttttcttagcaatcatcttacccttgatacctagagactgcaattagagcaaaagcagaagaagaatcagtaaaaggaagctaaaaatggaagaagacgaaggagaagaaagtaagaaccttttgagccatggtggagtgcttgtgaacttcacgcgcctccttcttgcgctttctctcgaagtggtcgaggcgatatccattcctcttcctgtgcaaatctatgtaatctccctgaggctgtttttcatccaccaatagaagaaaccacagaaattgttagagatcaaaacgctcaagctgttatatctgagaaacgaaagctgtaagaagaaaaaaaaggtactccggcggcggagaacgtaccatggttgcttctaagcgatcagacggtgagataaaaagagagagagacggaaattggacggagagagatactcagagcctgcgagctagggttttataaacgggtcgaatatttgggtcttactaatataatgggctttcttgtcaatattaatgggcttaatcattcttaaaagcccatcacttcagatggtagaataaatgatgactttttcgagaactttgactcttggattagtaactatgtagtttactgcaaaatccaataaaccagagttgtttggtggcgaaatgaatcatatgttgaacatttagccaacccatggtggtgcagtggttttaagatttactggttaggaaagtcgtagttcaaatcttctcgttgcagtttaaaagaaggttggcttctggaaccaagcgttatggatgcttggttaatgtagaaaacctttttcatgtgaagaagcgtatcacagttttgaagatatatgtctttttcacttcaattaaactctaaaccaaaattctacaaaattgtcatcaaaattggtgctttctcaaacaaccaagctaagtcgtatcttttgcatcctttataaagagagcacaaatcattttatgttacagttgtagaacttaattacgcgagtaagcttttggacgcaatcctaagtcgctctcccgcaattttcatcatatgctttccttctacagtcaagctcgtgcttcgtgaggactacacatttaagaggtaaaacttatcagcacatgtgttatgcagtttgcaataatgataagagattggagaaaatgatacctgcaacgtgataacgttctgaagaatcaaatcgatctcgggcttgaatgacgatattatcttcctaactttgacgtcgttgtgcatcagcaggatcacagagataatgcattgtatcatattcaatgagtttcgaccgctctccctgtcttgtaccgattctagcgcttttgtgttttcactaatcattgatcgcattcttatcagaacctgttctgtgagtttggagctccgattgaacaagaaatagcaaggtactaaatagtagagacatgtttgtatgtaaaggtaagagttctccttatcctctggtatacactgcaagaagagcgtaagagatgtgtcaatcccaagattataatgaaacatttaggaccctgcaaagtttttaaaggggaaatgcttacattgactatgttgatcatatatcccggtaagaactcacttagagtggttacactcctttcagaaagtgtggtaggggtagagtccaacacgcagatcatcctgagtatggcacacccattatccaacgcaggcttcaaaacctacaccaagaagaacaaaatctccttaagtatatgcagtgctattaaatgagaatgttattatccatttagatataagcattatcaaaagannnnnnnnnnnnnnnnnnnnnnnaaactttctctacaatctgaaggacaagagaactatcacccatttctgacaaacatgagcacacaagctttgtaacttctttaaatgtgccacaatatgtctcccgttcattacactctatcgatgactgcagtttctctgcatgcacataaagccacaaggtaagctatcacaaaacataaaaaatatgaatatctctcaaataagctcacaccaaaacaaattacaaaaatgtgata

SEQ ID NO: 30894 - DNA, 1295 bp, Arabidopsis thaliana landsberg
  unsure (1)..(1295): unsure at all n locations
acctcttgttgttctccgagttaacacagcagcaaagcatgtttccttcacggttttttgtatttcaaaactgggaatggaaccataagaacatagcaaatgaaatttcgagaaatgagaactcactcatgttaattctgatgtttgttgaaaagatggatgagaggaacaaggcgtaagtagataaagtaaagcataaagagtaatgaagaaaggcattacgaatagtatcaaagttaaaggcttaaactttggtggccctttcatcatttcaatgtttattatagattatcaatagatctttttcttatgtctttatagtttgtacctttaaacctttctcttgaatacaagaataattagaggcaaaggttaaaggaaacactaaagcttcagcttcaacattgaaatatatatacatgagtaggctaagatgaaaatgtgatgacaagtttgtatcgaataataatacaggcccctcaaagcaagtaaagaagagttaaatcttatctctaccttttccataatgaactttttccctctcctaaactttatnnnnnnnnnnnnnnnnnnnnnnnnnnnnnnnnnnnntaccctacgcccaaattgtctccacgttgacgcttcttcattgatgcagcagatatagagctcccatgtgtgatggaagtcagagagctttctactgaacagttggttgtgatgttgtttttgttgtctattgctactgcaagctctgacaatgatggcatcatcatcatctttgttgcatcgaagtacgggactgatgttccttgagagctattggagactttgatggctagctctgatagctcttccctagcagcctcaagtccagcaaaagtagcagcttgctcgtcaaaggccttgcaagctttttcaagaatcgattgcaggtattttccttgtgcctctatcctcagctggagcctccgttgcacctgcccatactaaaagaccaatcaaacgtttgcactttaacagcacagcctgttgcataaactcctacaaaagtggtcattgtttcaatctcaagggcgtgtttattcattccacctaggtagagatccaggacagatgttcatatgtacatcagtaaaagaacgaataatttggtagcaactccatcctaatttctggattggacatttacttttgagtcaaactttttgtaaacatggtggtttgtatcttcaatatcaatgaaaagagaaatgaagagacctaacctccaattgatcgtgtagtcttctttggacttccatctgagcacg

SEQ ID NO: 30895 - DNA, 2569 bp, Arabidopsis thaliana landsberg
aggtccgtccgccgtaaaaaaaaaaaagacatgatcttgtccgtccgatcaaatatttcttaatgtacagatatacccttgtagcttaagagttatctgttttcagtctttgaccaaattaaatgctctttctccgaaccgaaaacacctaataaccggaactcatgaaccgaaaatcaaagtcaggttggttacaaacaattcaattacacagcacaaaatctggattacaaaagagttttcacacgcatatgatctcgtctttattttcaaacagaagcaacgaaaatgtttccccgggaaaaacaagttgaatgaagcagagactgttgtagaatggttcagcggtagagactctccgacctcagattctcagcaatctctgtctcccatcgatctccattctcaagaagcttctctttgtcatagagaagttcctatcatagagaatataacaaaaatttcaataagcatgcctcgaaaattattagggtctagaaaatgtgaaaaacagacctcgtgtgtctcggttgcgaattcaaagttaggtccttcaacgattgcatcaacggggcaagcttcttggcagaaaccacagtagatgcattttgtcatgtcgatatcgtacctgtacgatacagctcaaatcatcatgaaagggtaataaagaaagcagatggttgataaatgagaactaaagggatgatgacctagtggttctgcggcttccatcttccctctcttctgcctctattgtgattgcttgagctggacatacctgatgaaaaggacaagtatccctcacaagaattacaatccgtggtgaacttttatacacactaaatagatcattgtcagctaatatgaccatttcatcagaactctagagactaaacagtaaatattactcatactcaaatagctttcctaattactaagatgaatttgatagactcagagtaccatatcagaacaaagagaacgttaaattaaatgaaggattcatatcgatctcaaaactcacagcttcacagagtttgcaggcaatgcagcgttcttccccggtaggatatcttcgaagagcatgttcaccacggaagcgagggctcagaggacccttctcaaatggataattgatctgcatacacgatagagcttcagtaacacagatttctttcaatctaagtttggaagactagaaaagatatcactcacagtaacttttggatcaaagaagtacttgagggtcagcgacaaaccgcggttcatttctgtgaggaacagggtgtttatgctccgttcaaagactacaaatttgagaatatcaggaatcactaatactcggggaggaaaacaccaaggaagatagacgtacaagaaaagaagaaaggagaaaaaaagtaaaattgtctagatcatatggattaccagtattccagtccttggagatttccttagaaagttgctctgcttcttcatcatctgaatattacatacgcaaaccataagtcatatatgaatcagaatctcgtaatacaagttggaaaaggggtagattcacaattaaacctgatttaccaaagaaaaccaaacaagagcagaaaatatacctttgttgctgccataagatataccacgggactgcagtctagacagatgagatccctgtaaagcttgccctgacaaaacctatcaatgtcgagaagtaatcagagaggtcttcagaacatacacaccatatcaagctaatgaaaggattaaagctcgcaaaaaaaaacaaaaaaaaattgacttgcgaaaaggctttcgtcacaaaaattaaatgcgaaaaagaataaggaaaccataagtaaaacgaaagcccttaagatgaaccatgatcaaattcaaatctccctacatgatttcatcgatcagctagataaaatccagaatctcgtcgacacaaaagaaaacacagagagtgaatagaatcatcttaagctcccaaaactccaggagacattcccatttctaggcattcaaataactctaactaaaggacacaaaatgaagaaataacaagagcgaacaagattcatacgagatgtcgagcacggagagtattcagtgacctgcgagccaaaatcgaagccattgatggagcacccaaattccgatttaggttccttccttcttcactgcgattgatgagcaaacctgaacttccgattaaaatcaataaagagccctaaaatcctattttgtcctttgagttgaagatattattacaatttggtccctggtacaatagtttttggttttccaaaccgccgatagaaccggattttgaattaaacagattctttccttaaccgaaaataaacagagatacacacaataaccagttagttacaaagtgctaaaacttatttagctgagaatcgttattgcatacaccattggtgatggaaaattctttacaaagcaagattgtgaaaatatctcaatcgaagttggtagaccggtgatttggagcaatgtgataagagtctgcacaattaatgtgagattgcatcaacggatttca

SEQ ID NO: 30896 - DNA, 4758 bp, Arabidopsis thaliana landsberg
gaagagcaaccgtagcttggttgtaaacatctttctccatctggttagttttcatgggcaaagctttgtaacccacaagaactgtttgaacgtcatacagggcttgaaagaactgatcagcttcagacagaccagcttcaaacatcgtcgactggtttgtctcccaactgcggattctcttcacagcttctttgaatctcttcttgatctcagagaatcctgcatcttcaactttggtatcagcaatcccaaatgttgacaaatgcatctctaggtcacttaggagctttctcaaattggcatccaggttgttatcagatgccctcagtgccttaacaacatggtgacatgcctcaaagacatgattgttcattccggaaacaggaaccttggaatcaaactctgccataacccaaaccaaagactagagcctaaactcaacttaaatttgactagacaactaaatacacacggcagaagagagaaaagtctaaagtgtttcccggtgaaagcacaaatgtaaactaagggatgttatataaagtgattactaggtaagcttaactccaagaactatactttgaaaaaatctcaagtcatctcggaatgaagtaaacagagaggaagagaaatccccacatgaacatagtaaaaaccattactacttaagcttaatccagttgacatacttatggtaaaaaatcagtgaagcattcttcaaatctaacatttttcctcatactataagctcccacacaacaccccaaactataagctcccacttatggtaccatactataagctcccacttatggtaccatactataagctcccacacaacaccccaaaaaaaaaatcaagtccacggctttcccaaaaaaacttcttgtttctgtaaaaaaggagaaattttgatgtttataagaaagtgatatgttatttgatttcacagaaacattttatcatacactcggtgatcgaacagagtaaacgtaccgtgaaacgggaagaagaagaagaaaaaaaaaaaatccaggaaagaagagattatgattttgataactgtgtgatcaaagtctcaaagaacagatttttagaagcaagagcaagagagtttcagcgagattattggggaagaagaagggaaagaagaaaagttgtggtgcacgtaaactgtatttataaaaacaaagttgaaaaatggaattagtattccaacgaaggcgatcccgtaatttcgtagattacgaaaggtttagaaaatgataaatttttgggccgccccgaatctaattgagattgattcgtccattgacttccccatatggcgggacgaaaaccatggggatggtaagtctaattaacttaaatttgggggtcaaaatgtaattaataaacttcgaaatgaatttaatttgtttcaattacttttacgaatttgaacattttatgttctatctcttgtcttgatttttgataatgttgtcgtcagagataatcgaatttcattaaacacattttatggtggatttttttagagctattggatacaatagggataaaagtattatgtttttggaaaataaggggtacaataataaattagtgtaataaacgttgatgttgattagtcaatacttgaagtttgactggctcgcaatgtattgatctgaaccgtccgattatatttgtacggctcacactagtagttgacagctcatatcaagtaaggacctcagcaagtttttttttcccaagtcaagaagtataaattttctctttatataaattaaaattttaaatgtttgcctcacgcaatgcgtagaattatttttttcaattgtcaaaaacattcagagaaaaaaaaaagtcaaaaacattaaagattgttgatattgtttaatctggaattggtgtttgattttgatcctggggattttgtatttaatctttttctgaaataataatatcgtatgtgttctttaagaaacaaaaaaattgtatttgttggaaataaattttagatatttatgaatcataacgtgtgatacggtggattcaagacccacacataaaaacaaaaccataaactatgggcctgaagtgaaaggcttttgtaacacagtttctttcgcatacaaagtccattatcaaacaaaacaaaatgcgccaaaaaaatggaaagatactgaaaagaagcggtaagagttttttgccaaaaaaatagaaattgaaatcggcgggggaacaattaatcgaatttaatagctcccgcttaaagctctctcctttacaaaaaccctagtacctctctatcattcttgtcactatctcacggcttttagttttcaccattctgattaaagagaaaccaaacgtttcatttttcaatatctagagagaaagatgcagacttcggtgaccccagatgccatctccaccgttttgtcaaacccatcctttgattcgtcttccgatcgatctgagatcgttgttcaagttgtggatcttaaacctatcggcaatcgctatacgtaagtttccttggcttttcatgatctgggttttacttgatttcttaaatctcgcttgttccagctttaggtcagtgttatattctctcaatcacaattgtatagctagattatgatatgcaacgactttgatgactctatgatagaagagatctgggtttgttgataatagtttgtatattgcctagtttgggttttagttaccgattttgttctgatggatctgttttgattttggttgacacatttagtgcaaatgaccgaaagactaaagtcaaagcaatgtttactgcttcactcacacctgacatcatttatgggaacatccagaacttgggtttaattcgtctcattgatttcactgttaacgacatttcaagcaaatctacaaagtaagacttctcttttgcttcttctttacatggataatcactctggttcgattcttgaaatcaacagttactaacatgtgtgtttctctattgtctctgtgtcagatatttccttgtgactaaatgtgaggctgttggttctgtgcttgattctgagattaacttggacagtaagagcggagaggaggaggctcgtgagcccaagaagcagaaactagagcattctcctgtcagtcctctgaatgatgttgtttctactggtatcacattgaaaccgaagcaggaatttgtagccaaatcagcttctcagataatgagtgaacaaaggggaaagtaagcaaattatcttttttgatcttcaatgtttcattactgtctctgtcaaatggttattttattagtgttttgcttaaattcgtttggattttgacagtgctgcactagctgcaagaatggccatgactagaagggttcatccacttgtgtcattaaatccatatcaaggaaactggaccatcaaagtccgagttacaaacaagggagtgatgagaaattacaaaaacgctaggggtgaaggatgtgtcttcaatgttgaactaacagatgaagaagtaagaaagctccttactatctctcaaacttggtatagacaacctttatgcggtttctcattttgtttatttggctgttatccagggaacacaaattcaagcaacgatgtttaatgatgctgcaaggaagttttttgacagattccagttgggaaaggtttattatatatcaagggggtcactaaaactcgctaacaagcagttcaaaacagttcagaatgattatgagatgacactgaatgaaaattcagaggttgaggaagctagtagcgaagaaatgttcatccctgagacaaaattcaacttcgtacccattgaagagttgggtctgtatgttaatcagaaggaacttattggtaagagccttattgtcattgaacattctttttccaggtaaattatacattggttgtgataataacttaattgttatgctatttcagatcttattggagttgttcaaagtgtatctcctaccatgagtattagaaggagaactgacaatgagatgattcctaagagggatataactttggctgatgagtcaaggaaaactgttgtggtgtccctgtggaatgatcttgcaactggcataggtcaggagctactagacatggctgatcagtcacctgtgattgcaatcaagtctctcaaagttggagattttcaaggtatgatgtatttggtattattgaacagtatggataaatcacacttgtttgaaccttttgctcatagaatccaatctctccaggtgtttcgttgtctaccatcagcagaagcaatgtggttattaacccggaatcaccagaagctaaaaagttgaaatcttggtatgccttttggactgagccagctgataaaataaaatgatgaaacttgtctctgttattcaattaccattctctttgacattggcaggtttgattctgaaggcaaggaaatatccatgtcttctattggctcagggatgagcccttctgccaaaaatggatctcggtctttgtatactgaccgagtgcttctctctcacatcacaagcaatccatctttattcgaagaaaaggtactaaacactgaaattcaaatcctgaaccaaaagtgcttaattatagagttatgaacttattatgaacttggattttctggatcagcctgtatttttcagcactagggcttacataagcttcatcaaaccagaccaaacaatgtggtaccaag

SEQ ID NO: 30897 - DNA, 2589 bp, Arabidopsis thaliana landsberg
cgcgaggagcttccacgtgtcactacacgaatcttgtttagtaaaaagcgcagctgcaaaaaaaatcgagtagagaagaagtaggcagacaaagaagaagaagaagaagttctcggcgtgcttcaatggcgatatcagtagcagcttcgtcctctatggccgtgatggttccacgtgttcccgccgtatccacccgttgctccgccgtcccttatcttcctcctcgctcctttggccgatcctctttcaccgttccgttgaagcttgtttcaggtgacggatttatttacataatctctctttctgggttcaatggaatctatacattcccgagaaattgtctgaattgtcacaaattgcctcaaattagaatattccggtccgaaatcgaaattttagcgatgtaccggttcggttagtggtaaaatttacaaatttcggttgattgagacggaatctaaaccaaaacatttgattctccggttcaaattgcagggaatggattgcaaaaagttgaattgttgaagacaagagcttcttcagaagagaccttgttccttggtaccaacgaactcatcacagatttgaaggaaaaggtgaaccatttatcgaagaaaaaaccgagttggtttggtttggctttgtgtgttctgttttgattgttggtttttttttccggtgcagtgggatggtcttgagaacaaatctactgtacttatatatggaggaggagccattgttgctgtttggttatcttccattgttgttggtgccatcaactctgttcctctggtaacaacactctctatataattcttttgagattagaaaatgtgtaatgagtttgagttaaagtgatgtttccatttcttgtgtttgtagcttccgaaagttatggaacttgtcggtctcgggtacactggatggtttgtctacagataccttctcttcaaggtaacaaaactatactatttttggattcttgtgaatctataaagcatcaatgatctgacatgaaatgatcatcttgttacagtcaagcagaaaggaattggctgaggatattgaatccttgaagaagaagatcgcaggaagcgaatagattcattttcaaataaaaccagctttctctctgtatgttttcctgtaatatcgtgttatattatacaatgtctctgtttcaacattgtatctgttgcatctgaaactattatcttggatccacacttagtttcaggaggcacatacttcaaaatgaacttaataaaagacaaagatgatcaaaacatgcatgaaaaatattttacattatatggaattgttgaatttcatgattgcttcagatgcacgcaacctaaaccaatagaaacaaggctgcaattaaagagattcaaatgatatggccggctctaaaggcggatggagagatcagcccggagatgaagaacatcattgatgaagtagggacaattcttggctgtgaaaatatcccatggtatacctaacaagtttctgcatccaacagctttacctctagtgaacgtatagattcctttgaattttcccacaaattccatcgttggcttcgacctcactgaaaaatcgtagtccacagtcacgctcgcactcgctgacccgttttcttgcatcccaataaacaatccgaaacaatggattaaacaaagatggtccatgttgcattgagctgaaagaaagaacccttgtcctcctaaggtaaactgttgagatgatatcctgcttgatggatagatgctttcacattctttgcgttttaagtccaaatatatgatgcattggggccgaggaaccgcaaattccacaattttgatgggtctgtgtacataggctcgtttagcaaaccggcggctggttgaggcaggttgttcatgggctagtagaacgtgttggtgagccaacgattctgttttgaagaagagagcttcaacaacaagttttgatgccacagaaggtctaaagtcgtttgaggtcaatattttcttgagtctgtcagttgtcatgtgagggaaacgtatatagcgagcgagatgagagcctagtacttcttggcgtgcttctagaactgagtaatgtgattttacccatttcaaaacaacttcatatacaacgtcttcagattggatctctagaccatcactcgctagtatcgcctcgatacctactaacggtaaagccatcaactcctccattgtaatcctatcaaaacgttttttaaaatgtaagaatgaatgatattttttatgctttgaaaagtttaatggaaacaaagagaagttacttggacatattcttgtaacgagaggctatgaattgccttgcagcattggttaaaggcttcactgaatcagccattagcaaacttgaaggaagatcaagaagaagcaatgaagattctaatgtcataggcattttgagcaacaattggctgcaatacttcatacatgaagcaacctcaaacttgtcggccaccattaacacatcgagtaaagcaaatgacgcagtgactgatagtgaattgctatacatgaatttcaagagctccattacagc

SEQ ID NO: 30898 - DNA, 5078 bp, Arabidopsis thaliana landsberg
  unsure (1)..(5078): unsure at all n locations
accccgccgtagaactgctttagagatcgtgagcacctgtagttcttctttaacgaatgaggagttcatcactacggcgaactctctttcccgtccggtgaagagaacgttgaaggactttgcgcgaagaaaaacggtagccggagaaagaattagggtttaagcagctcgcttttataccttgtctttttttttcaattggtaccaaattttaagacgtaccaaattaagcgtttgcgtttgcgtctgcgtttgagatccaaatatttaagcccattaactatataattggcccataataattatgaagcaatcgcaaccgtccatctaatgaaaaagacctagactcgtcctctttcgcacgctaacacgtgttcaacattcgccacttgcatcttcacacgtaccaatattcgattccacacgtgtacaacattcccttctctctctgttatttcatctctagaaaagggcacaaaaaaccaaactttacgatttctcctctctggaatctcgattctgtatgatctcttcgatctaatcgagtcttctaaacgttccgtgtagaatttcaaatctagggtttgctaaagcttgaacctttcttacccttttctctcgaagaggttttgattcctgggcatgaatttttccctaatcttgttaccttcgaagcataacaacaacgaaagatgtcagattcaatccaggaaagatacttagttggatacgcactcgcagccaagaaacagcatagtttcatccaaccttctttgatcgaacactcaaggcaacgaggcattgatctggtcaagcttgatccgacgaaatcgttgttggagcaagggaagcttgattgcataatccacaagctttacgatgtgtattggaaggagaatcttcatgagtttcgcgagaaatgtcctggtgttcctgtaatcgatttgcctgaggctatcgagcgattgcacaatagggtttcgatgcttgaggtgataactcaattgaggtttcctgtttcagatagcgagagatttggtgtcccggagcaagttgttgttatggattcgagcgtcttgagcggtggaggagctttaggggagcttaagtttccggtgattgctaagccgttggatgctgatgggagtgctaaatctcataagatgtttttgatttatgatcaagaagggatgaagattttgaaagctcctattgtgttgcaggagtttgtgaatcatggtggtgtgatctttaaggtctatgtggttggagatcatgtcaaatgtgtaaagagaagatctttacctgatatctctgaagagaagattgggacgtcgaaagggtctcttccgttttcgcagatatcgaatctgactgctcaagaggacaagaacattgagtatggtgaggataggagcttagagaaagtggaaatgcctccgttaagtttcttgacagatctagcaaaggccatgagggaatcaatgggactcaatctctttaacttcgacgtgattagggatgccaaagatgctaataggtaccttataattgatattaactactttcctggatatgctaagatgccctcttacgagcctgtgttgactgagttcttctgggacatggtcactaagaagaatcatgtctgagaaataatctgttggggagttagcaggaacattgttggggaggatttgtaccattgcaatgtgttgcaactgccattgcaattctggcctatggtgactagctgctttgctaattttcatttggattcttgaacttgtgctttttatatttttttagttgtttctcttttgtttacttcnnnnnnnnnnnnnnnnnnnnnnaaatgcataactgttgctactcttgaaaagcattgaatctctaaattcttggcaatgtggtctgttctcaactgttggtagtttgtgatttcttttcaagcttttatggtgcctgttttcttcctcaaatctgacaagactgagatatttgattaagcattggtataagttgattagtaaccttcacttggcaatgcttttccattctctatattatgaactgtttatgtgaaaccggtgctaagtctttgtatcggatttctaagacatggagatggtttgcaagatatctccagttacttgtatcttcgtcctgtgctttcttgtctctgcattcttggtgcttaagtatatggttcttgtttgaatcatcttgagtaaggtatgtgattgtcctaacttcaaaatgaatctagtttttaccattttgcagtttcacatttagattccaagatcctgagaaattagatatttagattgctcacataagcttctctatagataaaatgaatctagaaacatttctcacatcttggcgtttctcatttcaagagtctttgtggatatgtccttgtttcacaccgctgcttaagcttctcaagcatcttatacgctctgatttgatgtgttgcatcatatgcatatatcctcctacacttatatggatgtatatattctaattggggtttggcatttatgctttaacaacttggatggagctgataagatgattctggacaaattttatattctttataatctccatgttcgaacaaattttttttaatattaaactgattttatatcctcacggaactaacaccgaaattatcatagaaccagagaaaatagtgatggatgattcgatgttttaattagattcggcaacatgtagctttcgaaaagcccatgagcttttgggttcctgctatggaaagccatcaacccataaaagaatataatccaacttcaagttcctcacggctcaatatggatctatctttttcacttgcttatttttttttttacacactttctcaaaaaagtctacatagtccttctcataatatggacttgtaccgtagagaaggtgaatcaaagacttaattacgttatatttgacatggaagtcttcgttttaaccaactatattcatctttagttttatccctaacctaaaagtacatacgtaaggttctacgacttaattagttttatcccaaaccactgcaacattcattgtatatacgtaactttttcaagtaaaagtttaagttttctctggatatcgcatgttttatgtttataaacattagttttgttctacaaagttgacgcaccatcttactaactaattgaattactaagctttaggtttctaaatatttttgcatagcaatgtaacgtgcaaatcattgtagtttggtctttttcaagatgttaggtttgactcatacacaagaagataatatatactgtcaggtaattatcatcagaaacgggtcatactgttacataccggagtttgatgtatattgtatagaatcaaagtttacttgatctcttcaatatgtgacgtgtttaagtacttcgtggtgttggtttgtgaattttggagaaattcaagtacttaagcaaattttgtcctttaatagtttttagtgaatctcaatttgaacattatatagaatagatgtctcgattttttgtgtgctgttgaagtttgggtttgcgtaaaaacaaccatcataatatgaaaacgcaaaacaaaaataaattgactaaaaattgttgctcatctaaaacataatatgagttatgagagataattttcgaagatatatattgttcaagaaattagaagatgcattattcaatcaaagattatgtcctaaataaagccgtaagggtaggatgagctataagcgtttggttagaggaagatcaactgtagcattgttgtctccttcggattagttggaaacttcttccgtacgaatatttcatctgtcttctaaaaaaaaatattgttattattagaaaattttgatagattccaattatttcttaagatatgtttaaattttattttgatcaattaatgtaaataaattaaataacgacccacaaaccaaaaatttacaaggtaaagacccgttttcggtgggctggtttcttagccgatcatgtgttcgctgggtccgtggtttcgcgtatcgatttgatggggagttttatctcagtcttatcgtacgccttatttccggatatcacaaaaagttttacaaggtgaaaacatatataatctaaaaatatatatactaatgtggtcgttgtgtcattaaaattcaaatccgataaaacgcatgtctttgataaaactaaaaagaaaagagcttcacaagttatttattcgatggctttaatggatcaattaacgtcaacgtcgaagcaatgaaaatgattctatggaccaattaacgtcaacgtagaagcatctaaaaagcgattaaataagaattagtttagtcgttaaaagaattagggttttcgcgggtcccacgggatagggttgcgtgccttgatgtgcttaaaactaaatttacaccaataatcaaccaccatatcgagacgacagatttattttcttagaaatgactactatatacttgatatatatagtactgcatgcgggggtgcatatactatgtcaatgacttagtagtaaaacaaaattcttatcaaaactaataaaggggtcattaagctcatttcaaatagaatgtaagaatataaaatgatatgattcatctaaacctttttctcatgatgattcatgcaaacaatagctctgcattggaatcgcagtttttctagctttaaaataaaattcagatgtattatatatgtatattccctctttgccaactgttttattgatcgtaacacgataatatataatgatgaaaacaattgacttcaatatagtttttgtttatacgtattatagatgggatgtggcatgctgtggatcatttgttgaccaatcaccagtaattcatactgttatgcacactgtttcatacaaaatgttatatatatcaaatactatatacacaattaaattatttaacgtctccacgtggaaaacttgttggtacaaataggttcgctgtatatatatttttttaaagggagatgtcaaaattatactgggaaatcatc

SEQ ID NO: 30899 - DNA, 1091 bp, Arabidopsis thaliana landsberg
gcgcgtggcacacgacgacgtactcatatcacgtgttcaccacacagtgaccatctagagtctaattaggtaataaacctatgaaaataaagtaatatacaaactcgtcataatcaatcttatccacttaaattgggcctggcccatattagttctgcaactgtcatttatttaagtttggggtttctcgtacggaacaaactcccatttgcgtctctcttcttcttgctcctttctcttctctctcacgcgttgctgttgttgactcttatttctctctgggtttccttaaaccttccgctacaatcttctcctcttacatgcgagcttctccgattctcaggttttgatagcggcttaatactcgcaattatggatttcgcagccaagaaattcatcaacaaccccaacggttcgttcttcttcgtcttcctccttccttttttttcttgcgtttctctgttattcgcatccccggcattttactttctccggcgtagattaggtcgattagaattgtgaacgctctggcgaactgttgacctatgttaattttgtttcccgattgtgttactgtttgcgaaatgatttgcattgcgagtctcttgctcataaaattcgccttggtctatttatccacattttccccccaattttgttctggatcctcgaaaatctgcttcgtcaccgttgtgtttcgttgcatggtcaagacgatgtcatgattttaatggcatagggtataatttccgcatggaattgcaattaacatcctcttggtagagaactagcggcttgtgactcttgtattaagagaattgatggaataaagaatggtttccgttttgcagatgttgtaactgagttcatagagggtctggtagaaacttatcctggactccagtatttggatggttttcctgaggttaaggtggtgctaccagctgatgtctcggctgcaaaatatgacaaggttgccgttgtctcaggtaagagttttgtgactgattattacgtggttggtgtagagttctgaaactcttataagcaatgccgctttcgtttgcaggtggaggcagtgggcatgagcc

SEQ ID NO: 30900 - DNA, 3899 bp, Arabidopsis thaliana landsberg
atataaaactatgaactacaatgggaatatccacatgacggtgagaattaactacaccgacctcattataaaaacttcttgagaaaattctctgagcatctcattgtttacacgatcaggcttgagaaatttgatagctacttcctgactgcaataagtgcctctatgcctgcgtagtcatcaaaaacaaattactcttaacttttatatagaaacttacagttttcaaaacgagcttacataacgataatactcacagatccccatatgaaccagatgccactttcttttcaattttgagctgtgtcacgtcaatttcccactcatcagttccatccgtgggtatttcaatgcaggcgggtataagctcattgcttgatttgtcatgctcaaagaaagaaatagacttctgttttgaaccaggttgatcctgtagaacagccagcagaaaataaaaggagattacaactgtcaaatttttgaagtacaaaaagcaacaaaacatagcaagaagtataacactaagttagggcattgcatcctccaaattcatagtgagaaaataccttaagcttcagtatttctttgctcaatgcatcttttaggccatctgtttcctataatatcaaagtccattctcagttagtgataacagagacagaaaggaattcaagatctcgttaagtcactctcgaaaagttaaaatcaccatacctcctgagaccaaccgtcaactacaaagacatctagagagaaaccatccacagtagaaaaagcatgagcctcttgtatattcagtccaagctcaccaagcagggaagttagctgaaacagaaaacaattttctcactcaactaatcgcagatatggaagaaataccctaccatgatccatcctctacatgacagtgtgtaacgaagcataaactgtggcaatgtttatgcagaaaacagtaatattagactacgaatcaccaacctggctaaggagttttggtttatcgatggttgaaaatgtgatctcgtgcatcggtctgcataaatagacaacaaagcataacataagtgctcatagaattatacttaaacatgagagaagatatgaacaaatacaaaaacacgtactgaacaacataacaagaagtctcaccgagtagacaatgttgcattcacaacactatcaacatcttcaacaattttacttccctgagtaatagcctcaaaatttggagaagaaccaaaagttggaggagcaagaaccctttagacagaaagaaacggcatttgattaaaaaaacagattacaacaatgccataaaaatgttcaagatttatcacaatttactagaactctataccccggtccgcttggttggtgagagctttgagcatcttcctccaccgcagggtcagagtcagcagagattctgggagaaacctgcaagaagaaagagaaaccaattaacacaacaaagcaaaaaaaaaaaattcttacaaaaactttcatgatcttagattacctgtacacttcgaacttcaaagacaggcctagtagcaggatctgcagccaattttagcaatctctgatgtgtgagaacatcttccgctctctcaactttaacatcaagagcatatctgaaacaacatgcaagaataatgccaaacgcaaaactcagaaatcaataacacaccaaagaaacttgattctataaatcgtttctggatcaagacacgtgtagaagaaacgcaaaagattatcaattcatgactcagagagagaaaaaaagatcagtcactgtcgatgaacttagaaacaaaattgaataatctaagcgaaaggaatgaaatttcaagatactactaggccctaaagcaaaatccttatccataaaatcgaatttgatcaaacccaacaaaagaaaagaaaaaaaaacccaaaaccctaaagaatgtagaagattataccgagcaggaagacgattgaaatggagccaaagttgatcctcgaaatcaggaagagtggcttcttcgtaattagattcctgaagtcgctgtaaaacctcactatagacatcgagtttcatccggtaatgtctagggttttcttgtgacggcgaaacaacgacggctctgctaccgcaactctccgactcatctttgatcgtcatcggaaaacaaaaatccacggcggcggatcggtaaacaaaaaaaatgaaatctctcaaaatcagtacaaaagacgaatgatctcagaaagaatgatccaagattccaaacagaaaataatgagagagagagagagaggattcttataaacgcgaggaaaaaaaaaagagagagatttttgggcttagagtgaggagaggaacgttactgtgtgtggtgttacacgtagggaattgccacgtcatcatttgtgtgattctgttttcgtttttgtttatctaaaaattaatttaagatcacgtcataattagtgttttttttagataacactaatgatgggattttattgtattttttaaattgatactatgatagataggttcaattaatgtgtacatttaataaaaaggaagaagaataggcttaaattgcttttaaattttttaagaagtagttgaaattaaattaaatcgattggttcaatatgtcaactataccactcaacacaatgaccatacttgtattactttttgtcgaatagtaaaacaatgggaatatcataatcatcccagctacttggagctcaaaattttgaatctatctcttgtaacagttgtaaatctttttatatagtgtgtgtcgttgttgattagtaatattataaacaaaaagagttttctttctcatccgttaggttaggtcaaacatattcttttggaagcaatggccaatggatatttattggtgtaacacaatcttgacctaaaccaatggtgttgttaataggagtctaaatagttaggaaaaatgctttgtgtgacattttctaattatgcaattaagaatcaagcaaaaccaaacataactagtgttagaagaaatgaggaagtttgaaagaattttccataccagctgaggagatacgaaaaagaaaagaagttttgattagtaaattaaataacttggtatcaatgcagtatagagtttaatgttttaataattattaatcaaaaaagccgtatcaaaaatggtattttcaaatttttttgtactactatattttatctagaggtatcaagcggatcagaaggtataaaataatcattgaaaaaaaattgtcattattttttatcactttcaaactattttgagggtatactgctcgtagataatcggatactccataggaagatagtcgatcaaccgatcttcttatggaaggattgttaccaatgttcgattctctcagtatccttttctattcggctcagacgaacctacattacgaagaatgaaagaaaatttttgaaaaacaaagagctcgagttaccacaaaattcgataatacaatatgcaaatttaaatttagatagtaacacgtctgctagattagcatagaaatattacatatcttgatatagttttcatctacaaatatatatgtttttttttcttcatagtggagtttctttattagaaataaatgcaaaaatgagtatcatttggttagaagattcaatgaatgataattctactatttttatgttaacttattaatatgtttttgaattgaatgtgttgttaataatcccccttgcaaaatataagtggtccatgagcatattaatatttacaatatcgctgcgtgttgtaagtttataatactaataacacagttagcggattagatttgtcgatgatacccgacatcattaatgtcaacttcaacccagt

SEQ ID NO: 30901 - DNA, 503 bp, Arabidopsis thaliana landsberg
aacctatattacctcttttatcattatggacaatcttatctcatttgagttatgcttgatctcttactaatttagtaacatcgtttttgctcatccagatccgtccattgtggagacattacttccagaacacacagggacttatctttgttgtggacagcaacgacatgtgaaaggttatcagaagctcgaaacgagctgtatcgcatactaaccgatgtaaaattcatatgaaactttaaaatgttacttattgactcctcttttatttttttaaccctaacaactttctttattggtaaaaaaaatgcacagaatgaactagaaggtgcatgtgtacttgtctttgcgaacaagcaagattggagaaatgctttacctgtagccgaggttgccaacaaacttggtctacacaggctatctaaacgttgctggtaataatactaaaaacttcctctcgtgttcggtatatatacgtttaaaggttgaggattaacaaaaac

SEQ ID NO: 30902 - DNA, 2188 bp, Arabidopsis thaliana landsberg
tgttatcgaagctaaaataataaaataaatacaaatatttgtaaaagcgagaatttgtgattttttttggcaataagtagagaatagttgtgttccacgattcctcctctcacgttcgaagaccatttcttgttctttggacgaccatcggcgacagtgttaagtctagagtcttcttcttcttcggcgtagttttttccccggtaagtctccgttcatcgccgaatctgtatccctctttctctttttgttgacttgatcgtctctttcgattatgtatctcgcgatcggagtccgtcatctccagatctgtgtgtatgcgcttaatttcgttatggatgtgacatgatttcttgtgattcgtttccttagggttgatagatctgtatcctgcatgatcgttatagatagtgatctagatttgtcttttttcagatcgaaatttagatctcttattgttaatcatgttgattttattgaaacttgctcatacgaatgagatccgagagcatttggaaacataggattgctttgcgttgtaattgttttctcaagtgatggatattgaatctatgtgattgatgcaaaatgagttccagagaatttataatcctaggattgcatgataacttctttgctttgtgattgttttctaaagtatttattccatatgaatgctgcaattgagtatgcgtttagactgaaggtgttatttgaaaactctgaaacaggcttgaaaaatgggtctatccttcggaaagttgttcagcaagctctttgcaaagaaagagatgcgtatcctcatggtgggtctcgatgcagctggtaagactacgatcttgtacaagctcaagcttggagagatcgtgactacgattccaaccattggtgagtttctaactttgcatactctttctttcatctaattattattcatctctaaacttagtatgtgaaattgacacattgttatgcaatcatctcaagggcttaggttgaatttttcgtatcatggttggattcctagattagattggaacttgaatatatagttgcaagttttttcatttggtttgcatgcggtgtacttctacttgctcaagggcattcatctttgattcatggtttgtgtatgattcatagaatgagtgcttgaattttttagatctgtcgtattgacaatacctgttcttgctaggtttcaatgtggagactgtggaatacaagaacattagctttaccgtgtgggatgtcgggggtcaagacaaggtattgtgattacagtcctttaccagcattcgacaattactatagctaaatccttgattctccatgagctgtcctattttactgaatggcactttcactattccaatataaccttttttgtttgcttgctcatccagattcgtccattgtggaggcactacttccagaacactcagggacttatctttgtggtggacagcaatgatcgtgaccgtgttgtggaagccagagatgagcttcacagaatgttgaacgaagtaaaactcaaacaaaaatctccttctctagtgttacattatgaagcagttggcatcattttgtttcctttttgactgttgcaggatgagttgagagatgctgtgcttctcgtttttgctaacaagcaagatcttccaaatgcgatgaacgccgctgagataaccgataagcttggacttcactctctccgtcaacgacactggtgagccaaagaaaaccaaaccaaatctctttatttaccagatacctatatcgtaacatgaaaagctgatgtaaatcgttggtggggtttgttgaacaggtacatacagagcacatgtgctacctccggagaagggctttatgagggacttgactggctctctaacaacatcgcaaacaaggtatacaactttacaatttttgaaatcgtattagtaagaaattgattgttaaagacttactcaaatgtgtgattaacttgcaggcttaggagaacaacgtgtggtttggtttttaatcgaggagagtcttgtcttcttccttctatcttttgttctttcgtctcaaactcttatcatttcatactctttgttcttcgctctaataatttacaagttttttatattgttgcttttatcctataattcagactcttataaaatgggcccagttcgcggat

SEQ ID NO: 30903 - DNA, 1712 bp, Arabidopsis thaliana landsberg
caatcgcgaaaatagttccaaccgtacaagtgtactattcatatatactcttagaatcacaatttatacatttcattaacctacaattctacaaaaatattgtaaagaaaaacagataatttatgttattccatggttgttaagataattattagttttagcgcgcttattctaggaaattaagaacgcaatattctgacaaaaatgaatgtggcgttcaaaaagtgcgagaatttggaaatattaaagggattagaggatgccagcaaagaattttgaatgttaacttttttttcaaacaagtggatttatgattaaattgtctactcattcctcttctgccacgctagagcatttcgcctactggtcatggctttcctctacttttgattcatatgacaaatactagcaaaatcatcaagtttcgtgtagcaggtgccaacaaaaccgcattccaacatatgaatcaaagtgcacaagtaaaatgtgaccaaagccccgaaagcagtgggtgaaatcttcgattgcagttttaccaaaactatataaaaggtagttttttgtaagttctacgtacaatcacaaaatccatcgacatatcccaaaaaaaaaagcagaacaataacgaaaacggaaaccaaaaaaaaaattcagataatgtttgcccctgcatccagatttgctcagcaaatcaactccaccacgaactttccctctacgcctgcacaaccagtaacaagaacacagaaacaagaatcacgatttgcttcaaaatactgatccacaaatcaaaattgttgtttgtgataatttaccttgccggcaatgttgttggacaaccagtcaagaccttcgtaaagcccctcgcctgaagtggcacatgtgctctggatgtacctggagagagttcgtagacataaaatcaatcagagaggtgataaatctttggaactatatcataagaaacgttatgtgcaggagaacaaatcaacatgagggaagcaggggagattataatgtttttatttaccagtgacgctgacggagagagtggagaccaagcttatccgtgatctcagctgcattcatagcatttgggagatcctgcttgttagcaaatacgagcagaacagcatcacgcagctcgtcctgtaaaaccccgacaaacagtttactgaatcatctaaacatgaagaattcaatacaacaggcaaagatataacacttgatacagacctcattcaacattcggtgcaattcatctctagcctcaacaacacggtctctgtcattgctgtccaccacaaagataagaccttgggtgttctggaagtaatgcctccacaagggacggatctgacaacaagaagtggaggttttgcgacatgtgagtttgtgtaattctatgttcatcaacaataataccaagacacagtaggaaaaagatccccaggtagtgatgcaaaaaaaaaagaattcttaatgctttagagttggataatcttataccttatcctgaccgccgacatcccacactgtgaaactgatgttcttgtactccacagtctccacattgaaccctgtccacagtttgtagtagtttaatcatcacggcaggtggaagccaaaattttgtatgaatggtatgaacaaagtaaatggaaataagcttttgaaacactgaattatgaaatgatgtttgagcttaccaa

SEQ ID NO: 30904 - DNA, 1214 bp, Arabidopsis thaliana landsberg
tactcattagagagctcttcacgagagaactctttctctttcccattaaagatcaaatcttttttcttcttcatcaacaccatcatcatcatcaccgtcatgtgtaacccatcaacaacaacaacaaccaccggttcagagaaccaagaatctcgaaccggactcttcctcgatctcttctcgatcaatagctttgaacccacaaagagaaatctccggcattgtgagaacagaggatctcctcttatggcagaagctgtaacagaggcgaaatctctcttcacgttagcttttccgatcgccgtgacggctcttgtcctctacctacgctcagccgtatcaatgtttttcttgggtcaacttggtgacctcgaattagccgccggttcactcgccattgcctttgctaacataaccggttactctgttttatccggtttagctcttggtatggaaccactctgttctcaagccttcggtgctcaccgcttcaaactcctttccctaaccctccatcgaaccgtggtttttctcttggtttgttgcgtaccgatctcggttctctggtttaacgtcggcaaaatatcggtttaccttcaccaagaccccgacatcgcgaaattagctcagacatatctcatcttctccctacctgatcttctcaccaacactcttcttcatccaatcagaatctaccttcgtgctcaaggcatcattcaccccgtaaccctagcttctctctccggcgctgtttttcacctcccggctaatcttttcttagtctcttacctccgtcttggtttaaccggcgtagcagtcgttcctccatcacaaacatcttcgtcgttgctttcctcgtttgctacgtctgggcgagtggtcttcacgcgcctacatggactgacccgacccgtgattgtttccgcgggtgggctccgttgctgcgtctcgcgggaccaagctgtgtctccgtgtgtttggaatggtggtggtacgagatcatgatcgttttgtgtggtttgctcgtgaatccaagatcgacggtggctgctatgggcgttttgatccagacgacgtcgtttctttatgttttcccgtcttctcttagctttgctgtctcaactagagtcggaaacgaacttggagccaaccgtcccaagacagcaaagctaacggctacggtggctatcgttttcgcggcggttacagggatt

SEQ ID NO: 30905 - DNA, 2917 bp, Arabidopsis thaliana landsberg
gagagaaggaagaaagtcatgataggcgtgaaaaacgcgaaaggcatgataagcaaagcgctcgtcattcagatgatagaaagaagcccaagaaagagaagaaggagaaaaaaagaaggcatgactctgattctgattgaagcgaattgtcccaggatggaacattttgctcttcaaaggaagagtggtcggctaggtaccaaaatccagctaccacttctgcaagatttaaatctgttgcttatttcatttacgaatcgtggagtaaagtgttgttgaacattgttgaaaatgtttgttaaaacacatgaaaaatgtggtttgatattataacaaaccgagacgctcgttttagctcatctgtggcactgataaacaactttcactacatcaccaaagcagtacatcttcctaaaataaaaggcatcaaattgcttcagagaaacgtaaatcagcagggcctggtcccagtattcctttttgttcaacaatcttccctagtccttgtgatggatcttctgctggtgcacttgcgtcagtgatcaccgtgataactggcaattctctctgcaaagttgtcaaaaacaatttaataaatggatcaactacaataacatccgggcaaggagctgagactgaagcactgttgtgctacaaactgaaaactatacagtccatactaaagctatagccagactctttttctcaagtgaaaaggaaattttagagttatttatacttgtgtagaacgagaatatgacaagacaaaggtacttgcctcatcatgattattggagctttcaaaaggtattggggtcgttagagaaggttcgatatctgggtcaggcttctgaaatatgaatgttgcatacagacctgcgcaaaataaggatataaagtatcaaaactagagattagatatgataagatggcataatatgatggcaaggttacctaacaaatcaaatgctcttggaagaagttttcccctagggtcaacgaaattcgggccagcattcatcagcaagcttgcaaactgggctctgacaagaagagttgaacaacatcagcattgtaatacaaccttcgaaaggagcaactatgacatacaaaagctcatgataaaagattgagaatctacaagtatgggagacttcgaacctgttatcatcataaaaatctgttaaactttgaatttccacaaattcaaggccagcttccctcgctaacctgaatagcaaacaccaaaacaataagttagatgaccaagactcgaaagatatatacaaactagatgtcatttgtagctcaactagaagcaatatcacgagtagaatggaaatcttgtttacttaaagagttttaagaataaatacaagctttaagttcaacaagtgcacattgttgatatggtaatttcatatcatccaattagtgttacattttgctaaacaagaaaagcgagatcatggtgcccgagaacccacctgattaagcttgggaagtgaaccaagcaatggtcttcagaagcattgtcaccagaaaatttcagctggtacctctttccaaacagcggaaatctgagaagaaaatgacaaacagtccaagttcacaaaaggaacttgatagcaaaatgaatttatctcagataaaaaatgctcacttttcttcctccaattcgaaagtgatcatgtaactttcagaccgaatgtagtttggaaatacattaggctttgcaccgcttctgttgtggtatgcttcaacatttttctggtactttgccctgtttgaccagaatgttaaggagcgcagtccaactgatcaaaatatataggcaatcaaatgctgaagttgatgcattgatacagaaaacatcattaccaaatcgtagacgagtcaggagtgataccgaaaaaataaccccctggtttcagtaaacatgctacattagttaggagtcttctcgcactctcctcagtttcaaagcataactacataaagaagattttagaccatcacatccttgctatgctacatttttcggagaaaacaaacgacaaaatctcaaacctggagatggcgccaacaagaaactaaatcagcctgctccaatttcttctgtagctggatttcaaaatcatcctgtgacacaaaatgaagcaaaaactaagacttttgctccagattacttagtttagctgaaacacatggaaaaacaaaaaaaggccttgccttggaaggatcagcttcaaagaattccacatcgtaattcttcctctgactctcccaagcttctcgtacagaagaaatcccagaagatgtatctacttcccccaaatagaaaaaaacgcaaacctatcaatcttcgatgaagccgtactgatataacactgagtatgtaagtaagagtatattaataccaattccgatgtagtgaccaatcggagcagcttcccacttgtcggtttcgggagctccgccacagtacaattcgcaaacctagaaaagacgcagagagagagacataaaggataagactttgtaaatgaaatggagttgagaggaagcgggtttgttagatacagtggcataaggatgtgcgaagatgttgattatggccgtctttgcgaaatcgaagagacgatgatggctctgctccggttttgaaaccacgaagccgctcatgtctttcttctccggctgaagttctgaaaattacaattttgacacacatttaaacttttcttcttctgttgcctccatatttcatttatatttcatactttattcgtaacacggataatggttgaataacgggtttttaatacgattatgcaagcaccaatcgagaaaatatgcataagattcatgaaaatgtagatcttacgtctaaaaatataaattaaagcacattatg

SEQ ID NO: 30906 - DNA, 3331 bp, Arabidopsis thaliana landsberg
ctgtgcttgaggtatccttagaaagcttacaagtctgcttttttgagggttaatgaagagttacacgatagtgaaatcgactattctatgagtggtactactgccattacggttcttgttgttggggataagatttatgttgccaatgtaggagattcgagggcggttctcgctgttaaagacaggaatcggattctagcagaggatttgtcttacgatcaaacgccttttaggaaagatgaatgcgagagggttaaagcttgtggagctagagtgctgagtgtggatcaagtggaagggttaaaagatctgaaaatacaaacatgggcaaacaaagagagtgaaggaggagatccgccgagactttgggtacaaaacgggatgtatccgggaaccgcattcacgaggagtgttggtgattttacagctgagagcattggagttattgcagagccagaagtgtcaatggttcatctctcgcctaaccatttgttctttgttgttgcaagcgatgggattttcgagtttcttccaagccaagctgttgttgatatggtaaaatacccttttgaagatctcaatatgtttttgttggtttggggtcttaatgtgattgaaaaatgttgtttgcaggtggggagatacgcagatccgcgcgatggatgcgctgcagcagcagcggaatcatataaactgtggttggagcatgagaataggacagatgatatcacaattatcattgtacagattaaaaagctgtctaatgaatgatgcacattcctatttgcccctttgtttgatttttctgtactgtaatgttacaggtttcatccaactatatagcaaagttaaaagtaatgctctctcttttgtgtatgagcttcttttaccaagattaaatgacgtgtttaatacgctatttgctcttacacgttgcttgttgcggagaataagctcttgacgacccaaacaagtttatttgtgttcttttttttcaaattaaagaatgaaaacatcattataaagcccgccaattatttacaaagaaatgagactctctatgtgattgggaagaatatggtgacgttcgtatccaagtctattacgtcgcctaaattcgtcgtccgcgagtccttcatatatgactcttctaaagctgtttctctgtggatcgaaatacagagcatgaaacggactctgcaaagttgttggtgcgtaaacaaactcaccggcttcagtcacacccgttagttctaaaaaggtgtccaaaattggatcatcgagtggaaaagttaaagaaaatgttctaaacgaccacgcatgtctctctgcatcctccagaacccatagtgaaataaaggctttcacataggttgcagaagcaagagaagctaactttccctcgtaagttaagaggtaaccttgggaactttccctgagcacgatcaaattcaccagattcataatacagaaccccgttgatgcatcgtccacgagggtagtaagggcaatgttcaaagctaccttggataaatctccatgattttttagctcttcccaatgtaagaacccgaggctggttgctgctttttgtctttgtcttctcttcacatcttcttcttcttgtttctccatcatcaaaccctatctttttctccttcttcctctctgttagattacgcgtatctatagggtttagggttttagacaagaagtttttcatgttaacttggtagtaattataaaaatgatgggtctcacgcgctcgctggaggcatgctttatttcttctctatacataatacataagtgtatgggtttcgttcacgcgccgagagtgcgagtgttggaacatataagaccagtagtaataatgtactaatggtcagtgaagtacaaaacttctaccaaactgatgatgacacgtgtaggggaagcaaaataccttctttgacaaaaactgacatgcaacaacaacaaacattaacaaaaagggctgacgaaaatcagaagtaaatacagagcttctcggctatgctattctgtaccatgttacatttttccaacaattcatctaatctctcactctctctcttctctatcgtcttcttctctgccgcttctctacctttacttctccatgatctctcgcctaactcatcatcctcagttatcatcagatcaatacctcgacaagcttctctgttcttttccaacatcgattcctctatatctctatgatcatcgatgagcattcctgtctcaacaactctctgggctttgtcatcatatggaggaggcgacttcaaggggctgcagctgatttctatcatttcatgaagcaatggaagatttggaggacaagatgggtatgatgcatcttcagccaagaatttatctgcatagcttgaagttgacatgttgagatcagacttcagtacgtaagctgaggaagatgatgcatcaaacaaacccattatccgccagttgaagatcctctggaagataccaatccatctcggggtgatatggtagcggcttgagttatggagttcgagtctagtgtttctttctagcatcactcctgtttctttagtagctaatgagactcccataagattgcttctctgtgttaagtactcaattaagcatccctcaagcctttgcgtgtggttctctatctcagcaccagaagcacatcctacggttagccatgtcaaatcatcttcaaaatctgggagcttacaattctctagcacggaactgagtagttcgacgttctctgcactgctccagtccaggttgggaagataccgcttgaccattaaacattcttttctattatcctcgagcaacattgtctcagggcaaggccaaccgatgggatttgcttcagcagcagaagtgatgtttcttcgtgatgtttccaatgcgtcgttgaaggctgatatgcagatgttaggaccaacctcctgatctggcatctgcttaagcaactccaaggaaaaactgaaatgggtcagaaacagttcccggagtttaacatgatgaagatttggttgcagaggtgaattgcttgctagccatttaaacccatctcttagccgtgaatcattgaaaaaatgaacttcctgccccttttgggacttattagcaatagaaacgatggaaaagcttgctatctttgacttgtcaatatcatggaggcctaatcccgagacaatgtcggtatcaggctccatgtgttccccattgcatgagaaaattactacgagaaggggaagaactgaaccgttgggtactgattcaagaatgaggttaagctgttctc

SEQ ID NO: 30907 - DNA, 1718 bp, Arabidopsis thaliana landsberg
aatctatgagatctccaaagtatgaatctttgttctatgttctgtgtatcatcgttgagttctggaaagtagcaatcgttatattatgttaaggtatcctttgctctgtcttttgggtgcagattagcaagtatgcgagtatcctcttcgtggcgcttttcgggtcgattgatgtaacgggcattctcgatatgcaatggggtaaagtagggatcgatgattggtggagaaacgaacagttttgggtgatcggaggtgtttcagctcatctctttgctctcttccaaggtctcctaaaggttttagccggtgttgagcacaaacgtcacagttacatgtaaagcagcagatgatggtgaattctctgagctttacatcttcaaatggacatcactcttgatccctccaaccacactactcatcataaacgtaatcggagtcattgtgggaatatatgatgcgatcagtaacggatatgactcgtggggtcctcttttcggaagattgttctttgccttttgggtcatcctccatctatatcctttccttaaaggtctgcttgggaaacaagacagaatgcctacaatcattcttgtctggtcgatccttctcgcctctatccttacgcttctttgggtacgagtcaatccgtttgtggcgaaaggcggtcctatcctcgagatatgtggcttggactgcctttgattcgattgaccgatggatgggttggtgaaaaaggtttaattcccacggatcaaagagaggtaagagagatattgttttacctctaaaagactccttcattgtgttcattagatgatgaaaaatgaaaagaaaaagaagatttaattttgttacgagaattgttatttttgcaagaatgtgttgtagatatagagatgaagaagaaagttgttgtctatttgttttgttctttggtggtgagagaaaaaagatttgtcaaattattctttaattgaatatttctgatctcttttgaatattacagaagagcattttcaatctgtaatcttttatgattaaagaactttgatttattttcactaatttccctatcttatttcttgtttgaaaaattaatttactcgaggtttgattggttttgattttcaatccgcatgcttggagacgttttaaagcatccattaaaaatgttaccaaaccttagaaaattacgaacttgatcagagtggcccaaaacaaattatacaggcccaatacaggcccgaatctacacagccttttacacttttattggttctgttttgacaagtgacatggtgctttcatcatatctgcagagggcagcactcagattggttagtctttttggttagagaattttgaaaacttttttgtttctcatttgtaagtgtcactacgcaaagtaatttaatatttttgtatcgttctagttttattaaaatctctacacatagataccagaaagaggactttaatttcgagtcatttttgaaataaaagtttctaattttgtcacatttcagcaaaaatactcgtgtgtatatgtaatgtctactgttcctttggcggctgaaataaaaatgtgggtagtacgtaagtgacacggaagcataaggattttatggaatgttactaagaatcttaatactagtacttattattaattatgatgtgatatattttagtttgactattgactatcttgggatttt

SEQ ID NO: 30908 - DNA, 1892 bp, Arabidopsis thaliana landsberg
  unsure (1)..(1892): unsure at all n locations
ttttttcatcacaaaatctttggcagacgaaaaaatggcatgtaagcccataaacaaaaagaacatacgagaaagaacagcaacaacaagcaaacaaaaatgaaaatatttagtgaatggagtttttgattattattatttttggttacttgatggattggtgaacttgaccaaagatgtcaggacaatcatcccaactaccagaatctcgagcttcccaataacctccaatgtatctataagtctcacttcctttctcttttctaaaccactttggtttccaacctctctcttgcatctctctcgcctgtctttgtctttgttccaacctcaacttctctgcgtttcccatttcatactctcccttctctaaatacctctggtccggtctaagtcttgaatctgttggtggcaacttctcctttaaaccaggcgtgagctcgtttaatgtgatcccaaaccgtgttagattatactttgtcgggttttcgggctgtttgtttcgtttccacnnnnnnnnnnnnnnnnnnnnnnnnnnntgatcaaccatcacatagtgtatactctcatcccattttccaaacaacctagccactgcttttccattcttgtcttctactataccttgaacttgatgcggatttctatccatcatcggactgtttcttgaatttaagtttacatgagtattcaccgttaccttcaatcagcatagtcccataatgatcacaatacaatttaccaagtatgagattgtatattgatgtagtcacctatatttttgagcatagaaggataagtaacatatcatccatgaatggttttttttttggttaaactaagattcataccttactccattgcacaatttcaccatcatcaaattgtaaagtcaacaaaccgataggatcgagctgaattgatcgaccccaaaatttgctttttaaattgctatctccccaaaatttccatccggtgccatcacaatgacatgccacaatcataggatgatgacttacctaacaacaaagttcacaagaaaatgttatgtatattaacttcacattaattagtgaatcttataagtttttcatataaacataaagaaaccttttccgagaaaaatcgaaggcctttatcgggataatcagcctcgtatgtttcccctaacattggattaaagggtttgcaaattcttcctttagttgatgcataaccagatacagcaaatgcagctacattcaaaatcctcataaggttattgccctgaaaaatatcattttctaggcaaaattacaagactgtcataaaagaatctaaatattattagtcgtttgcagatttttattaccctttttccccattcagaagcttgatcaagaagatatgaatactccaaatcttcaaagcatttttgtagagaggatagtggctcattgaagtaaacaggaagacaaactttagtaagatccttgccaatgttgtctttgatcattgaccaaaggctaacacttttctctttttcaaccggatcaggtaatttatttcgtctattgacatgaggatagttaaatccaatagtcttgatagaaggatcaacgtcatcatctgactcaaagccattagtaatccaatcatcatctgtagagaatgatcatcatataaagcaaatgaagaaagagtaaaacatagaaagttaatatgtaactttggaatttttagaccaaaccgggtccagtgttggtttgagtgtactcttcgctaagtctgccttcgtaaacgtaaccgagcttctcacagaatttcttaatctctttgacatctttctccgggcatgtatcatcggaaacaacaaccgtcgtttcgttttctccggctatgtatttggtaat

SEQ ID NO: 30909 - DNA, 440 bp, Arabidopsis thaliana landsberg
gggcaccaatcttgcttggaatgatgagtatttttcgaagacgaagaaggtttagaagatcagagtttggtgaagagaatgatgataatggtgatgacttgactactaatgctgatgggaatgggaatgatagtaacaacagtaataataacgtgtatcgtcatcatcgagctaggagacatggtggagagattgatttagatagagagtttgaatctatcttgaggagaagacgaagaagctcagggaatatattgcagttgcttcaagggattcgtgcagggattgcttctgagtatgaaagctctgataacaattgggataattctcgagagagggatagagttataatgattaatccgtataaccaatcgctagttgttccttcggatcagaatcagaaatattctttattgacttcacttggagattactttatt

SEQ ID NO: 30910 - DNA, 1551 bp, Arabidopsis thaliana landsberg
agagtgattagtaccgtaaggcctccatctgagaaacgcatgcatataataatatctgtaaaaatagtctctctatggatccatatacaagtttgaagatgtaaaataaacatgtaatagaattatcataaaatgcatattcatgtatttaatttccccaaatattggaaaatgacggatatgtaaaagaaaatgtagataatctagttagcacttagcacaattacgttctaaaagataatctaatttagttagcacttagcacaattacgttctagccgagcagaaggaaaaatatggttcaagaaaatgtagataagtcatacttcaagattcaatttattttaaatctttgttttacctatgggagcaggaggtgcttcattgtctcttcgtcgtttcttcttacaaaggaaaaatatcaaagccaatgccacaagaagcacaaatcctcctcctatagcgatcccgaccatagctccctttgataattctttggaagattgtgccggtggagaagagcctggagtggtagatggagtactaggagatctcccgccagagggactcgctggaggtggagggctcagagtgcctacccgtggaggaggagtcggtgttgagggaggtggtggagatcttggcggatttgaaggagtggcgggagactgcggtggaggagaagaaggcctcaagggagaagatggtggaggggaaggcgtcaagggaggtgaaggaatgcttggagatggaggcgaaggtgaaggggtggtgggagacggaggcagaggaggtgaaggagtgatggcaggtggaggagaaggagtcaagggaggtgaaggagttgggggagaaggcgtcaagggaggtgaaggagttgtgggagatggaggcagaggagaaggggtcaagggaggtgggggagaaggcgtagagggaggtataggaggaacggtggtaggtgaaggtggaggaggaagggcgggtggaagggcagtaggcggagatggagggggaagggcgggaggaagggcagtaggtggaggcggaggaggaattgggataatctgaggtggaggagtaacggggagaggctgaggcggaggaggaatcgggagaggctgtggaggaggtgacggagtaccaccgggaggcggcgccgatgacatatcttcccactaataaaaaactaagcgacaggataaaaaagaaaaaagaatgttaaaagcgggaaaaaggtctgatctctcttgccaccgtgactagacttgaattttgattacttcaatctttttttaaaacctttggtacaccgatatagaggagaaaatacggaatattattatttttgtatgagttatatagtttgtgttcttcttgcatcaaagcgaaggaaataaatgagagcacttactacattgacgttattccgatgttcactatatactatctgacagtcaagttacaccaaaataatccattcaaactgaaacgtacggacaataaataagtatttgaaaatcatattcaatcaaggtttttaataacagg

SEQ ID NO: 30911 - DNA, 879 bp, Arabidopsis thaliana landsberg
ggacacacataatttgatcatctctgtacaaaaacatgaattattgaatcattgtctatatttcgtcattatttggactcgattgacagataatttcatacttgaaaactaaaacaatggaaactgaaatttgatcatctctgtacaccaacaatggatatttgtttttcaacagtctgagtgaaagaacatcatttctatgtacattaaagcagagaatgaaatgcagaggaaataacaagttcaatagctagaaaaatgagagaacaacaaaagatgaagaacaataacaaaatccaagatgttttagtttttgattgttttgctctcagcgagaagaaccagaagatcttgagaagaaattgttctcaccagattgagatccagaggttgaagaagacgaagaagaagaagacgagaacaatccactaaacggccatggaaacgaaaaccgtctcccatttccactcctcacctcatcctctcttcctctatccgcatttcccacattctcatcaacgtttccgttactcgtttcccgaacatttcttgttctcagcactctctcggaatcagtcttagtctcatcatcatcatcagcactagaaggaagctcaaaacgacacacaggacaagaactatgaagctcaagccagggaacaatacaccgaacatgaaacttatgcttacaaggcatctctttagcttccgtacctttctcaaaatcatccaaacaaacagaacactgcaaaggttccattatcttaaccgttggtaaagcttcaacagcttctttacgagcaggtggagtcccttgcctattaggatcattctcagccaaatgctgaagcaaaagatctaaaccaggtccaaggaagt

SEQ ID NO: 30912 - DNA, 799 bp, Arabidopsis thaliana landsberg
aagaggaaaaaagatgtgctgaataactttcgaaaagaaagtgcaatgtttcgtgatcgaaactcttaaaatacatcaataaagagtttcggtcgactagaagttggaatgctcgatcaaaaatttatccggtcgaggaatcctcaatctggacagctggatggtcgtgggaaaaagaacgtaccgaatcactttcaaaagttatagtccgcgatgcaatattttgtgatcgaaactctaaaaatacatcaataaagagtttaggtctaccagatgttggaatactcaataaaaaaatctacccggtcgagaaatcctcgatccagacggccggatggttgaggaaaaagaaagtgtcgaataactttctaaactcaacaaatacaatgcaatgttttgtgatgcaaactattaaaatacatcaataaagagtgtaggtcgaccagaagttagaatattggatagaaaatatatccggtcgaggaatcctcgatctggacggccggatggtcgaagaaaaaaaaaagtgccaaataactttcaaacattaacgagtacgatgcaatgttttgtgattgaaacacttaaaatacatcaataaagagtttaggttgaccaggagttaaaatactcgatataaaatctatctggtcgaggaatcctcgatttggacggccgggtggtcgaggaaaaaagaaagtgccgaattacttttaaatttaatagagtacaacgctcttgttttgtgattgacactcttaaagtacattaatatagagtttagaccgaccagaaactt

SEQ ID NO: 30913 - DNA, 6762 bp, Arabidopsis thaliana landsberg
  unsure (1)..(6762): unsure at all n locations
actctttttccgaatgcttagtaagaacgtcagctatttgcttttcactctcgacttcagtttgatgtcaccgtttgtctccacttctctgatgacatgatacttgatttgaatatgtttggtccttcagtgctgaacaagattattgccaatggcaatggctgactgactatcacagtagatgtgtactccctcttgtgaggagaattttagatcttacaacaacctcctcaaccacatagcttgatttgttgttgcgcacaatgccatatagtcagcttttgcggtggatggattgagcaatatatagtgtcttgcttagttggcttccatgagaacattgttgatccaatgctaaaacaatatccggttgtttacttcaagtcttctttacagcctccccaatctatgttagaataatctttcaacattggctccatgatcattctcacttctcttgaagttttctcgacctaattactcatcgatcctactataccatgctttaggccataaagacataaagagccttgtgtaagctgaggacatagtcttctttctcttcttcttcaaagccaattggttgccatcagcatatatatcttcttctagtttaccgtttaagaatgccgatttgaaatcttgatgtttggttttgtggcaaaactcaacctttcaatatatattcccaaaaacctgaagttgttaaggtaaaattttgtttccgcaatagaagagattctttttcttcagtatcagaaattttttatcatcctggctctacttaaagttttgtggataatcagttaatattttatcagtagctgagttcagtatccaatttgtacaggctatattatgcgcgggactgtgtcctaatattgtagagggattagttaattaaccgtttaacaaagccagcggaagaaacacagcgttatgcagtatggcatgatggcaaaagagaagtccatatccatcgaacctctattaattaaaatcaactttcttgttcttgtaggttgaaacaaagaacgtagtatatatgcgagatacaaccgttgtttctcctttctccattctactttttggcggcttagtgaatgttcatcatcaggtactgttaattatgtcttactgtcagcgaaacatcccgaacaaatgattaaaaaactaactttatcacacagaaccctggccttaatttctaatacaatgcttgttggatacgtaatctatattctctttacttcactttcagtcacaatttttggatggttgaagcaagcagcaccagctcagaccgcggttttgttcaaagagctccggttaatcctgcattctgttctcaaagatcttatccgaaaacctgaggttacatgttcaatccttgtttgatctacttggttaagtagaagtagctcatgactaaactctcctatctcttcacgtttgtgtttttcagaaatcaggtattgtccacaacgaagtcgtcaaatcgatggttcatcttcttatagaagaaggaaaaccgcaacacaaatgaactaaaaaggaagatcaaatttgtgtgtaactcaccaagatttgaaggtggacatgtataagacacaatgttgatagtaaggtgacttgcatagctaataatttcagttttaggtaggtcaattgagattcccagagttcaattgtcgataaaaatttacaatacagtaagtaagaaatgtattttttttccgggaaaatggtgaaagaaaccctgaaatttaacaaaaacaagggtccccaaaaataagtaccaaatattgagcttttctttcaaaagcatcaataaatcatgaaacgaatcctaaggatttctaaaccgctcgaactaaagtaacttcgatttgataaggtttgaaacgaatcctaaggttttattagtgttttattttagaagattacaatttttcattacattcatcggtccagtatacaacaacatattccagattcacatacaccgatcaatacagcacttaaacttgaacaaaacgtctggcaatagaacaatcccctcgtacatggcgctggtgtaaagcattttttttccacttccgctatgccataacctattcaatattgatcgtcaaacaatacgtaaaatgagtaaaatatttagataattttaaaagtgaagagttatataataaagtagtaccactagtgccatcggagcaatgaacagaagatatgacaaagaacaaagtgagaacaaatgcaactaacattttcttggtggtagtcatttttatgatatctttttatttatttggtttacatcttttatttcacttgggatgattatataataacacaaacatacatacatgaaagttaattttctggtcaatggtgaaaacaaagaatctttcgatttatttccacttatttatagtcaacccaaacaaaaataaagagaatgatttcgttaccttaatatatctattttacagatagttaaaaattatttaatcacaagattttgaaaattggatataaaggatctttttaaaaacaattgtccatctacacttaatttccttctataataaaggatagattcgtcacatcaaaactggttcttaagagaggtgccaaaatttaaggttctctgaatttttttgtaaaccattaacgagatgaaagaattagagttacgtgtattagtagcaacaaacaaaactacaaggccaagaccactagctatatcatatgaataaagcaaaccgttttgcattttggacaatgttatggatggaagaaccgaagacacaatgtaataacttaatatttcattagactgtctagtttaacgtaagacattttatttcatgtctctttcagtgtaaacaaaaatcatgagcggtaaaaaaaatcatgaaactatttgaatttcaaaaaatatcgttttgagttgaacagaactatttttttataatttgttttccaataaaaccttattttgattgggttgaatagcttactttctaaaactatatggcaaattggaagatagttataatatttgggcaaagttgaaatgcaattcaaaattttggctccaaacaaaaagccctaaaaaaataaagaaactcgaaaattgaaaatgaacagtttcttcttctactgatcgaggaagacgaagagaaatggctccgacgaagaaacctcagaagaagaaacaaagcaaaaacgaaatagcttcttcttcaataccttattcaggccataagaaaccatctaaagccccaaagcttttaatttcgccggaaaacgaagaccgtttacgacggctcttgctcaactttcgccggacgccttctccggtcacggcgacgctatctgttactcagaagagaaagaaactcaataatctctacgagaatctctcttgcgaagggtttttagatgatcagattgaactcgctctctcctctcttagggtaactgtcacatttgtccttacatttctcagtttttatttctgagacgatttcgtaaatacaaagtggttgttcttgtttgaaggatggagcaacgcttgagactgctcttgattggctttgcttgaacttgccgagccatgaattgccagtgaacttttctaacggggcttctcgagttcctaccacaggtaatgttgatgtaatacnnnnnnnnnnnnnnnnnntggtttcgcgtattgatgcttgtccctattgatgttttcaggacgttctgtggcggtgatatcgaaatcaaagaaagattggaatgtgtctgttgaatctactgaatcttcagttcaactaaagaaggaagagcctgaacctgaagttttagttcgcgtgaagagtaagcgagatgaagaagaagaagatagtcttagttcttgtcaatcatctcaagctgattggatccgtcagtatatgaaaagactagaagaggtacttaacatatagaatgcttcaaccatttttccaaaagcctaatactttgatctaaaggcgggaaataacaacggattttctctttgaaataaaatttcaggaggaattggaatcttccgacgatgagagagataaggtaacacaactctttaccagggtacctagtagatgcggttatatcttcaaagttcttgtatgttatagaagggatgatggcaaaactttgaatatcttgaagatttttgaatttggagcataatttgtttttgtgctgaaaaaagtatcacatgggtgaaggtgtgaagcttaatgattaatgatccactgttttggcattagagacttcacttgagttttggagataaaatattaatttacttgtctccctctgtagtgacatatatttgttaggacacgtcacaatattgtttcttactcgattaggtatctggtccaaggtctttcgaagtgattgccaaagaatattgtttagaaagatataatgctataaaagcaaagaggaagggtgataaaagtggacagagccaagcaggcctagccatttgcaagctcaaggaagagatgaatgctcttggttaagtttaaccctttttttataatcactttatcaatcatgacttggtgtagtatgtcatgagatatatgtttttgttttccagggccgtcagaagcaatattggaatctgagtttcagcgtgatcgtcaagattgtgaaggcgctagagaaaaagaagtagcctcctctgtgcttgatgacgttcatgagtcagtaaatgctgatgctttcttttttcagctttttgatgacttgaccttggatacaaatcctgttgggagctgtaaatctgaggaacaagaatcagttgtctcgaatgatagtttagatgacttggaccttggcgatttgttcgacgaagatgttccgccttatgtaccttctccccatgaactcctggaattacagaagaaggacattatggagaggtatgcaatgagaaacatcttacgaaactaaacggtatctggaagaaggtaactcttcacctaacaagatcctaacaatgtttaatagccatagaatttcatctcgagttacattttgtaagtttgatttttttctctgcgctgcactcttctcctcttggtttgttttagtcactttgtcacatatagttgcttcttttgtaaaattatctctttaacatgtataagttttgcagggtagaagcgcaaaagatcctgaaggcattgctccatcagctgtgtcaaagatcagggtggatagcaccaaagttcaataaagaaaccggtgaaggaagaaatttctcatatactgtaagtattctgcgcaaagccagtgggaggggtaaaaacagacaagccggtggtctggtaactctccaacttcctcctaaagatgagaattttgaatccatcgaggtactcctttgatccatgttttaacatttgatattcttttgcgaaaatgtatctggttagggtctcgtgactaaatgtagttaggaatatatcttctcccaagaaagttccagtttaattccttgattgcaaggttctgaggaaaatgaagtaggacagctagtttgaagctttagtgcactattgtttggttaacaacgttgctcaatgttttggaaatgatttatgttgaccacatattcagtgcactaaaaccttctgctcttgtgtgtgacaggatgcacaaaacaaagttgcagcatttgctcttcataagcttttttctgatttacctgtccactttgcaattacggagccttatgcttctctagttttgatctggaaacaaggtgatctcatttattttgtctcagtacctggtttattaccccccccttctatttatgttgatattggcatgtcctatttgaaacaatttctcactagtccaggaattttgggactagaaatcaactgtggtaactctacaacatttatttttgcatgagagttttggtatttatttgttgaaaacattttgactgttaagaagagcatcagtattaattgaaagtttaccacataggaagagaaataaaggtttagcgtatcgcaaatgtggccattttcttaagtatcatatataggttctcgtttggcaatatatgaatcactctaatatagttgctttgagcttttacagaggaattgttgtgtactaccatacaaagcacagaagaagaccgaagagctaattttgttgataagttgcttgaggaggacagttttagtttgaccgcttcgtcgagtagctttgagaattcgcttccgttggtagactcctatgtcaaagacaaagatgacttgggtgttgtcaaatctaacaacagagctaaaagtatgtttggtttatttagttacttaaataatataactctgaattttagtgccaaaaaattcattagcaggttatatgatccattaatcctctgttttctgtgttacaggagactcttatatagaagctgagtgtttatctctccaacgaaaacaagaaaacaaaaagagaacgcaaaagtacaaggtagagtatgcttatgtttgaacagaagtttggctcgagaatgtccttcatggagcaaattttatgccttacagtgttattatatatctaaagctgaccagactagttagttcgttccggtaaaaatataggactatgtagtcaaatctttgttaccgcagctctttcagtaatcctactatttttttgcaggacatgttaaaa

SEQ ID NO: 30914 - DNA, 5154 bp, Arabidopsis thaliana landsberg
  unsure (1)..(5154): unsure at all n locations
agctgacctagatttctaaacgaagaacagaaatcgaaatgtagcctagaatccgtttatttcaccagatatatatatcagatagttcgcaacgagaaggccattaaaaccaaatgcaaaaaaaaaaaaaaaaaaatcgagaagtttcaccttctgcttccagcgaagtgcatcagattcagaagaaacataacaacgggaagtagaagaagaagattgatgattatgaaacttagatcgtagcagagaaacagcgattgccagtctcagcgactcttccttctctgtgtgatttgcttcagctacgcttgaactcatttttgttcaaaattgaaaaaaaaaaaaaaaagtattttagttttcaggataataactaatgattctctgtcctgcgcgggagagtttttgtgacgctttacaaagcccactcaggcccattgatcaaacttgataaagcttaaggtcgaatgaatcatttactcaactaatgttagctcagaatcagataggaataataggaagacgatgatcaaacatttccaatgtaattatctgaaccgaccagtttataggggtctcaagtctcaacaacaatcaactgaatataataactgagaccgtaaaacaaaaatgcaaaggtcaaaaaaagacaagtcacagaagaatacaaaaaaggacatggactcatgcccacaaagaagagtggtgagaataatgtcataagaaaaagcttcaacgaagagcaaaactatttttgagttctgagaatccttttctcctcctccttcaagcttacaacacaacattcatcgcacaagcataagacccagagagagcaaaatcgtcaagtaatgattccttttacagattccgacaagcctctatgtctgcagcctgtgaggccaacaaggacttcccctgctcgcttgactccacaatgcgtacagctgcatcgaccaccatcttctggaacctatcgtcttccatcttccctataatttctctaaccaatttgaaatccacaccaccagccagaatcagctttcccacaatctcaccaaaattgtttggtgccttaggaagatcaattccaatgtcgtccaacatagcaccgtagagcaagaacccagtttcaagatccttgggtgcgactaccttctttgataacaaatactccaagagtgtagcaattggctcaacgacaggcgggcttttctcaagagacagggatattgcttccttcacaaactctgggtgatatgacggcgaaccaagctcctctacacactgcagagcttcaccaagtagtcggacattgaaatattcctcgagaannnnnnnnnnnnnnnnnnnnnnnnnnncttcgctcaacttgggaccactaggctgtggtttctacaccggaactggtacggtcagaggtgcaactgactgtgctggccgttctgctgacacggtaactggacgcgacactgaaccacttccctgcaacagtgcgcttgtcttgccactcataatgccactgctgccttgaggtaagagcctcgtgttcattgaggccgacttgctcactgctggagaatgtagaggtcctggcccatcgcgtctagacattgatcttgtccggggtacctcccagttatcattgtccactccgggcatcccaggcatccttcgcgtcccaggcataccaggcatcaagccacccgcaccaggtcgcccaccagggtagacagggccagggctcacaggcccaccactagaaaccataccccttctcatatttgcagtggcacctggtcggagaccaagattcttctctgcctcagtatgtatttcggttatagttcttgctttcatctgcacgagtaatgtaaatagaacattagaatcactacacaatggagcaggaaacaagtctcaaccttgtaaaacctagaatacctcttcccgccttggaacccagccattggagcgcatgtcgatgatattctgaaccatgaatctcagacgcagttccaactgaggattctttgacagagcctgtaggcgtttgaaatatacatcattaatccgttttgacttcacgtttccgtcaagttgtttgccaatagttttgaagaaatgacaaatagcttcgacattttcctcggctggacaaactttctcatcggcccccagaagctcctgtgcacagaacaaattaagaaaggttaatgctagataccaaaataaaagaagtctaagaaaatgtgtaagcttataggtgttaacctgaacaatgtgatgaacaatcttttctgggaccatcttctgcttcaaaagctcaccaatcaaacgaatatttcctagagtcttgagcttcaacaatttttctttgtcattccgctcagcctcctgatctggagcactcatctgtctaagctcctccctcaactgagaagcgccctcaaatgcctcttgacagatattcagtagaaccctcttaaatgtaatctccttatccccaggctctgcaggtgggaaggtgggcagctggtcgttgatatcagagcacaattttgcatacatagggcaaaaggtcggctcaaggacagctttgtcaaaaataagggtaatcacaccctacaaatgaaagaaaagaacacgggttagccacacgagcagcctagatgattcaaacaagatttcatctatgcttgagacatagcatacaccttcaggatatcagcagatgtgatgccagattcaataagttggcccttgagaaggtcatacttttcaggggttagcttgttcagtatcctggacaagaaaagtatatctttgtaagtgtgcatagtctattttaaagatttcatgttggcagtaaaggaaagttatacaaaagtctagacaactaataactgccacaacggcattaccctttcacagtcttcagaacacgatcattttcagaaaggtttcctcttctagctgaccaaggaacttcggctttgacgaggacaggagctggtccaccctggttccacacgatatacaaataagtaagaaaaataagaaatcatgccagaatgtaaagggctaagaagagggaaaaacattcatctattgatcaattaccccttggttggatgatatgtttgcccttgaaaactgggaattaggttggtcttgacgattatattgacttgcttcaacatacctggaatctttagcttcacgaagattatcccacgacctttcctccccagagggtggaggttgagtagaacggctacgccaatcacgagagtctggctcagagaagcgacttgcggattgaacgggaacctgaaccattaaaataaaagatatgtgttaaaagtgaaacttcatgaaactataccaaaatgcaaaatttatgtttcaacaaaactataccaaattgcttacaacactttctccacgtgcccaagtcccttcctcaccaaacagttcagctgcagtatccagttcgactctcagaagttcatcagagagttgagtggtcgagtagatatgcacagacgtcaatgacctcggctaaggtagaacaaattcgtccagcaggacctagacggactttaaccctatattatctaactgggataatcacctctttaagctccaggagctgcacacgggtgtactacacacgttcacggccatcgaacctcgagtctccaccctgacacaatagcacaacccaggataaatcttcattaactaacacccaatacacaaaatcatataagaaataacgtataaaggagacaaggaaccacgagtactcagtacaaaagaaagagaggaataattctttaaccataaggccgaaatgagtgatgaactaaagaaaaactagaagaaatgtcagtaggtcctttatgagcaaatagcagctaacaaaatgcccacctaaaagcctacatatcattatacgtccatatttacagcagaaacacatacttgcgtgcgccactaagaatcaggacaaacaaactgcttgcattactcgtattgacatataaacctatgaagttcaattatgtatgttgcagacacctatcaaaatccaacatgagctcagtggttattaaaaacacaaagcattaaaactcgcaaatcagaaagatattagccaattcagacatttgagagaatcaaatcagcaatataccaaagattataattccaaacaaaaaggctgctgattgcgacaaacccgtaaaaaaggataaatttttagctcaagctaagacaagagagataaaacaaattctaaatcagaggaagaagagggagttagatccaaatttagagaggggacccagaaatgagggtaccttgaagggaaaagaggaagcaggagcaccaccatgaggacgaaggagaggtagatccgaagatgaaagagagccaaaagagagagacgaagaagaagaagaggaaccaaatagtctgtttcctcgaccgccaccaggtctcaagctcagaaccgtttgatcgccttgctgcatacctcgatctaatccgccttaagatcgaatcgaatctcacaacaaaaatcgaagagaaaggtagaagctttatcagcgacgatgaatcgctgactccgataatccaaggagaggagggatcggatttctgggtctctctctctcctgccgttagcgaagaagagaagagaagagaaaagttgagattgagaaatgagaagaagaagaagaagtcgagaaggagacacaatcccttctctttattagggtttttttcctctctttttcccgaaccagacacacttatagccttaacgtttttttccgttaagattacagttatgtcctttcattttgtttttttgtctctttattttgtcaccctcattgggttttccgtcattaatgaacaatgtcaaatggtaataatggagcttcctcggctcgtgttagctgcacctctagctcattgtaaacatattaagaggctgtaagaactactaatctggcaagttgcaatcaaacttccacatctccatatcctnnnnnnnnnnnnnnnnnnnnnncaaactaaaaaggcgttaacacaagcagagacgcaaaagaaacaacttctggcgttgatattatcctc

SEQ ID NO: 30915 - DNA, 4608 bp, Arabidopsis thaliana landsberg
cgtcaaagcatcccatttgcgttagagttttgccggtgtttcaaagcgttatggatgtttattcatcatggtgactaatcttgagatgaaactcaaagtctcttttgtttctttttttggtgtggctcccacacactacataatgttcttggatcatactctggttacaagtacattagtttggtacgagtgcaattgcataaacaaagactattttttgaatatattttacaaaaatgtgtgatcacatttggctcgtgatcacacaactttgggattcgtatttggagataatgcgattcatgcagtcaacaaccatactcacagtcacatgcctctccctcgcaacataaatacctgtgttcatctttttatattttactaaattaaaagggatacttttaacggaaacccaaatgatcatcagatattataatacaaataaagaaaagattccattcctcgaaagtgtttatttgttatgcagtattcaacaatctgagtgaacaagattttatgtactataagctgaggaatagcagtttacgagttctcaccgagatgagatgaccccgaggccgatgcggatgacgaagaggatgaagagaataatccgctgaacggccatggaaaagagaaccttctctcgctcacattactgttccttgcatcatcttccacattctcattacttacgttgatctctagagttcttgttctcggtcttacaggattaaccttggtctcatcatcaggagggagttcatatcggcacacgggacatgaactgtgaagctcgagccacggtactatacaccggatgtgaaacttgtgcttacacggcatctctttagcttcacttcctttgtcaaaatcatccaaacaaatcgagcactgcaatgattcacttatcttaaccgttgggagattatccacaacttctttacgtgctggaagactcccgtgcctgattgaatcattatcagctagatgttcaagcaaatggtctaaactggatccaacaaagtaatctccaattgcagaaagagaagtattggtccggttttgattcaaactcgttgaaccctgaacaacagctgattgatttaacaggtctcgatccgagctctcatactcagaagcaatccctgcacgaataccctgaagcaactgcaatatagtagctgagcttctccgtctcctcctaaggatagactcaaactctctgtctaaatcaatctctctaccttgttgcctgtggcgatgacgacgatgatgatgtcgatcaatatcgacgctgtcatttccatcaacatcatcagatacattgacctcatcattatccacaccaaactctgtcctcctaaaccttctacgtctacgaggattactcatcattccaagcaagattggaccccatagagacaatgcacggtctgtaccaaaatcaatctcagggtcttgaacctcccttagactgctactgctgccgccattaatctcacggctcatttcctcgacaaacccgctttggcaaaaggggcatttgatctcggcaccaataactggattcaccatttgtgaacacatgtgacaccaatacctagctgacattgcctcttcctccttctttccttccccacccaaacctctcgtttctgaaacaaccagaagaacaacaaaaaaaaaaacatgaagaagcaaacctataaagtttcgacctttgtttcatcagatctaaataaagagaatggtattcccaaaagtttcactaaaaagaggataatatcatcttcaccaacatcattagctcaagtttcagacaacaaaacgcaagctttctatgcaaatacgaataaacagatcaaccaaaatttgcctctataaagagataacaatagaaatcagggctaatccatgaaaagaaaactctcaattctcatggagtaattaaaacaaaacaaatacaaaaacaaaccttgtaaatgttcttacttttggagatccagagggaagaaatgtcttcctccttcttttagatctccacgaagataaatgagagcttttttatttgtcttcttctgcagaaatggtgggagacgaagaaaagaggaatgaaggaggaaaggaagacgaagatgaagacgaagaaaagagaatgtaatgtatagttcgcagacccaatcttaaagcccattaaccgcaaactgatatataaaggagccgggtctatcttaaccatttaaaaccaacttctaatttggaatcaaattgaaccgaatcgaaccggttgaagttgaaagaaggagaaaaggcgttgtctccgtgcgagaaaggcaaatcggagacgatgagcgaaaccgaagcaaccggcgttaccgatgattcggctccagcgattgagactgaaactgtttctgatgcgatggagcatacagcgatcggagtggttgaatcggtggaaggagccatagaaggagcagagaaatgggtgggtgatttgcaacggacggtgaaggaatcgaaggataccgcaatgcgttctgctcgttccctccgtgaaaattctacctctcagttccgctctatacaggttagttaatctctcttttgttcaccaaacaatttttgcgaatcgagattgtttaccaaaaaacattttcaggatttcaaaccatggatatggtggaatttagtatctcgtaagctataatttctagaaatgagctcgattcagaacagatatttctccaattagcagttttatgtattgaatggtgctagtttttgttcatatgggtaaaatcttgttgaatcataccattataacttattggcaatgatcttagtctcttcctgggttctgattctgcttcaaatggttgtttagaagactgtaatgtatcgctgaggcattcttgattattctctaaacaatgtttttatatgatatcagatattcatgtagcttaatgatgtgtgatatggagtagaccctatctggctgaaatcacagttccattagatgtatgtatatgtcttcgtcttctctcatacaatcttacatttgattctgaaattgcaggatttcattccacatgctttgactcagtataagacctatgagaatgctttcttcagtaaagttacaggtatcttgcagccaattttcgtgaaaaagttatactggtagactactgtaatgcttaggaacgagtattttagatcaaactgagatataacagatagctgcccaaaacttttatatatacttgtagtgcatcttatagtgttctgaaactagaatcttcatgtcattccgattaatcaatcctcgtatcctctgctgcttttgttatcctcgcagacgaattgatatacgcaaaagagcatccggctgctgctattgggattggtgtcgctgctagtctcgttctgatgcgaggtataacctctactctcttatcacttttacaacttacaagattccttcccgtaggagcatccaaatggtattacatctgttttacttatatgtgtcttgtatgaatttggttttctattgttcgacttacaggcccaagaagattcttgtttcgtaatacactaggccgatttcagagcgaagaggtatatactataccagcttcaaatttatttcttaacgttgttatgcttagttgccctggtctgtgtcccttcccttatttttacatccacttcaaaatcatcgtcgcttcaggcacaattcttgaaagctgagaagcatgttcaggagttaaacatgtctgtagacttgatgaaaaaggagagcaggaaattgcttgagaggacggctttagcagagaaggatatgaaacgtggtctctctgagctcatgtatgccccaacatggacgctcccacttcttttattaagttattgacatcatttatgttaatatgggtactactgttatatctataggaactctggaaacgatatacatcgtcttgctaagtccgtccacaaagctgaatgtgaagctgcaggtaatcttgaacaagatttatttttactcacttctcccttctcccttcaaatggtatctttgataatgccactacgtcagatttcaacttacacaaagagttctattcgctgcagatttgatggacggacttcggcaaattcctggaagggatgctatcaagcttagagctgaagtgagtctgacttttttcttctcgcccattgtttgagcttcattgctatgaacgtctcattaaattcttttgtcgtaaatcattaggtggcttccatgacttcgcttttgaggcagaagaggattgcattgaacaaaaggatcatgggtatgtcggacctaggagtttccgtctgatatatccaacacaaatccacaatttattgggttttcgcaaccaaagtttgttaggtattttccaattgaatcgcagtgtactctcgtccatcgaacatctaactctgtctgaaaccaaaatctgagcttgagacagaacttgtatactgtgtttttgcctgcttcaaaagatttctcgctcagagagaattaattgagtcacaaaaatgtgtgtgcttggttggaaa

SEQ ID NO: 30916 - DNA, 3866 bp, Arabidopsis thaliana landsberg
gtcttagaagaaaatacccagtccatgaatacatctcagcgactcttgcttgttcttggtttgatcctattcacattagccgatgcgcaaatgtctccaaatttcagtatgattgggattatgatgataaccggtgcattgatcatggatgctttcttgggtaatctgcaagaagctatcttcacaatgaatcctgagacaactcaggcaaggaaactaaagaaaacacggttctttcggttttcctttaccggtctgttttgtttcgtttctgagattaactcttgttatgtgtgttgtgcagatggagatgcttttctgctcaacagttgttggattaccgttcttgttcgttcccatggttttaaccggagaggtttttcgtgcgtggactgcgtgtgcacaagtaagtaaacaacctctgttctcttttttctggtttgacttttggtcaacctttaaccaaaccaagttaaccttatgagatagtcgtccatttgaagtgaaagtgacaaagagtggaaccttttatttggctttgaaagtacttctatagatttgactcggtttatgattcaaaccggagttggactcagtttagagaaaaagtcaaaatttgtaggattcttggtaccacgaaatgagagagatcattgaccgacgacgtgcctctgaatctgccaaactttttaaaagccaaattgtctcttttaaattcattgattccataacttaagtaccaacgtggaatattttatagtcaaacggtttaatgattcattggttgacatatttaaaaccaattgtgctttgtttatatttgcagcatccgtatgtgtatggagtgcttgtatttgaagccatggccacatttatcggtcaagtctccgttctctcgctcattgctctctttggagccgccacaactgccttggtaaatatctaatcttatctttgaatactcatttgaattttaattgactcaatggtctaaaatcacatttcgttgcgtgaatataacaacggctaggaaaggggttacattgttgctgtcgtatttgatattcacaaagccgttaacggaacagcacggatcaggcttgctgttgatagcaatggggattgtattgaagatggttccaatggatagtaaagctccggccaagattccggcgagaccagcggttaggatcgcaggaggcgatggtgatagagaagaggacgaagaaaggaagtcattggtttgagaatgtgccatgtatttatatatattttatctcacaaattcaaagggtttatagaataatgttggatgaaggagacacaaaatagagttaaagttgtgtcagagacttgttattagattctaaagtgaaattgcaaaagattgagctgttaaattgttaactatgatatgaattatttttgtcatcactctcagaagaaagcattattcgtctcaaagcctattcataaagcgggaaacgctaatgactacattctaaacgacaggatcagtgaagaacctgattctatctaagatcctccagtttctttctctgatctatgaataacaaacttatcgacaatctttacggtgttgacaggatcctgctgcaatgttgttgcacaccatttgcttggaaaccttctgtgatgactcattttcacagtcgatctcggctctgcatcccagtccttgtccagcttccattcctttggcacctgtactcattcatcacatacactcctctgtttaattccataatcacaaactttttcttttgtcatttcgagagttgtttttctcaccttgtctactccgagagtgaagacttcaaggtctccatcaggtttgatgtggaaacgggtgaatgatttgtaattggcgatccgaagtgaagaaaatgcttcatcaaagtgtatgtgaagccagttgatggatatatataagtaacttccaaaaaccaaagatacaacaggggttgagaagacccaaaagtagaggaacacagaagcataatagatggctgctccgcttcgagaaagtgactccattccttctcgacagatgttagtccgtgtaaccgccatcacctaatgtcaaatactttactttcggctgaaaaatagttttctatttcagctaaaacgaaggctaagttgacgattttacctcgggaatatcaaatgctgacataagatacttgatgcaggcaggatataatccgaacgtccactgctcaatacggtctcggaggccagtagggtccggaaaatgttcattttctactgatttgtaccactgatacaatgtatgataccctgtgtagcaaaaagtttgaaaatctcaaaatccattaaggtttgatcacagatacaaaaaaatatcaattaaagtaggatcacatattttttgtccacttgtgtcaatgacattgtaatgaggaaagccacaacattctatggaaaggaaactgaccggagtttgcaaggagcttatgctgaatacagatttctatgccgagttccaacagcaacataagaatcaaagcagccatcaggtgtgcagaaacatgaagaattccaattaacagtcgtttcctccgagatatttttgagggaacaaacataattgcagttattagcaacataagaaccccggtgaaagacacatatgactgctctgttacatacacaaaggagctccaaactgtgccaaagaaactccccaagtggccagaaaatgaatcgcctcgtaagatatggcctagctcacactgaaaccaacaaggaatgaagataaaaactttctcgtgagtgcaagtgagcataaaaatttcttcgcacaggaaaaacactactacagatatgcaaggcctgtctcagtttgaccatttaatagtggatgctgacaatgtgtaccattttaacaaaaaagtcttaatgaccaagtcaggctgcattgctgagaaaataaatataaaatggagaaacaagaaacagttcatatgaaaaagagtttgataaagtcaaagatgtgtaaaaccgcacctgagggaacaaggaaaagaccaagagaaagtatatgatgccaccaatgaaatcaaattgccagttctttttcctgaactttaaaatatttcccagagcaatctgcaaataacagcaaacaacataaaatatcagaatgcaaagaaaagaaggcgaatcagtaaccgtggataagaggttcaagaaacaagaaaaagtttaccctgcttgaatcttcaaatgaaggataggcagatttactttcataagaagcaccataaaactttgaaaagcagcggaacacatgggtgggatgcaaaaaagcccctccacagccattaacaaggagatgtgggacatgaacaggtccatctgattgagtacatgaatgacgcatataatgatgcaaatctcctgccattctaagtttacaccttcctttcaaaaattcgaatatcaggtgtcgcatgttctttccagtatcgtctttccaataccaatcaagaagccagttcggctcatgtgtgataatgatcactgcatcattctccccaacctaaatgaaaagataaaaacattgatcaaagcaacaaaattagaattcaatagtatcaaacagaagacaccaactctaatattgtcgtttcacaaaccaaagaaaaacccaaaaccaatatcacagaacatcataagttgtgaacaaaagaagaaaagagctcgagttgatgggaatatattttgtatagcatccgcaaagtctatttagcctgagaaagaaagatgatgttgaatctaccttctccttcactaatttagaaaagaaattgaactgc

SEQ ID NO: 30917 - DNA, 4364 bp, Arabidopsis thaliana landsberg
attccataactttttacaatggttttatagttttaagtttctatttaaaattgtcaaattttaaaaatatcatctgacctgtagcatagtggtttgtattatcgttattgatgtgtcgcaatttggattaaaatccagtataatgcatcttgtcggtattaaaaaaaatgttctgtaaggtagtaatgaatatgaataagaaagatgtgataatgaaatgtaattcgatgaaatatatttccaacagttgaacgcacatcgactttatacaaatgaacttcaaaaatgtatccttcaaaaattagaaaacctctttaatttctctaccacagacagataaacttttctggtctctatttagttataatcaagatgcaaaaatataattaaactaaatagagaccaaaattaaattaacaagaggatcaatggatgagatatgtgaggaccaaagccaccaacataaggacatatgctatgccttggtctatcgttgttcctgcaatatgttgttccataattaaccatccgaacagatataattgtaatatctaataaagaaatcagcaattttacgttacagctttatggttatttgatataacatttccagttaattactagagaaatccgaatcttatggacatggcattgttttatctaaagcattagagagtagaactacatattcattggttaagagataactaattaactactcttttattatatcttatgacaaaaggcatagattaactagataattttgtgagcatgcatgtatagagacatttaagatattcacacatctgaaaattttcaagaaacctctgtagttaaccattgatgataattatatcaactcaccgtcgcttgttggagccggagcaggagctgcggattgagcatgtgccatcggcaacaaaatggcgaaaattatcgatacaattgtagaaactccgaagaaaagcctcgagcccgacatttcgatgtttattcctccttcttcagttcttaaattcttttgttaaagttcttccctctctcaactccttgatttttgggagaaggattttagagagggaagaacaaagaagagaggaaaatgaaaaagaagaaatcaaaagaaaagctaggcagagcgatagatgaggtaatgagaataatgagagattcttttggcattttattgaacaattattttctactttatggtcgacccgcatatctcggaacaactcatttttgccccacaataattgatgcttttggaaatggaaatcgaaacttgtgaatgtgaaaaaactgctattgtttcaaattgtgtgtagtcgaaaagagaggttattaggctgttttttagcttcttatgtccagcttggacacattattctccctattattgccattaatccaaaaacataattgttcctttttgttttcggtagttgcatactaattttagaatttatcacggccatgtaaattcgtaattataccaatttgtactattttaccttcataatcttagattttgtgttgttaaaattcataatatatttgtttcaataatacgaaaccacatttgttttcatttttcaacattataaaagataaaatccaaacttcaacaaaaccatttcaaaacctacaaataaattctatcaatagagtcaatgtttaaatgttcaagattataaaacttacggaattatattaatggttgagtaattaagtcctcctatgctacatctaaatgctaaacaccgttttagtttgtaaattatctaaatgtaaagaaatggagctaaaatttatatatctgccactgacataattataaatcataaatgccaaaacccgtaaaataaaaattctacaatttattaatcagtctctctcaatctcttccaaagtctcaaccactttcaccatatccggtctctttgccggaaccatagccgtacaacttgttcctaactgcaacatctgaagcaactttgcttcaacgttaggagttttcacaagctccaaatcaaacacttcacctgtccattgttttgaaataacgtcattcacccataccactagatctatcccttcctttctatcatccataatcgatcttccggttagagtctccagcatcaatattccaaaactgtatatgtctgattctggcgtagatctcctcgtgtcggttacttctggcgcacggtaacgtagtaccgatctggctgatgaatctgccctcacaaccgggttggttaacagaggtaaaccggcttccgatatacacccatatccttccgagttcatgaagacgttagaagatttgatgtttccatgtgcgaggttttgtgtatgtatgtgacctaatccttttgctactccgatcatgaatctcaatcgcgtctcccagttcaacgggacgtgaccctcgtctgcgttcttgcctgcagggaaaaaaaaaactttcttcagatgcaagaaaccaatattatcaaataaggtttcaactgtttgtttgcctttatatgttatagaaagtattgcctttgcaaaaatatgaaaaatgtagaacgtaccatgaagacgaagagagagactgccgttagagtcataatcatacaccataagcttttcttccttggaacacacgtaagctcttaagggagcaacgttctcgtgcttaatgtttcctacaatctccatttgatgtttaaaatccttccgggacactactatgtctttcaaccgcttaacagcgataaccttggaatcttctagaaccgccttatacgtcatcccaaaaacgcccttccctagaaactctgcagaagctatcaacaagtcttccaagttaaaagccagattacttccttcaaagaacattactttgttaatttcgctcttatcctccatgtcttcaatattcttctcttttcctaatttagaaacttccttctcacttggcatcttcttagctagtttcaacttatctggttttggttctgtctctgacttcctctgccttttcacatagcaaacgattatcacaaccgcgattacaaagaatatcacgaagcaaacgctaatcgctatcccgagaatcgcgggttcagagatatagatgccgtttttcttttgctctttgaatgaaactaccgccggaggaggggcattttcgaagactaagttgttgccggaaaaagccgagttcccgaatcttttcagagaatttgggattgatccggtgagattgttgttggaaaagttaagtctgcgtagaccggggagattaagatccggaatctcaccggagaatgagtttttagctaggttaagcgagacgagtccggtaagattagcaaatcccgcgggaatactaccgttaatccggttactgtacagatcaagaacagtgagattcgtccacgtggcgtaatcggatggtaatgggccagagaatctgttgttcccgagactaattgctttgagtttcttaagctgcaagaaatcaattgggaacggccctcgtaggccgttggatcgaagactgaggatctgaagctccgatagacggctgatagtaccaggtgggatcactcctagaagacttgctccgggcaagtgaagggcagtgacacgtgtgccgtctatgtcgcatgtgacccctggccacgtggtgcataccgggctgcttgtgttccacgctagagaccgtgggtgaatgatgttgttgaggaaatcgagaagggcttgtctgtcaccggctagatcaccggtgacctgagaatacagagccgatgatccaaagaagagaaataaaacaaaataaaagatgaaagatcttcctctactcatcttcttactaatttctctggttatgtgatggagacttttatatctgcattagataatattattgtatgagaaaatgtagatttttaacgattttgccaagaaaaagaaaaaatcattcctgtactttcccccaatattatggtcttttcatcattttgtttataattttattttctcttgtcaaatcaagtgtatgcactctgagacatggttcgaaactaaaactacacttattcatgcctaaaatgacatttgaattagaacattccaaaagttgaagtcatcaaatgtataagccaaacagattcttcagacgtaattgcaaagaaagtgaagataaaataaaaaataacttacagttcaaatgcggaatctcattaaaggactggctgaaactttagtttgaattcagaagagagaatgccagagccagttatgagaatttagaaagaagaaaagatagaaagaccaaagaagtttggtctgcaaaactatag

SEQ ID NO: 30918 - DNA, 2731 bp, Arabidopsis thaliana landsberg
aaattaaaaagtgatgatcatttagatttcgaatggttacaacataacgtatataatgtcgaatataatacaattcacatttgtctatgtatgggttaatggttatatgtaaagtagttgagagaagaataacagattgtgtttgagctggcttttctgttaacagaaagtcaggaattgtggctgagggaccttgccagcttcaaaagtgtaatgacataaattagtacttctcttctaccttctaaccaataaccatatattataaatttatcacaaatttcctctctaaccaaattcaacaagacaacaacatacgtatatatacttttacaactatatatgtttttttggcatagttgttgtaataacctttgttacttagatcatgcgacttgcatgcatgccaaccccgtacttttagccatagtggtaaaaaacatgacttgttaattcaagccttttagatgtggacgtattaccaactacgttattcttatttcctattactatatatagaacttgtgataaggtatactttacaattttgtgtcctatattaatgttgtcgaagttgttcaccgacttttcctaaaaatacacacatactagagttaccatcacacagaatgtacgtgactactataaaactcgacacactaatatagttttttcttttttttgtgtgtgtgtgtcaaattatggacgtaaaaaaaacaaattatggacgtatagctagtgattagtgactaggacttcatagtatcctcgggtgaagatcgttgtctcttttatgacacattgacaccaaatactcaaaccaagtcaatactttgtctatgttaaacggtataaaattgttaattgtctttaagaatttccacatatttagatgatgatgatcaacgtgaactctccctatctgtttttttggcgcaaataaactaaagtttatcctctaaatgctctcatgtgagacgaattaatatggggtcggtggtgcgtagacatacgatttcaattattcatctgcatacgtttctatttatgattttttgtattaacgtgtttattccggatcaatgtattccaagttaaactgaaaaagcaattgactttaaaatttaacatgttttagttacttaaagaaaactgatgcaattgatatccgaaacaaattggaaacataaaatcctaaatctaaaattttcagtttgtttttaaggttaacaatgtttgaaactcgaattcaaactaaagaccaaatcaatgtaattgtatcaatatattcagtttatttaggttctcatcttcgtggcaatggtaccaccaagtatttgaatagtaacttttacaaacaaacacactaaattaattaattcatgaattgataaaataatagccctaacgaacctataaatatacacgagaggcgatctcatcagtagaatcatatcttctttctcctctactagttacatatcttcaacaaagtgaatctcatgaggatattaccgaaaagcggaggaggtgctctttgcctcctctttgtgtttgctctttgttcggtggctcattcccttagccgtgacgtcaaggttgttggcgatgtcgaagtcattggctactcagaaatcagcaaaatcaagatccccaatgcattctcaggtctagtatatcaatatatgctttataatcttatcaacggtgatcacgtccatatatatatgcatgttgtactaatgctacggtcgataaatgtcccttctataggtctatataatttgattgattatgcatatataaagacactcttctcgtaacttaatataattgaattttctttcgttgcaacgtttgtttgaaataggacttcgagttacgatagaatgcaaggcggccgattcaaaaggccattttgttacgaggggaagcggagaagtggaagaaacaggaaagtttcatctgaatattcctcatgacattgtcggtgacgacggaactctaaaagaagcttgttatgctcatcttcaaagtgccttcggcaacccttgtccggcccacgatggccttgaggcctccaagatcgtgtttctatcgaaatccggcgcaaaccacgttttgggtctcaaacaaagtcttaaattctcaccggaagtttgcatctcaaagttttggcacatgcctaagttccctttacctcctccgcttaatctcccaccgttaacgtttcctaagatcaagaagccttgtcccccaatttacataccaccggtggtgatccctaagaagccgtgtccaccaaaggttgcacataaacccatctacaagccgccggttcccatctacaagcctccagtgcctatctacaagccaccagtggttatccccaagaaaccgtgtccaccaaagatacacaagcccatctacaagccacccgtgcctatctacaagcctccagtggtgatcccaaagaagacatttcctccacttcacaagccgatctacaagcacccggttcctatctacaaaccaatcttcaagccgccagtggtggtgattccaaagaaaccatgtccaccacttcccaagtttccacacttcccacctaaatacattccacaccctaagttcggaaaatggcctcctttcccttctcatccttgataaagatgcaaaatcctctgtctttcttaatttaagaaaagtgatcgagtgatgccacaaaaga

SEQ ID NO: 30919 - DNA, 1350 bp, Arabidopsis thaliana landsberg
  unsure (1)..(1350): unsure at all n locations
aagatagaaaaaatggaggatcagataacacaacttaaagatattttcgaccggttcgacatggacgcagacggaagcttaacaatcttagaactcgcggcacttctccggtcactcggtctcaaaccttccggcgatcaaatccatgttttgttagctagcatggactcaaacggcaacggttttgtcgaattcgatgagctcgttggtacaattcttcctgatcttaacgaagaggtcctaatcaattccgagcaattactcgagattttcaaatcgttcgatagagacggtaacgggttcataagtgcggctgagcttgcaggagcaatggccaagatgggtcaaccattaacgtataaagaattaacggagatgatcaaagaagctgatacaaatggtgatggtgttataagctttggagagtttgcttcaattatggcaaaatctgctgctgattactttggattaaaaattaattcgtgatcatttcttatgctttttcatttattcatttttatagaaaatcgaattcataacaccaggtcttaaagctagattgctcgaaaatttgatatataaaatcagagaaaatagtctttaagatccaaggacgattaaagatgaaaatactcagggaaacagatattcttaaaatttgagaaacaatacgaaatctagaaaacaagctcatgtggtttcattccttgactcaatgagaacctggctccaaggtaaaccttgagctctgggacagcttcaatggatttgnnnnnnnnnnnnnnnnnnnnnnnnnnnncttccttcttctcctgtgggatctccttcttctcctgttcaacccaaagttttcaattaggtaaaggtacaaagacaagaaaacacataataaccatttttggataaaaccaaatatccataagatgattgtatacctctttctcagcttcgaagaattcgccttctgttttcttcttcttcttctcaacaacctttccaaaatacttgtcatcgaatttctcagtgttgactccagaaatgtcaacctttgtggaagttccaatcacataggcttggttaacacgtctcaatggaacaccattaatcttgaatggtcctgaaatgaccatatcaacaaagacaaacattaacattggttccaaattgaacaatcaaaccaacaccatcgagagataagagctcacctgttacaagaagcaaaccagaaggaagttgcttgaggaagacaactctcttgcccttgaatctaccagcaagaatgatcaacactgttcctggagtgatgctggctcttgcacacagagataaccaaaccatattcatatcaaa

SEQ ID NO: 30920 - DNA, 5073 bp, Arabidopsis thaliana landsberg
  unsure (1)..(5073): unsure at all n locations
gaaattctctgaacgcataatattaggtaggtttggtaaaaagaaacactcaggattagtcgaggagttatggttcaacaccccctcaatgccaattccaagccctctgcaagtattttcgagaaaaggaaaagtacataacaactaatatcaccattccacaagatcatatataaatacaagcattatttactggccattaaaatcttccctatatttgtatgttgtgcaatcaagaacaaaaaataaatatgaattactgcttcaatatctccatcaagatttaaccattttagggttgtggactttaactaacagcatatgaatcatatgaattgtgaaacacgaaaaatttgttaagaacaaaaaaaaggctatagggaacaaagcatatcatatatgttgtggtggttgtgaagttaggttatccaccaatgagcaaccttaacctatgccttatataaaaacatatatatttccataattccattcacacatatgcatatagacaactatagcaatacaagaaaattaaacgcaatttattgagaaaatacaaacagcgtgcactatgaagaagacgtcgaagatacaatttcttttcaatctctgcatcatatttggggttgtagtaataagaagatgtaacgcaacgacatactttgtaggagacagctccggttgggacataagctccgatctcgagtcttggacttcaggcaagcgattctctcctggtgatgttataagtaagtatctttgatcatgttggcttcatccaactatatatatactacataattaaaaactcaaattaatttacagtttcccttaatgaactaattagtctaattaattatgtgtataatgtttttgcaagtgttccaatactcatcgacgcatagtgtatacgaagtggctaaagacaactaccaaaattgcaacacaacagatgcgatccggacgttcacaaacgggaacacgaccgttgctctttccaaaccgggaaaccggttctttgtatgcggtaataggctccattgcttcgccggtatgaggttactagtcaatgttgaaggcaatggcccatctcaggctcccgtgggatctccccaagccgccacttcagggattcttcaaccatcttctaaaaagaataaccctgcgaccggagtcgctagctcagccgcccgttttgttggcgacagcggttggaggggtaccatgggaatttttgtatattttatggtttttgcttttccattcatatggttttgctgattaaaaactatctataataagtgttttcatgtatatgtgtattcatatttgccctataatgagtgagagtatttatttgttgaatttctttatttttgtttgagttcatgaccaaattaaaacctaaatttttggttcgttatacaaatttcgttttgtttgctcagcaaatttcttacaaaaatgacatgtaaacaacgttatgcttaaagttattaatcaatcaatgtataataaaaaaaaaggaattagattctttgactacattgaatttgtatttgttcgattcgatagcggaaaattcaaaaaataaccgatatcggtttatattttaggtaattttatctggttcggtgtagtaaattcaccgtttgaccgtatctatatcacagatgattcactgcgattaaaagttgtggttatcactatctaatcgtgatcgctaccaaaacgcaaacgctagttaccggaagacacgtcttgagtttcgcagcatctctctcctctcctctgttcatatctctctttagaaatttctcaatgaacatactcaacagattgggtttgggatcaagtgggcaaaccaatatggatccttctccgatcgctcagggaaatgacgatgacacaccggcgccggggaatcagtttgcnnnnnnnnnnnnnnnnnnnnnctgaggtgtcgagctggcgtttcagagagtcccaggggtgactcagaccgaggctggatacacccaagggaccgtagacaatccttcatacggagatgtttgttctggtaccacaggccattcggaggttgttagggttcaatatgatcttaacgattgcacctatgagtctctgcttgatttgttctggtctaggcatgatcccaccactttgaatcgccaggtatttttggatccaagagttgaaagttttaacctttcaagttcggggattgagaaagattctgtctttaggattattgaatctattgggatgtgcctgagtctgttgtgctttggggatttcttgatttttctcaaatctgatagctttctgattttcatcaccagtctttactttgaaactttttaaatttggaaccttgatcatctaagtagaatatgaggaaggaaatgatattgaatcttgatttttgttgaattatgaggcttgagttggtaactttggtcgttgatcttagtatgatccagattatgtagtagctctgtaatctctcccctgttgctccctttttatgaggtagagatacggatttcagagaggttcttcttgttctgttcatgatcattgattagcattggatttcatgtttgtttatattgatgttagtttggcttatcatttgtcttgcatctgtgcgcagagaactataatcatatgcaagtttctgctagttttgtttgagaaattcactagcttatagtcaaattatctcgttggggttcatagcgaagtattctcaaattctacgcatgtacgaaaccaaatcgtaagcggtctgtttaggttatatggttttagcaatttctgttgttgcaaactcgggacaactatctcgatgatgttaaccttgtgtattatgatgaaaaaaaatcctatttatgcttttttccgacaatttacatttgcatcttctctgactttcaatagcatatactgaccagtcttatgactgtttatctcatgagtttgatttctctgtgtttactatcataattttagtttaagtactcagttttctcggcagcctacttccatgctaaattgatactttgatttatgactttgctgtgatcagggaaatgacgtgggaacccaatacagatctggaatatacttctacacacccgagcaggagaaactagcccgtgagtcacttgaacgtcaccagcaacaaatggagagaaagatcatgactgaaatcttgccagctaagaaattctacagagctgaagagcatcatcaacagtatctgtcaaaaggtgggcggtttggccaagggcaatccactgccaaaggctgcaacgacccaatccgctgttacggctaataagctgctttcctctgtccctctccgaaaacagaggacttagcatcaaaggacttgtgtgtcaaatagatagtgtaaaacttgactaagttgttcacacgctatgtaactacttctttggaatttcattcgcaatgttgtaatattgatgttatactctataaacataaaccaaataatcattgcgatccttactagatctaaaaagccatcaacatggtaaatgtagccaacgaaaaaaaaaaaaaaaagagtgtaggagggccattcctttattagagtaatgattctctagttttgattgcataaacaaacgtgcccaccaacctacaagttgcatacttgcatgattgtttattattaagtcatccttcatagttcatataatagagcttagaactagctagttgagtaattgaccaaaaaaaaatgtgaacggtatcaaaagtcatttcataaacacatgttttccaagttttgatcaatattatatctgaccaatctatagattgtctttctcaaatacgaattgatctaaataatttcagaccaaccaatttttttgaattatgtttccaaattataatgatggttgttggattttttttttaaatatagttgatacagtatttctatatacaataaaagaaatgacgcgtaatatatccattattcattaacaatttgaccaaattataaatgctacacatagtattgattgaatgtatttttcttgtgtgtcaaatactacttacattgaaatatgaatattcctatttagcgatgatttttaggtgttaatctctgactagcttctttatatatataaacgagcttcccgaggtctcatcatcaaacaatacacttaacaatggattcttctctgaaaactcaggaacctcaagtagtggaaacttctccttctccggtagctcaggagcctcctcaagtagctgacaaacctgcgattgttccttctccgatagctcaagagccagacaatgatgtcccggcgccgggaaacgagtttgctgagttcgccgccggttgtttctggggagtggagcttgctttccagagaatccctggcgtgaccgtgactgaggtcggttacactcatgggatctctcacaatccgtcttatgaagatgtctgtacgaacaccacgaaccatgcagaagttgtcagggttcaatatgatcctaaagaatgcacttatgagacacttcttgatttgttttggtctagacataatcctaccaccttgaatcgtcaggtatcgattcttgtttcgatttgttggtttcttttctaaattttctgtttgattaccagaggatctagtgttttagtgtctaattttgttaatttctggtcaaatttatgagtcttgagacttgctctgctttcagtggcttctcaagaatgttgacttctagttgacttttttttgggtggaatcttcttgttatttccatcttccgattgttttggtttctgtagtagtgtagagacatgtatatggtaatggttaaactgaatttgtgttcttatcttgaaatgaaatttgatggtgcttgtcattgtcctcaattatagctttcatagtgaatgtgatcttgacaaagttcaattcctaaccgatctttaaactgttgcagggagaacttttgggagcacaataccgatcaggtatatacttctacacaccggagcaagagagacta

SEQ ID NO: 30921 - DNA, 1681 bp, Arabidopsis thaliana landsberg
ggtttacctcttctaaaacagttatcgtagccggggaatagtcgagctggcgagccccgtggttggataccactattccatctacaccggcttcaacagccttaagagctgccaacagcatcatacaaagttttcttttatatgccttggaatttctatagagtatatgctatatattagactacgagtctacgagacatggatctttaccgtcttcacgtgtgagtaaccctttgaccagaattggcaactttgtaatagatcttaaccattcgatatcctaagattttgcagtgcaaaagattataaggaatgtattcacatgggaactttgtgtctaatatccaaggaaacaaatagaaccattcacaagattttaccttccagcttaacgaagcatcaaatgcactagaggcaaaggcttcaacccctgaaccttcattctaagagaagttatcatgttaacaactggtaaggtttaactttacatgaatcttaattcaagcttttttactcacaggtcggacttcggttgaaactaagccttcaaaattcttcagctgtggggatatcattctacagaacaaaaaaatggaacaccatttcagaaaaatttttttataagatagagatagactaagcaaagtaggaatgcttattcctgcatgaaaatatcagagtattacttgttctttatatctgcttcccttctaccaagtctgggaacatcaacagttagaactatagccttgaatccagctttttcagctcttttcacaatctgagctgttacatcacgtctcttgtacacctatataagatatcaaagcgagttaagaaccgaggcctaaggcccgaaccaaaaaagcatattttggaggaaatgagaaaagcagctaaaaattcagattgtgtatttacatatatttgaagaaaccgaacagcgttacaactggaagcaacctcctcaatagtgcaagtagacatgaatgatactatctgaaatcacacaaccaaacaccataatcatcaccttaaaatccaaacaatgtaaaaatgcattccaacaaacaccgtagtaccatgatagtgttacacgcagctgcagctttcgctgtggcgatttctcctaacatagataggagacaaatcaaatcaattttccaaatccagcaattgtatacagttgacagagctagttatgaacataaaactaaacagacctttaggatgagccaacttatgcattgctgttggagcaatcatgatgggagctgagattgggtaacccaatatacttgtagacatatctatgttgctcacatcaacaagaaccctaggcctaaacctgtacataaagcacacaacacacaaacatatgacacggtgaaatcaagtagatatagcatcatattgatatggattagttacatgattctacggaaagcttggacattttcattgagagtgtgttgatcctctgctcctccattgtagaaatcatagtacatcttagggagggcctgtttggccagctcttgaaactcatccacgttaacgatttgatccatttatctacaatttcatataaaggaaagaaatttagaattaaagaacacactgctttaataatcaaccatgcaagaatcttgctcctcttgtcctctatcaagattaaaca

SEQ ID NO: 30922 - DNA, 504 bp, Arabidopsis thaliana landsberg
ttgttaggacaaggcggtttcggatacgttttcaaaggtatgttacgtaatggaaaagaagttgctgtgaaacaattgaaagaagggagttctcaaggagaaagagagtttcaggcaaaagttgggatcattagccgagtacaccacagacatttggttgctcttgtcggttattgcctcgcccagtctcaaagattgctcgtatatgagtttgttcccagcatcactctcgagtctcccctccatggttagggaaaatgggtgacttagctctctttgggtttcgttcatgctctaatgttttcaattagtaacctctgggaatcaatgtggacagaaaagggcggcctaccatggaatggagtccaagattcaagagggctgtgggttctgccaaaggaccgtcttatagtcatgaaaattgtaagtctatagatcctgtctatggatagagggccggttttttcatacaaccacacaaatttcttcatctgtaggtgggtc

SEQ ID NO: 30923 - DNA, 4453 bp, Arabidopsis thaliana landsberg
ttgaacacattcaaatttgtttttcaattccaaaattcttaattttgagtgggtttttcttacattataaaaatgtgtaatattttaggtttaatttaagacaagattcatgaacggaatatattgtttgggaaacatgaggttctaatttaaagtgaagatggtctttagacctacaagagttaggtagttacgtgactctttttacacagaatttttggcttcttatttcacctacacggatctaacattatctaattagggcaaactttgcatacttagaaccctttctatagcagtaaacactaagcagtataataaaaaaaacaaatctagccaacagaatctgattgatttttcttcatgactctaaaaacgtgtaattcaagatttttcatgggttgattaggtaaaaagtaaaaggatttgacaataattaggcagcgatggcaggtaagattatttgaccctctgactaaaaaaaacaaattatttttccctatcaaaattgttaattatgattccacgaattctgaaattatcaaaatctaaactcatttatatgaagataaacaacaatgcaaagtgactttcaaactgttagctcttacaactatttaagtctaaatctccaaatatatattaaaaagtgtgatattccgtcgccggaaaagcagatttcggccactctaacggccatgagtgaaactggttcaaaccgttcaattacagaatctttacggtccagtcttggtccactcgaacacccggtttgcggatagtcaacacctttgtacccgaggaagctacaagcccacccattcgcagaggtcccatctcaatctctgccttttgattcaacggttccaccaacgcagattttggacctgagctgtgtcccaagaggataattctgtcgatcaagcattgggaagagagacgagcttctggaggagctaagttcgttgatgtaagaacaccctttgagaagacgaagcgacgatggatgtaagagcctcgtctgaattcaaagcttttgccgtcatcgatgtagagttcaccttctgcttcttgagaactgttcaaagctaccacctgaagggttttagatgttagatcacatagtttatcattgggatttcactttcagagataatctttttaccaaccggttttactttgttcatggtgctgatagcagatgataaaacagtgtgatgcaagtgttgtacgtaccaaagtataaggatcattgtccatttgagaggaacttcgcctaaaccggtccttccttgggatgatggttcctgccttttgaaacgcaggaatactctcctctggagcatccatcttgtgagtcttgcctccaacgtaagtcttaccgtttctcaagtcataccatgattctttgccaggcaaatacacggaagcttgcgttgttccctaattttgcagaaagacgagaagagggtatgtggcagggtttgatcatttatctggagtatatgattaagtaaagagatacaaaggccaaaatataaataagtaggaagttgtacttagcgctcaagtaccttggtgtaaactccttgaaccagtagaccactaccgaccatgaaggcttcatcgatgctaaaagtagcttcatcttgcgggaattccatccataatgggcgtacaacaggaacacccgtaacgtttgcttctctgaacaacgtgtagaagtatgggagcagtgtgtaacgagtgtgtatggcatctctcatgagttctgtgttccgttcactgaaacaagagaacattgatttgattcgaatgagaaagtgcaacatttatgagccagcaaaacaaaggcagagagacttctggacaaccgttgcaatgcctacttgatgaaactaatggcctaactatttagacaatcaactgactagagtgcaacaccaggttttattttccgcaattgtattcttttctcaataaccagtatcaccacatttcaatctgcttgatcatccatcaagcaaatatccatagactagagctggaccgcatactaaaataatacctcttgacaagaaaaaattaagtactaaatcacatcttacccaaacaaccaaggctctcgtcttttggtatcgtgatgagcatgacccctgaaaaatggatagtaagcacccacttggtaccacctaactagaagttctggttcaggatttccaaaaaacccaccaatatcagctcctgcaaaagaaaagaaagcatccattaaatttgagaaagaaaaaaaaaacgccagcagaatttgaacagctaaatttgtttgtaccagagaatgtaattccagtaagaccaagtgtcaatatcattggaatggagactctaaggtgttcccattcggctgtgttatctccagtccaaattgctccgtatctttgagtgccgggaaagattgctcttgacaatacaaaaggcctatcctttccttcttcacgcataacaagtccatcggaagtcgccatgtgaaagtaatatccatatgcgttatgaacttctctgtgttcaacacccccaacatgtaatgcatctcttggcatagtaacctactccaacaaaaaggaaagaaaaaagtgccagtcttcatctcagtaatagacttttacatatatgatatactttctacgatataagcaaatcagaggtggtgatatgcaaccatagcttacactccactcttaaagaagtcagaaacaaatatccaatgtaaaaccacataaacataaaatggatcttaaaatacttgctttagtggtgcaataattaataaaaggtgtcatactatgcaagataagggatgtataatctatcagagttcaaacatatccataactgtgcaatagaaaaacaatggattgcaatattcaactgcaatcccaaaatgaatatgagaaagtgagctatacagattacagaaaacaataacggaacaagcaaaaaagaccattcagacagaaagttatacctcgggaccattgaatacggaaggctcattcatgtcattccaggtgtacaatgatggagttgaaccaacatagttcttatacgagaacctcccaccccaccattttctaatctctgggctcaacatatcaatgtaagatgatgaaccaggccagcaccaaccatcaaagtcttttcctgatgaatccttaacatagtatcccatctgagtagcctccttgtgtaagaagtatgagtcatccctcttgatatgaggatccacaatggtcaccatcttcctaccctttgcagccaatttcttttgcatctcctctggatgaggaaacaacacactatcccatgtaaagtatctcttcccatctgtatgctcgatgtcaagccagagaacatcataaggaatatcgtgttcatcgaatttcgagtccacctgtgccacatcctcttcatctttgtagttccacctacattggtgataaccagtggcaaacaactgaggcatggctgaagtacctgtcacacttgcatactgctttacaacatcctttggctcagggccgacgaaaaagaatgtatccacgatccctgcctcgctcatccagaatgtgtcgatcctactctgactagaaggcaaagaaataccactctctgcatcccaaccattagccaacacatcaatctgcatttccgcagcattcaaccagaaaaatcctgaagttttaccagacttcccatgcgaaaccatgaacggaatcgacccgtaaagcccaaacggtgattcatgatcgtattcaaacacatctagattaaacagcctatagggttcagattcctcaactccaggacccttggtaggcttcaacgcgaagctagtggcgtgttcaggaattccataaacgaaactggaatcataaaacgaaacatcgaaactaatagattgaggaccagatggtctagaatctgtatgagtcctaaatttctcttcccagttatctccttcagttttcctccccaactgctcaaaatcaaataatccatgagaattcaatgacacaacgcgacggcgatcacctgatttctcacgcacatacacctcaaacggatcgtgtcgcaccaccgcctcgtaaccatcggatacataaactactgaagacggactagtgtctccagagatcgtctccgtcgctactttctgcagccagatcttcttctcctcaaactcagacactaccacatcaggaacttggaacctcttcttcggcgggttcaacgaatggtcctcatcgattttaagccgcacgatcccatccttgtaaactgagagagatagaatcaacggcttgatctgatccccatcgcctttaggcgctttcggtagaagcttcgctacgagatctccatcagagatggaaacatcgccgacaattagagaaca

SEQ ID NO: 30924 - DNA, 4109 bp, Arabidopsis thaliana landsberg
aaaattctcgaatatgttgtagctgaagcttgagtgttctcacataaaatcagcaagaatttgtattcaatgttatatattgcgaggttatcagttcgaatatgtatatgaatgcacaatcttcaagtatccacagtttagtttgggccacagctctagatcataaccaatagtaagtaacatctatatttttggaaatattcatcatcttataaaagtccttagaacgtattatcaaattctcacgtttgtctctgtgttacaacagtcaagcgtgagaccagctatgaatcctccagtaccaactgccgaaagaccagataaaccttctggtaagcctcaaactctataacctgcatcttgcctaagtttccgtgtatcttttcgtgtgtgcttctgcttctttgcttcatcaaacagtttccctatacttgcacatgctaagaagttaggcgctaatcaagtgctttatggccacctaggagccgattagtttctgtattttctttttcttcatttaccaataataaaggttcatcaattttatatgaatgtcttaaatgggtgtcaaggcctattcgtctgttgcttttctgttaattgactcggtaaaccatcatgttccctactgatagtttggtgtttgaacaaaaccggacatagtaaaccaaatatttgtatgtatacagctggagctgggcaagacagtcgcgatagattctcaggtgctttagaggcatatgccagaagaaatggctcaggaagcggtgtggtacaagctgatcgatctagaccaagaacctcagagaatgtattagcatcatcaaaggatacaacaccagtgagtcatttctaaaaacatgaaatcttttctatattggcgattcaaatcctttcttaatctctttcttgatcaaaaccagcaaaactatgagagagtcgaaagaccaatctcttcaacaagacacgcaagttcttcaagaaaagctgttgtatcgagcgtacgagccacttcttcagctgatttcacagagaaccgctctagcagagttgtcccaagcaatggccgttcctcaaccgctcagagaactcagctcgtccctgacccaaccactagaccgtcatcttcttcttttacccgagctgcaccatcgaggactgctcgtgacatcactctccagagctttgagctactcaccatagggaatggaaagaggaagtgagaggcttggctctatcgtgagcgagttggaggacactgcgacattttaatggatggagactttgtttttatttcacgaaattatcggtttcctaatttaaggaataaatcgaacatcatttgattacaaattatatgtgataaagtatatggttttaacttgttaagctcatcactaagtaccatgtgttttatcacgtactaatgattcaaatgatccatatggatccaatggaagcattagacggatgctggaaatacataccattgtttaccgttgagagattaagaaaaaggtcacgaaaaagaagccatgaatttcgagccaataacgacataaattatgttcactatcactagctcactcacacggtcacagagaccagtggcgacatgcgaatttcctattttaccccgaagttttcgcgatattaccattttagtgccccgcacacacacacttcctcggaaaattcgctctcactcttccagctggaatccaaagcagacaatgaagacaaaagcttctctctctctctctatttctccatctctctatgattgcaatttgtgtttttattcggatgattacttaatctgaaaagttttgaagatctttggatacttagcgatgaaatcttcgactcggcttgactcagttgcttttcagctcactcccactcgaacccggtaagttaaatttcgtgtaaactcttgttttcgtcagctttagagaagcctaccatggacttgatcctaaatgttaaatctttgtgtgaaattgttctttggaagtcgaaaggttgcatttctatgttcattgatatgacaaaaacattgttgaaagtgttaaactttgtgtgacttgttagagaaattggttttatggaagtcgaaagattgcatttttatgttcatttaaaagattaaatattgttaaagtgataagttttgtgttagttttgtgttagttttgtgagaaattggttctatggaagttgaaagattgcatttttgggtttcctaataagatcaaaagttgttataatgttaatatttgtgttagttttctgagaaattggttctatggaagttgaaagattgcattttttgggttcattaataagatcaaaagtcgttgaaatttgtaggtttcttaccaaacttgcaacgaaaaatttaagtgtttttctttgcattgattaattaggtaggtaacagctaatgtaaaataatttctctcttttattgtataaactcttgtattcgtgagcttcatttacttaagcagaaaattgttgttaacttttgtgaagaactgttcaatgcaaatagaaagactgtgttcattgataggttcaaaagtcattgaatttttgagtttgtttaccaaattactatggaaaattgaatgtctttttctttgtggttcttacaggtgtgatttgttggtaacggctaatggaaagactgagaaaatagctacagggttacttgatccatttcttgctcatttaaagactgcaaaagatcaattggaaaaaggtggctattcgattattctcaagcctgaagcaagtgacaatgcggcttggttcactaaaggaacagttgaaaggtatctaatctctatcatagatattagttgtcttcttgtgttgggattgtacactttgagatgagcatttttttcttcttttgttcttgttaggtttgttcgatttgtgagcactccggaagtcatagaacgtgtttatactttagaaactgagatcatacagatcaaggaagccattggtattcagaacaactctgaaatggcattgactgttgtaagtatattgggatttttgaatactttccttggtgtatggtcagaagtacttaatggtatattgtataaacaggtgagagacaatcatcgagcaaaaatagcggataatgcagaaggtatgccataaggattaaattatgtaatttatgagtctctatgctagagctacagatttggaaaaacaatatttccgtctcaggatttgactgatactaagcaaatctcaactcataaaatggaaaatagtgtgtctcttggctattgatctttctgtttaaccaatatgtgagaatgtgaatcaggtagcaggcctttgctacagctcaacgaggagaaagctattgtcctttacgaggttaattagaactgaaatggtttctataatttaaaggaccttttctcttatttttctcttggaacaaacaacctatatcatcttctttcatttgaacagcctgattcacatccaaagcaagcaaatcggtctacctcatcagatgaaaactctaagtatacccctttgcatgattttttttttggttttcaatgttttttaacaaagagggtagttaagtatctaattggtaatatgtggaattgtatcagagctcaagttatgaaagttcttgagacacggaagataatgttgcagaaagaacaaggaatggcctttgcacgtgctgtggcagctggttttgaggctgatgatatgattcctcttatatctttcgccaaaacttttggagcctcacgtttgatgtgagaagattatagtttacaccaatttcttctttgttttgcaaccaataatctcatatccattaaagtcttcaagtttgaaagaaacttttcatagacttacttctcatgtttggtttcaacatgttatagggatgcatgtgtgaaattcatggacttgtggaagaaaaagcacgaaactggccagtgggttgaaattgaagcaacagaagtaatggcaacacagccaaacatgtctgccatgaacgactcatggattatgttcgccgatgctgctaatatgcccgggacacc

SEQ ID NO: 30925 - DNA, 5139 bp, Arabidopsis thaliana landsberg
  unsure (1)..(5139): unsure at all n locations
tttatacggcaggctaatacaaatgggtatatctagaaccattacatatcaaaccaaaaacagtccaaatatatcttgctgccatatataaattttgatactatggttcaatttatgatataactcccaataagagtgagacgaacccacctcaaaaagtagacgtgataagaacatatatgattctcatttatctctataactcagcaacacaacacaaactcacaggtaattccagcaacaagactacaggaaccagtaaaatagggtttgcttaaactctcccaagcctaaatgccctaaagcaaaaccaaaaccactgagacctaaatctgtctacgatagctaaaaagaaaaccttatatatcagcttgtaaaagagaatatgagccaacattattaaattccagcgataacacttatcttcaatggtttatcaaagacatcagtaaaacagacggcataaggacctactgaaaaaaaaacagtatgtgcaaaagagagccaaaggcatgacaaaggtacatttacttttgctttcggaatcagcaccagatgaagatgtgtatggaacagttgcagattcaggagtgccctcgagaagcgtttgcaaagatggcagggcgtaatgtactcctagctgcagctgcaacaactgctgcagacattgcaggaaacccaattcctttgcaattgactacatcatcatcatcacttgcatccaacaagtccaaaccacccatagctgctgtagttagagaaagatcttcctcccttataatatgcaaaacccgtctaactacatttcccaccgcaagctctacaaaaatcatatccgtatatatcaattcctttcacagactaagagagaagaagcaaaaagagagtttaagaagacataccaacaggattagcagcgatcaattgctcaccaacagctttcacagcatcgataagagcggcagcttggttagcgtgaggcacccgctgatgcgaaattactgacctaagtagctctacggtgtatttggctgtagcctgtgagccctcaatcttactgtatgagataatgatccaatcagcaactatattcacaaagggttttacgaaattaagccagaaagaaagaatttaccgctttctgagcttgttaacaaattccaccaccgttgattgaacgtctggcatcttctttaaccgaaattaacgataaacttgagaaaatgcgaaacctgaggcgttagatttcataaaccctaatcacgcgcgattcgcggcgggaggaagaaaaaaatgggagaagcctaatgtggaagatgaggaagcaaaatggaaatgcttaccagtgaatatgtgacggtggtggggcgataaggagatgaagtagcaaaaatattccggcgagagagaaacggaattgataataggagaccagctttttacattcattcgctctagtgacaattgaaggttttttggtaggtctaacttttgggccgaaataaggtgctatttgggcctaaaataagcccaaaaataaaagcattatcaaagtatctccttccctttgcatagcttctttgggacccaaattttagttttgtttttgaggttttgagtcttttgacaaaaggagaaagatcaaattgaacaaggaaacttaacacataacataaaattgaacccaactacagtatctcttattccttataaccacaccacattcttattcagaaatcaaaatatttctaagcaagatctatacattgaactgaacaactgcctgagagattcggcagaaacatttctctatatatacactaccagaagatcatgaagcttttcttctaaccagacttgttcatcatatgcttttctttccttcttgttcttctgcattcccattctccttcagcttatatgcaccatctacatacaattccgtgtcccacaggaatgtcccaaacgccacagcctcgagaaccaaccgcttcagactcgaaaacgatgtcactatggtctcatcactctcttccgtgccaaaaagagccaaactttgcttctctatcagattccttgcctcctctgtccttggttttgcgcatctctgcaatgtctcgggatcaaagtctgagatgtaatgtcnnnnnnnnnnnnnnnnnnnnnnnnnnncagtgcccgttgtgaatgagcatccaaagatgggacttttcagatatccgcttccatgaatatctgataaggaacactcaagctggtgccttagggaagctgatttcaagaagtaaccgtacaagatcgaggcagcatatactttcctgagatgcagtttctgtatctgcgttgttgcccaattgtcagtcacacatgagttgacccgtaatccgatgactgcgctaacgtgttctttgatgatctcaagggtatcgcagctgtaaattgactctaactcccagtcttttgaaggccagatctcgagtcttccattatagatgcatctggatagctttggaacaagagggactcttatctcggagtatttgtaaaagattaacatgtacattatgtcttggactgcagttttacagtagcgttccttgagttcagctatccttctgccaaccatggaatcagagtgttagtgttcgtaaaagagcagaagatagttgagaaaatgttcacaaacagagcataaaatggcctgagcaagtcagagagtttaacacaggcaagaaactaaaatatacggaaactatttaacgaactaagcaacactgaaatgtaaaaaagcaaaaccagcccttatcaaacactaaaacaaaacttgcttctcaaggcagagtatgagaaagcacctgaagatcataactacagaattctcttgtttcaattcaaccatatcattagtgtgattctcaaatcatcataaactgataaccaccatcaaacaacttataatcaaactttacaagcttatgtgataaatactaataaaatactgatttgtggtcgattaaataagagtatgtaagtaatgatttacacatatttctttgtatgtttataattctacagctgtttacggatctttgaattgtgagagattagataaggaaaggtttcacggacctgtggagagaagcctcatcggaaccagagctgagagacatacgagctaaagcagcttccctatcatcagccagttgctttagctcatcagcggcggcgtaatgaaatagctgccgtttgtttagcaacacgcttctcagaaacctcccctgcgccgatcgtggctcaagcggcgcgtttagactgcttccaggctcacaccgactctgtcccgccgccgcaaccacaaccatcgaactatactggatcttcctcttcgccggaataacaaaaccaccgcctccatcgccgctctgtctcctggaacgcgacgggagaaactgaagcgccgtttgattagagagacaactatccattgatcagatttgagcaataaaaaaaacctagaaacagtgggaaaaccctaaaaggatctgtgatttgagagaatttcgggaattgtgaatgagagagagatgaagaagaatgatttagcggattagtgggagaagtggcgaagaatggataaggttgaagagagtatctttttgttactatattattccgtttctatttttacataaaaatatatttgcttctgttttttccaatgggctcctcaattcggtgtgtggttattgtttaactccaacttgacaagtgcatatatgtcattggctattatgtaaatcttattttcgttgaaatcatttctcattcacattttctttagctttgagccacctggaaatttcaaaaatcctagattcaaacggactcggctaaagtctaattttacaggattagtaaaacataaaacttggaagtttagtaaaccacaattaatagtataagagaatttgatgaataattgtttcaaagtagtatagtttacgtaaattagtttagtcgtatgattttcatattcattatagttaggtggttgatgttcacagatatttgtatattctatacacatgggttatagtttatgtatggtacacacagtctagattgatgaatcatgataccttatctcaattattggcaattttataaacaaatataagatgacccatcgtgttctctgcctcaggctctgagtgttaaaggattggaccgattggtggtcctctaaagccatcttagcttatttgtaaaaaacacccctacttttcgtcaatcatgcatcggctaacaatttgattatttgtttccttcccttgacaaaagagttgcaaatttgaacccttattactcctgaacaagggttcattgtgtgttgattggtatatttattaggtttagtgtaacactagtctatcaaactacaatgatacttgaaatgtagttgtcatcgcttggatctaaattagaagttcaaatttgtattttagacagaagttgatactaattacaaatttcatcggcagtattttggattgatgtgtggtaaaaaaaaaagttagaatgaaaaagcagattcaagatttaactactttggttataatcaacttctggccgtaacaaatacatatatagtttccggctatcaaataatttatgtttgttttgctattttataattgcttaaaaaaatgttttcctgcttttgaaacgtatacaaagtacaaccgcggagcgggtaagccatgagcccatgactcgtgcgaggttttgactttggatgacttctgaatcgtggtattgaatactttaattattaggataagtggaagctcctatcatagcggcgtgtacattgtttgctatcacttgggtggtccacagcctaatctagagttttaacccatcgttctaaaagatttcaaatgtgaatagatgagacaatggcatagatgtaagtctaagtgtatgttcgatatagttgttaaactaaactcttttaaaaaaaatatatatatattttgataaatctccatggtgataccccaatggtacaaacacaagttaaaccacataatttaagtgtcatagtctagttacttactatgtttttttcataagggt

SEQ ID NO: 30926 - DNA, 2247 bp, Arabidopsis thaliana landsberg
gggcacgccaccttcttctggaatggaaaccgatctggatatttcaacgagaaattggaggaggatgttgaaatcccaagtgacagtggaatatcattcaatgtccagccaaagatgaaagctctggaaattggtgagaaggcaagggatgcaatccttaggggcaagtttgatcaggcgagatggatgcatagtcttatgatcttataatcgaacatcccaggaaataagcagtgaacatcttatgtttcaatattgattttcaggtgcgagctaacattccaatgaagatatggtgggtcatacaggtgatattgaagccacggttgttgcatgcgaggctgctgatcttgctgtgaaggtatgttttataagtttattgacaagtcttaatgatgatatgtgtgagtgtgtgacttagcccacaaatggtttggttgttgcagatgatttttgatgcaatcgaacaagtgaaaggaatttatgttgtgactgctgatcacggaaacgcagaggacatggtgaagagggataaatctggcaagcctgctttggataaggaagggaagcttcagattctaacctctcacacactcaagccagtaagtccatatctgtaatctgtgttattaccataacataaaccattggaccatatctgatgggagattgtaattattgtttgtaggtgccaattgctattggaggtcctggtttggctcaaggagtgagattccgtaaagatctggaaacaccggggcttgcaaatgtagctgcaacagtgatgaacctccatggatttgtggctccctctgactatgagcccaccctgattgaagtagtggagtagaagaattgagagcctaatcagtttttgaagagagggctgaaactctctagttatcttttgttgcttttctaataataagagtttacacacagactacttgtatttttgattttggctttaggccaaaaacattgaaattccatcttgaatgatatgcaagcttttttctttctctcccatacgatctcttctagccaaggataaaatttgcattgaaagagaggaggattaaacatcttcagattgtacttacatttggaaccaaatagatcctgaagcattcaaatttcttgactcttgcaaagcatacaaacagagaatatctcataacctttatacaaagtcatgactcatattaaaaaaacttaccaatacaaagtcaagctacgtctccttaaaacttgtaagcaatacaaaactcaagtttttatgcagaagcttccatggctatggctacgtcctcttcctctccagtggctagcttagcttctttcagtttgtgagaatcttcaacatcctcttgtttcttcaatgcctgtgctcggaaaccgaccattatctcctctgctttttcaaccattgccaacatattcccatagcgagtctgcagtttactctctgtttccttttgctttatcacttcctcttgcaaattctttttcctaaaagatgcagccatctcttcttgcctcttcaatgctttaaagcactctacttctgttccaccaatctcagcctgcttcaatgtcgcctctatttgggtccacacggtctctgccctcctctgtcaaatgtacaaatccgttaaacattgacaccaaacaaaatatagtttcagaattaacatttaaggcaatgtggactatatgttacctcatgaccctttgtataagttttgtacttggccttcatgtgttctgccttcttctcatcctcctccatcttttttctcacatattccatctcctcctgaaaagctgcaactttgtccgcgttcccagcaacacttgagagctcgtaagcgcttttagcggggaaatacatgagatcattcacgcgtgtgtcgcgagcttctacaaatcatcaagtgccatgatctcatgtcccattgacacacacagaaacttcccctcctcctttatcattttgtcagcctaccaaaaatcataagcaacaaccttcattcaaaactccctagtgtataccaaattaattacagatgttgataattaaggagggattaacattcatgccaaaattattaatcaaacaatctagcctaaaccaggagagaactaaggattccagaggctggccaacgaattaatcaatcaaaaaacataacaaaagtaaactgaaattggatagatattttcatctacatacctcttggagct

SEQ ID NO: 30927 - DNA, 3998 bp, Arabidopsis thaliana landsberg
gaggtccgagcaaacaaggaaccttttatagtgagaataaaacccaaaattttctcgctttatcagttcggaggctgccctttaacactattaactagcttaacttgcttacgcattgattatactatctgtatggatctataagtattatgagaatgaactccctggagcgacaaacaaaaatgctttggtatataatcctttctctagtctctatatataatatatgttccgacggaaaaccccttttgtcatgctattttaagttctcgatctcatttaacttttaggaaaagaaggagctggaatgttgtcgacttgaatgcgttactcttgctgataggcttagatgttctgaggagaatgctaagcaggacaaagaaagcaggttcgtactttgcatttctctactttagaatgttacaattatatctcctttaaaattttctttttaagcttttcggcacttcactgatctgtatttctctagttgatgactatatctcctttgacttcagtttttatgttaccatgtagcctggagaagtctttggaaattgatagactgggtgatgaacttcgatcagcggatgctgtgaataagcaatctcaagaggtaagaatcatttcacaaaatgttttctctctgaacgtctaatgcagaggttgtattacaattttcgatgagaaaactaaatttggaatgttaatcacaacacacctgactttctggttatggtattcatgcttttggttagttaaagatcagatgacatcacttgcaaatttgttatgttaaagatgcaaactttcctaaacaaaagttatatgtgcacctgcaggttctcaagtctgatatcgacatactaaagtccgaagttcaacatgcttgcgagatgtcggatacatttcagagagagatggattatgtcacaagtgagcgccagggtttgctagctcgcatagaggagttgagtaaggagcttgcttcatcaaatcgttggcaggtttggtttacagctcacagacttgactctattacagatatagtagtaaccattcattctcactaaaaccctattactgccgtcagattgaaaatgcaaaaaatccaattcaagatttgactctcaaaatctcaagccaagaaaccaatctgcacaaggtaatgccaagtgaactttctgattatgttttttctcattgattgagattgatcctttcctccaaaagaatcaatgcaagaaaaactgcagtttcaacgagagccattgttgattgtgtgcgatatgttttaacttcccgggtataaccagttttcatatttttgctggatatgattgcaggatgcagctgcagaaaacaaggagaaggcaaagctaaaaatgagacttaggggtacgcaagcacgcttagatgcaatcagtctacggtacaagcagtctgtgcaagaatcataacttatgaacaggaagttcgaggaggcatctgctaagctaaaggagaagttagcatcaaaagcactcgaagttcttgatctcaagaagcaactgtatgattcttcacgaacaatgtgatgagcttacatcacaactcttaagtagttgattcacggctagtaaatgtcttaaagctgtaaactgtgaaatgattaacgtcataatcacaaagaactgatgtgattatggaagagtccaatacatatataaattatgataggtagattaacaaattacatggagtttatatatgctaaagtaattaagaggagaaactaagggcattttggtccaccgctcttggtcttccagttgttgtagcaaggacatacttgcttattgccataagtacctgggggcacacacaagcacttggtacaacatttgttgcagaagaacaaacacggcttcttgtattgtgtattcgagcatctatctccacaccttggcccgcactctaataaaggtggaatagcggatttagtttcgcattcagcacaaacattcattaaaaactaggctagtcagtgggtttaccttggggttgaagactgccttgagtagtaccgtactgtcaaaatcaacaagaagatgcaaaggatgttaaaaaggttttgtagattcgatgaaactcttttttttgagaagtgatgaaccggagaaactcacttgagagttattgtgatgcggcagttgtggttgcgacggtggtggttgtggttgtggagcaggagattccaagtatataggctgtgttttattcaggacgtataagataaagttgatgaatgtgaacaatagaggaataagagtgttgaaacacttacatacatatgggcagacagaagaagatgtaacacaacaatggagaaaacaatggtgttaagttttgttgccattttctgaaaacagaaatgattgtaatgaagctcaggtagatgatttattttgcagactaaaagctcattatgaacaaatgataggggtccactatatatagtccaatttccaaatactttttaatctagaaaatatatttctcatgtcactgatttttttgcaaactagaagagtagaagccattaataaaattgttgtctaaatatactcttgttttttttataaaacttttcaacggtctaacgataatgaaattcatggattgaacaaccaatcactaatcatatgtaaaaactaaaaactaattttaaaatacttaattactgattaaacaccagaattatgtaagatatactacatttcccctaaaaaatatctgaagttgtgattttgtttatgcatggaatttgtataacaaaaagtttagtaagtacaaatatagacttcatgttcccaatcttggacaagtgaagcagagagccaaagatgtgataacgaacgaaacgaagaatagcacatgtgtgtttctactgctttctaaccctatctctttctcgtgactccacttttttcccttatactatttgttttaaatcttgtgatttgtttctaaacgttcttggagacgaattttgtaagaaaaagacacgtggtgagaaattttgggattcgaagtagatttctctgtaggcttccccgtgacctaattgtgattacctgccaagccattttgcatgttcagaattgttttgtttggtttaaaatgttcagaaagttcttgtgtctcacattgctgggcctcttcccttttctttgtcttgggcctttaactttttcttctttatttctgtatccatattttgtgttgggcttaggcccaagttgtttgtatcatcataaaaccaaaagtcattaacatgaaaactttttgacaaaatacattttacatctgatatgcaaaaattaagatttggatttttgttaactactttgatattattaactgtttgagacaaggaaaaaaaaaaacaaatatttattatttaattgaaaggctttaatttagttaaggatgaggaagatgaagatgatgatgattcgaaaatgaaggtggtggatactgcaaatggctgctgagtgctgagacactctcgaaccccacaaaccctaaggatctcctccgaagatttccactattactggaagtgatatagatacgttgcaacaaagaagaccacacaaaaacgttattgagcagccgtgaaatcgatttaccaattgaagcttccccccatggttggtctctatccgtctcttattctacttttcgggttcagctgttattgattgaaagatttaaactttataggtatttgtgttcatcaattgattctgtttgcttgcttcgaaaattggttgtggctgaacatatatatcagtgttcctttctctttatttgatttctatctatatagtttctccaatcttagcatccacattgttgtcactttgagagtactatggaagcttaaagtagacaactttattgaggttgaaaaatgcatgaatggaaagagaggtcggacatccctgctgccc

SEQ ID NO: 30928 - DNA, 4140 bp, Arabidopsis thaliana landsberg
  unsure (1)..(4140): unsure at all n locations
tgatccagataaaatgttacacacccaattatgcttccttccgagccaattattcatttacatgtggtatgttcctgatcagagagttcttggctttatgattattgtcttgatgcatgtttatgaatttttgagtctaattttgaactaccaggtacctttctctattcgttatgtcccttcttgctctccttctttggccaaatcatggaattagcttcttaaacaacgctgcagactgtatctcaaatgtagtgaagtcaagctttttaagcagcgttacgaaggagaagaacgaagatgaaaactgtgagtatgaaatggtatgggacgcagaaggatctatgcatcttgtgaagaaagctcttcaaactcctgtgaaacgtcaaagcgataaacctcttgtagaaaagtaagacgacctcaaccatcctttaaattctcactacagacacaagtttttattttcacctcttcttattttctctctaggggtaacgcggtgatgagatcagcggctagaaagaacgctagcgaacagattgagcttgtgatggactcagatgtaaatgcaagtgctggtgggtctgatcctctgatgagatcagcatcaaaatcaagaacaaaacttgtgatccagagagtgatacgtnnnnnnnnnnnnnnnnnnnnnnnnnnnnnnnnnnnnnttcccatttacatgatgttgctgttcaaggattggattgagcaggagtgatcaactaaagataaatcttattgacatgaaattttggattacgcaaactatcatctgtaggatttgtggtgaaaagtgaaaactgttgtattattagaatatgagaatcaaaaaagacatgtttagtctatatggttcaacataaaccatagacttatttatttggtcttattacattattaggcagtaaaagaagaaccaaaactgaaattttaaagaggaaatgtcactgatgaaaccaaaacagtcttctccggtccaaagtgaaaccaatcataaggaacccttcaaagatcttcatttttcttaaagaattagcatctccactgtctctgtctcagacacagtaaaaactccggctcgcttggcggataaatctcttgttctctctctctctgtcttgtctgatgcaaattaacccatgaagcaagcccaaaaaaaacccctaaaagaatgatcatttaggttaaaaaacgacaggcttgtaaaagggttttgcaccagaatatatcagaagagagagtcaagtttcttgtgaaaggattttgccaagcagccaaaggagagcttcattgtccatggaacttcaagaactagatattagggaactatatatattttatatatagatttatatataattaaggagaagagtcatctctttactcatcgccttggatgtaccagcaacaaagcatggtagcacaacgacgaagaatgtagagacgagctcgttgctccttcaccaaggaagcacatttgcttgtaaaggcgtgacctttgtttaacttactcttgaactcagccattacaacaatcaaggtttttttggtatttcaatatattaattgaagagaacaaataaaaacagattaaaactttggggtgtagaatgtgatgaagaaaagaaaaaaccctttttgtgggtgaaagaagagagagttgatgagaagtagaaaagggatgggagagtatatatagagtgaagagaaagaatagaaatcttgagagaaaaggtgacttggatatgaagaaaaggagaaacagatgaacatggtctgatttttggttcattaattgacattgggatttgcatgaatcccttttttggttctccaaggaagtatagtttcattgaaatcaataatttattatatcttatattataaacttttgtaaatatagttcattgatacaaagttttgcatatgttgtatattacctttgccaacaacaaatatacaaccgcccaaatcttacgaatttataattttattgtcatggaaatgatgaaatttttggtaatttctatgaatagaatagataaatataactccaaaaagaaaatcacacgaccacttgcatataaatcaaacaaacgagagtgaagtactgaagtccaagaaagagtagaaagggaggaaaggcaaagcatgaaaagaggatatttgtggaaaagaagacaaagcattgaatgtatgtattttgctttgcttctgattctcttaatctcaatttcctagtaagttgtaaacttacaagctctaaagttaatgtaaaaactaaaatcaagattattaatgttttggttttcttaatgtttcatagtaagtggatggtaaccgacgatttctctaagtgtgtgtgatactacctggaatggtctatggcctgattttgggacgtaaggtggctgtattcattgactccggagcgtcgaacaactttatctccgatgagaattagtcactcgtctcaagttgccaattagaaagatcacccctgtttcagcttccatgggacacggtcaacacattgagagtaaaggaagttgcattgggatcagtttttggattcaagaagctgcaatatttgaaggctaccttttacttgacttaaacaagacagatgctgatgtgatcttgggttataaatggctatcgaaactgggagaaacgatgatagattggaatgaaaacactatgactttctacaatgacactagctggatcacgataaataacaaagctcatacttcagatgggactaagaaagggtacaagtggccatcttccagcgattcaaagtgtagagagcctaaatgggagaaaaatagtcttatgggaaaagtagaatatcacaaccttgaggacaaggttggttctttaggggaaggcagaggtatgtatgcaaggttggattttatgggtaagacaactgttgctaaagaggatagaagtaatataggtatggtacaagttctctgattctgtcgaagatcatacatttttggttatgagcggcttgagttgtaatatcatcagccaagctatttctgcatcatcttggaaaccttgttaagttgatgatacttacctatgaagtttctcactcgccaagaccaccagatttgtcatatggtgaaatgttggtacaagaggatttggaaacaactaaatgaagtccaaaacacgtatgtgtcgagtacataacacattgtcttccctcatcaggacaagtttgaaaattcttggtggaagcacatcaaagtgttgttgtcgtcttgtatgagagacacaaaggagatactaacgagccacaacacttatggtacgagaagcgtgaaagacaagcttggtttgttgtatcaagggtgcagagcagtgatcctaggagcggcaagttttcggagcgggttgtctcataaccggagtcatcattaggtgcacaagcagcgttggggatacaagtcgaagagatgggatggaggcagtttgggtgtactcacggagagcatgaaggaagttgcagttgcattgttgaaagggctataatagtatgcttctcatttctcaagcaagtgtagtgttcacaaatgggccttatgatagtaccatctacttaataaagctttccgatattgatatacgtttcgtcgtacatatgggaagacaaatgctacaagctaacaaatgtgtcctgaattcgtttcgttcgtatgatttcactttaatttggtgatagcaaaaatgttaagattataaatcatgaataaggaaatgttaattataaatgaattcagaaacatggaacaaaaaaataaaaaaatgtctcaatcaaacaaatgagtcctttttgtataccccttccatttttttctacctctagaattgtatgagaatttttttttatataaatggtaagcgcattaaacgcttttgcgactagcgttatagctttttacccacataatgatagtaattattattgctctgaattttactgctactcttgctcaagcttttactacgcagtaaatgcgatagcgcccaccacaaccacttattcctccgtgggcgtaacagcagcagtcacgtgaccagcatgtgccttcgtcttct

SEQ ID NO: 30929 - DNA, 1664 bp, Arabidopsis thaliana landsberg
ccaacactttcacatagaacaacatcatgcatatttggttttagaattacaaatccttcattttttgtgggtcaacaacaaaatttgatgattccttaatccgtatttgataaaataaagaagtaagacctaagacgcaaagtcttcaggacgttaaagccgacaagccgttactgcctcattaatgtttcttttttttaaatggattctgcttatgacttttttgttactactctccacagaatcccaatgcaacattgcaaatattgcaaaatgcaaaccagcgttctcttctctatcaaccgctatttcaactaataaatattgcaaaccaacgttctcttttttagtactcctacgaggctaccactttgtaattgtttaaagctttcgaacttacatttaacaaaacactcaacattttttttaccgttttcaatagtccatcattggggggaaaaacatcaaataattattagaatttttcatgttttacgagagaaaaaaacccatgtgcttgcacccaaaaacaatgataattccagtccttaaattaaatgaaagaagtgacccattgggaggtcaaaccaccatctcatatttgtcttttcagacaagtcaaccctaatttactcaaaaatttcataattaaaaaaacagtaatcaatcatttaactagttaatcttcctctatatatatctcatcgtcaccttcaagatcattacacacaataacgaaaaaagcttcaccggaaaaatggaagacgacggttattacctcgacactgatctcgatctcagcttcacctccacagccaccgaccgtacattcacctcatcaagcgctagatcgagtctcgcacgctcaagcctaaccttaagcttcaacgacagactctcaaccgcaacaacaccttcaaccaccacttcctccgcggcaacaacactccaccaccgtcgttacgatcctcactggacgtcaatcagagccgcaacaactctctcctccgacggaagactccatctccgtcactttaaactcgtccgacacctcggtacaggaaatctcggccgtgttttcctctgtcacctccgtgattgccctaaccctaccggattcgcacttaaagtaatcgatcgtgatgttcttacggcgaagaagatttcacacgtggaaacagaagctgagatcctctccttgctagaccacccgttcttacctacactctacgcacgtatcgatgcttctcactatacttgcctcctcattgattattgccctaacggtgatttacattccttgctccgtaaacaacctaataaccggttaccgatttccccggttagattcttcgccgccgaagtactcgtcgccttggagtatctccacgcccttggaatcgtttatcgagatctcaaaccggagaatatcttgattcgtgaagatggacatatcatgctctcagatttcgatctctgtttcaaagccgatgtagttccaactttccgatctcgacgattccggagaacttcgtcttctccgaggaagactcgtcgtggtggcggttgtttctccacggaggtagagttcgagagagaagagatagtagcggaattcgcggcggagccagtgacggcgttttcgaaatcgtgtgtaggaactc

SEQ ID NO: 30930 - DNA, 962 bp, Arabidopsis thaliana landsberg
ttccgttaaattaaaattctaacaaaagatccgctgtaacacattgtcgaaagcaattattcttttttaatactagatcagaattccgtgttcgaagcccggcagcggaaaaatccttttggtgctttttataatgtatcttgtatgataattgaagatactttctcatattgttctttcttctctgctcattgttatggtttttatactatattatatgattcttgaagaaaatcgtgcttgagttttagatatgaggggttcatatcttcgagagcaaaaatagaaaaggaaatgaatgggagaaaagaagcacatactcttttcaataaaaccttcacataaaacatatataccgtagaaattctatattctaacaaaagatccgttgtagcacattgtctaaagcaaacattctagtttaatagtggatcaaatttccgggttcgaagcctggctgcggaaaaattcttttggtgctttttatactgtatcttatatgacaattggagatactttttcataattttcttacttatctgctcattattatggtttttatactatataatatgattcttgaagaaaatcatgcttgagttttagatatgagggggtcatagtttcgagaacaaaaacagaaaagaaaatgaatgggagaaaagaagcaaatactctcttcaataaaactttcacataaaacatatataccgtataaattctaaattctaacaaaagatttgctgtagcacatggtcgaaagcaaacattctagtttaatagtggatcagaattccgggttcgaagctcggtagcggaaaatttttttggtgctttttagaaagtatcttgtttgacaattgaagatactttctcgtattattctttcaatctattctcattgttatgctttttatactatattatataattctagaagaaggatcgtgcttaaattttag

SEQ ID NO: 30931 - DNA, 1811 bp, Arabidopsis thaliana landsberg
gattcgatacctctgttgatagaatcatacaaagaagagtaatggatcttgacattatatttttggacaaaaccacaagcctcgagtaacgtttccatttttttttttgatatttagacaaatatatcaaaaatggtgatttactaaatcttatactaactataaaaaattcattaccatctaaattttttaatgctagattttcattttttttttcattttttttttcacaaatgtaacattatattaaacattcgatacaatacataaccaaaacaaaggcccttaaagagattacagaaggtggaggcccaaactagcctataacgggccaaatttgttttgaaaatataaaagaacgggcctataacgaacttataaaaaggctaatatataagcccattaaaagataatgcatgcgtgtcctctaaacgtgaacccttactaacaaacatatcgttctcttacctttctcttcttcacagcaaactaatcctcaaaccattctctcaagctcgtcttcttcctctatctgtgatttctagggttttgttttttccctttttaatctctcaattgcttagtctcttcctcttctctcaacacgtaagacacgcaaagaagaaacaatttttcaatcttcttgtaggtaaagtccgtcaatttaatttaattttactcgcttgatcgaatcatgtatgtgaattcgaaattgtagtttagggacgtgaaaatttcggttgattcatgttggttttttgataaatctttgttattgttcgttctttgtattatctctcaaagaatgtactaactaaaattacaaaattgaaaccagatgcatagagatatgtattcttcaagaggcactggctacggtcaacagcaatacggttcgcaatctggttattctcagaatgtaagatcatcaatttcaattgaaaccaaattatgcttaattatgcttaatttatgtgtaattgttatgtagcttggatctggctatcctggaagttcagtgagtggtggcgcagaaggaggctctcagatttctttgagttctcgccatccatcaattacaggtgctcctcaagagactgacattggtggtggatacagatctcatttatctacagctgctagtcattacggaacacaatatggctctgtgtatggatcaacttctcttagcagctctcagcctttaagcaccaatggtttaggttcatcagttttggataaccgctcgggatatgtccctactttacctgattcaccaaagtttgcatctggaagctatttgtctccctcgagccatggttatggtcaaaagacggacgatttgtattccgataagctgtctggttacattcccgttgatagaaggcagtatggtgaacaatcaagctcttatctcggtagggagttgcaaaatgaaccaactaggcgatatgctgatccatctaattttgctcgccaggtgcgcctactctcatatttttaagagaaaatcttatgaatttggttggtttctgttcaatgttgttacaattggcttgatgatactcgttattatatgattttggcagactgacttgtatgatcgcattgatcaagcatcgcttctccgaggagaacaattattaaaaatgcagtcgctccatacctcttctgttgatgcaggtgtcaacaggtatttttcgatgattgattctattatatccggggccaaatttctttctagcatagattcttttttcaaaatagttggattttttgggacatctggtatctggattggtttcagaact

SEQ ID NO: 30932 - DNA, 3558 bp, Arabidopsis thaliana landsberg
  unsure (1)..(3558): unsure at all n locations
tgtgatttcatacatatgatatacatgcatagttcacattaacagagtcaaacatcggtatatatgttggaaaaattcaactggatgtttaacacaaaaatccacaatactacacgatatgagtcatatgacaattcgatgagtattaattttgaaggaaactttgcatcacacactaatcaatcattaatccatggtataagttatttccgaaccagtgaaactattagagttacactcgtttttaccctgcagctagcatgctgagacacatgatgtgcatacttgtgaaacaatgcatcgataatgtcatctccaaagtgagctacgagcattgtttcagtcaccgctcgtatacaactagcttctttttgccctgctttagctttgtgtgattgtaagctacattcctccttactatggccgagatcaaattcatgcatctccaagtcatttatttggaaggatccctcatttcttataatctccttcacttcttcctcattcggatcataaaatggcattttgaacgaatatacctttgacgcactcaaaagaccctatgtaagtagataacaaaagacaaaatatttgaaaccatcggttaacatattcaaagttctatatatatgtaataatttgatacctcgaagactaagtcacggagagaattggataacaatgtccaacaatgacaacaatccctatacaatggattatctagagtgtttctgccgattagtgtgagaaccatacgtccattatgtaccatctcttcagaacgcattcttagaaatgttgtaaaatctcttttgaattgattcaagtaagccttgtattcacttagaggacttgaacttgttatgtacacactcatcttgttcttctccaatccatcgggaaccttacaagttcataataacatcattaattataggctttttgcttgtaaggaaattcaaataagtgaaaaatgaaagaaagtatatgtagaccttagagaggaaatgaatcctgtaaattgaatatatgaaatggagactcttgcgagggaagagcctcgagtataaggaaccagggactccaaagacgaagcacgatnccgttgctgtgagtttcttgttgaagaaagttatgaacttgaaacgttgtgttgaaatcgttagtaagggagatcatttcaaacaacaaatctatctccggccggctttggttccatttttgacacaaatacattgatggtgttgacgatctcagancatggccaaaaacgtgttttgtcctgaagaacaacctaaatcggctaccttaatgcatttaggaaagtccaagtttgtcaacatttcctctgtgtttttaactaagatcggattggttattgataaaactcttttctgaaaacatagataaaacacatgttaagaaatgatactttaatttgtgtatgcatgtcttatagaaacatatactatatgtagagaagaagaaagaacctgaagaagagaattggtggtgtaactgttgtctacatctccaccattcatacatagagcacccacaaaaggatatttactacttctctcttcatccactttatactcacttttacaatcacacctgcataatattaaacacagagacatacatctatgtaatacacattcgtataatattctatatgctttgttgatgaattggagagaacaaaaaaccttgagtaaggattggtgacttttatttcttgaaccattgttatatttcaagaaaataaattaaactgatttatgttgaaggaggctgcatgcacttcgaagccttcattgtatacatctggaaacttcatcatttatgaatttgaagtcttatttgggaccaaaataatatgtggtttaggtcacgactgatggcaaaggaaaaggaaaacaaatgtatgttgtctttcgttctttatatcttctttttgtctcatatggtccatgcctcatcattcacatataaatctattatctgaaagaaaaaagggaattgctaatttctacgtacatgtaccaattgatttcatccaactaaatgaaatcatacagtaaacgtttttcaaacattttttaaaaatcaatgttttttgtccttaaacttctttgtagaaatgatgtggtgagtattagcatgaaaacttgatttcattttacaagtgtatatttgatttcatctaagagaagtcgtcactataaagctcatgatttttgaaaaaaataatggtgtaacaagtaagttaaaataatagtagattttaaaatcgatgtcacaattcaattcaaattttcaacaattcatcatcgtaagagaattttaaagcgtgactgaagtataacaatttataaataacggatgatttattggaaagtgatttcaaatactgtgtgaataaattaaaaaaacatgaaaaaaattctaatacaaattccgatagctagtaccacttgagaaattccaatagccagtaccacaaccctaatacaaatcactagaccacttgtaatataattgcatcaatctctatgttcttttccaaattttaatatgtaacataaacttgaaaaaagaattactccacactaatcgccaagattaaactttaggacatgaggaaagtttttttcttagtcagtgaaacgactatgctgacggtcgttttgttcctgcaactaacatgttgagacacatgacatgcaaacttgttaaacaatatgctgataatggcatctccaaagtgagccacaagcagtggttcactcaccgctctgatgtaattagcttcattttgccctgatttacttctctttgactcgtcttggttacaatggccaagatcatatccatgtgtctccaagtctctgatttcaaaggaaccttctttctgtaccatctcctttatttctttttcgttggggtcataaaacggtaggtagaatgaatctacctttgatgcactcacaaggccctatacaataaaatatgatgaccaaattgttaggatttcacatcggaaatatgaagaaaaccaacactaacatagagcatttcacagttgaaactccttaacatatattgattatgttgacaaaaaaatgttttgatttatatacatacctcggcgactaggtcacgaagagatttggataataatgtccaaaagtgacaacaatctctatgcaatggattatcaatagtgtttcgaccaatgaaagtgagaaccatgcgtccattagaaaccatctcttcagaacgcagtttaaggaatgtcgcaaaatctctttggaattgatttaagtaagccttgtatgtgcttagaggacttgaatttgtgatgtacacactcatcttattcttctcaagcccttcaggaaccttacaatcaaatagttttagcattatatatagcaattttaaaatcatcaaattaatcaatttctatacatagaatgttataaataaagtctcaacacttatcataccttagagagccaatggagaccataagaggaatgtacgaaatga

SEQ ID NO: 30933 - DNA, 899 bp, Arabidopsis thaliana landsberg
gctattcttaacatgatcggaatttggttgtgtctaatctttaatatagtcgttgtttcaatgtagtggtgatacatctttcctctctattaagttctttttataaaatcatgctgacaaaaaaaaaccgtacagtaaaataatcatactttgttttactttaaaaaacaaaacattaaaccaccaaacgaatttttaatttatttattcaataatcatactttgttttactttattttcaaaatcatgctgacaaaaaaaaaacgtgaattgttttacactactgatttacgatttttttttctaaataaattatttacaaatggtattgtgaattgttttgtcaattacgaaaatatagggtcgcttattgcaacatatgaaacgtataggaactaaattaaaaaatacaaataaaggtcttctccttcccgtctagatgtagaaatccctaaaacttgctactgttttgcatacgggacttgtacaaataaaaaccacccaattcctacgctttcctctacaaattgtccgttttttttttttaacttttatactttcaattcatctttggttctgtagaattctcaggaatcagcattccactgtagctactggtttctctaattaactgtagatcgatcgaacttttatagattcgggattgtttctcccaatatttctgtagaaattactacaaaaaaaattagattttcagctactctgagtctaccttgaatcgtttgaaatcgaaaaccctttcctttaatttcaaagagtcgcttaattagggtttaggatagatggagaagaagaaggtgaccattccccaagtgtgccatggccattcaagacctgttggtgatttggtctacagtccaattacttctgacgggttc

SEQ ID NO: 30934 - DNA, 1746 bp, Arabidopsis thaliana landsberg
cttccattaattcatgcttcgcaaagaatcaataacgaatcatttgatcgcatccgccatatacttcgtagcataggttatgcattcaagttttccattcgttggcacactcaaagacacactaaatggctaccttcacctgaagaaaatactctgatgatactggatcgtgacattgcatcaatgttatcgaaaaagttacttggttcttttccacttaatcacggaaacaatctttctgtagaggtaatgaatcacaactctttactcttcctgctctttgtttgtatttgtattcttcctaacactagttgattgtttgttgacaaaacaatggtgtattgacagaaatctttttggaagtaagtgaatggagccaccttcctactgatctttccaatagatatctggaatttattgagaatacactactaggcaaggttagttctcatactttacatcaatatatcaacgcaagctgattagttgtttacttgtaatgttttttccgtccctctatcttcattatatctgataaactgctaatttccttgcaaatctagaagaggaaaaaaattctcactgggatttgcgaacatttattttgcagatcaccaggagcattaggcttcgtaaagatattcacgaaaagactttacttgcactcttgccctttcttccaaaacttattctgagggtagaccgtgattggagagataatcttctggaggttcgtctaagattcttagagtaatttcagctaggcaggagaatatatactagctcagttcctttgatagctagcactagcagtatcatcatctatatttatatatgactgttggtattacgtttatatattttcaggcatttactattaccttcagcgattgcaaaccagagtctaaactcaaattagcctgcatttcaactgttagagacatgattatccctgtaagtaattttttcatgatatatactgtccagatattggctgactgtttcaacccgattctaactttttactcacattaaactctgattctacttctttatctgcagaatggagatatcctttatcccaatgcaagtgatccaacggtacattactaccaggttgcttgggtcaacaaacttccatcgctgcttaatcagttgggtaatgagcatcccgtatctactcaggtgctaacacatgacatacagttcattttcaatccagtaatccttgatcattcaaggcaaaaaaaatctttagtacatggacccttttttggtcaaataagatcacttctccgtttctcatttatacttattttgaaattaacttcaggttgtgttgcaactcttactcgaccttgggcgagttgggtgtctgaatgcttcccccacctgtgaagatgacatcagaaacttcttcagcctttgtcagggagaaggtgcaattcttgctgcaaaacaaaaaacgtgttattagattcttagtgtcactacactgaaatagggcttcttggtttcttcatcgtttaaattgtacaggtgatgtacctggtggaccttttgcaagtctccctcgggaagcccaagaactggctctctgtttcctttactacttcaccacagacaaattcagctcccctatgatgaaagcaatcgtttcatgctgtttatgtgagtatcacttttaaattcctgatgcttttattcaacattaaaagtggcttctgttttgatttacccgaaggg

SEQ ID NO: 30935 - DNA, 1162 bp, Arabidopsis thaliana landsberg
atggaacagcgacaagcaatctgcaattcaaaagtactaccttaagcttctttttatcttgtatataaaaatggttattatgaataacatccttgtagttttcgagaatctgcatcaagtaacagatagaaatttcagggaacgtctttgcaagaatactacaggaaaaagttggagatctaagtagagaccttttcagcatataaggagaaggtaggcgagtaaaactccaaaacaaggcggaaaaatttgaaagccatcaaacgaacttcaatagatgacttagtcatagcggtaaatatgtatggcatcaaacttgaaaccataagacccttgttaatatcctacatagattcacacagagaaatcagctgttagattcataagcaccagctcatacatcatatataagaaggataacttaacacaacaaagtaagagaaaccaatgtaagcagaaacgtaagaagaagaaaggaacacatacctctttacaagcaagaaagatcccagtcaatagtgtataaaaatcgtctcttactaacttatcatcatcagtaatgagttctctaagtttatgtgtagtagcatatttatttgactgcagctctgcaggatgatgttttaaaagatctttgataccatgtaatgcatctacatagacaaaaccaaaactgatcacaaagtcgcaggtttcatattttcatcaaccaaaaacatgagaacacacccaaaaaaagtacctttgcgaactttagcattgggatgcccagttcggttcttaagctcaagcaaggtcaagcctttcttacttgtagcgaagccatctctttctgctgccacactttgctcatgaagtataattgctgcaatagaaaacaaagcaatttctcataggaagaagttaaaaagtttgaagttgcaggagaaagcttatacctttggatttaatctctgtgttagttgcattatttggtggaggtaattttctcccgagctttctcttgattttctgaaaacagacaaagttacttaaagcccttaaaacagaatattgttacttaaaaccctaaagaaacagaaccttgaaatcgattcctttcttttgctgcttctttgcaggagccttggagcgagacatttattttgtatctttgtaaatc

SEQ ID NO: 30936 - DNA, 965 bp, Arabidopsis thaliana landsberg
agtggttaggcgagcactccaaatcaaagacatcttattacatacacaaggatctcataagacagtgcatttattcaaggaaacttgatgtcagatgttatctatatttaaaaatacaagtctctccgagaggtagatattttattatatggttccctcacatttaaagatatcactaaattatgtatagtagttcttctaacaagctagacaccaaaagaacaacatccccaaaattcgtcgtggcatgtacgaaacaagaattttggagtcattcggagtgaaagtgattatatacctttttttgtgatttggtgtcgctctcatcacatggcaaaaccgagaggcaatgtgacaacccagaaagagccacctttagcttgcttttatcttccacataaaaatgatttttctgtataatatccttgtagttttcgagaatctgcatatagtcgcagatgaaatttcaggggacatcttgcaagactaataggtatagacagaaatactacaggcagaagttggaaatgtaacagtctctgtcattatccaaaaaaacaaagtagacaccttttcagcatccaaggaaaaggtaggcgggtagaactccacaacaaggtggaaaaatttgaaagccatcaaacgaacatcaatagctgaatgagccatagcgctaaatatgtatggcatcaaaagtgacaccataaggccctggttatcctgaatatattcacacatcgaaacggcatgttagatacaacagtaaactagaaaagacatgatcatatcaatatttgcaagtttaaaaagagtatgcataaccagcagactagaaaccataataatttcaaattcacatcttgcagctgataatatgaaaggggactaacacaacaaactaagagaaacccatgtaagcggaaccagtaagaataacgatgaaataacaagtagaaaaagaaaca

SEQ ID NO: 30937 - DNA, 1551 bp, Arabidopsis thaliana landsberg
gctatccggcaatttttggtttgtaaaaaagaaaacacaatgtgtgggtggtgatcacaaatacagatcagagaccaatattaaggagcctttaattagttgtccgagtttgcctcgatcctttcttcacaaaaggaattcatcttcttccttcacaatattctcacataacaacaaatctttcgatcttcctcaagtcttatcatagaacctagacaaaagcaatggtttgttctcttctctttttctaattcatttgtaggattgtttggttctagcattacatgccatcaatgtgatgatttttttctagtcggggcgaaagatacacgatattcaaatctatgaaatgtactagtcacaaaatctgatttaatttttgtctaatcatatgttaattagacgtcgattttaccatgttattgacgtgtctctcattttacatgctatattttgtgtcttgtctagttcataattgtcataactcaattgctagactaagattattactaatgttttgacatatggaaattagtaatggaaccgaaaacgcctagctaacttgaaagtatttttttcccccggtatacaaaaaatgctctcctcctaatttatgtgaatgaaaaggcgaacgcggcgtcggggatggcagtggaggacgagtgcaagctgaagtttttggagctcaagtcgaaaagaaactatcgattcataatattcaggatagacgggcaacaagtggtggtcgaaaagttaggaaaccccgatgagacttacgatgatttcaccgcctccctccctgcgaacgagtgccgctatgcagtcttcgactttgacttcatcaccgatgaaaattgccagaagagcaaaatcttcttcattgcatggtatcattttttttttaatctttcacttcacttccttaattcctattaataagcttaaatttgattatttgttaaaacttggatgatgaaacatatataggtcaccagattcatcaagggtgaggatgaagatggtgtatgcgagctctaaggatagattcaagagagaattggacggcattcaggtggagttgctagccgctgatcctagcgagatgagcttcgacattatcaaaagccgagctctctagatccttttcaacgatctatatctctatcatcgatcctgatcttcacaaaaaaaattaccatgttatctggttgaaaactgaattctttatgtctgattcattttataaacattcttttctttctacttccgcttgggagagaagtgcaaaccttgtatctctgttgtgtaactctcaaataaacgaacactatttcctatctcgtcgtgggtaaacaagaagtcgatgtgtcccagtggttaatgagaccgacttgaaatctggtgggcttcacccgcgcaggttcaaaccctgttgtcagacgataatttttactacctttgtgttgtactaaaacacaatactatgtaactcaatttattcatacttttacatggaactagtaggagatacatcaaaataagccgtggatc

SEQ ID NO: 30938 - DNA, 4450 bp, Arabidopsis thaliana landsberg
  unsure (1)..(4450): unsure at all n locations
aggatacacttggagtaagagatagtcttttgtggctttgtatgtttccgctggaccttttggggagcacatcctaatctgcggatgtgcatgtctctttgattgactccatgtaagtataagtgttgtgcatttatattaatgttcactacttgtgtggctcttatctacaaagagaatctgtcagctgatagtccagtgtcagccaataaacctgaggtaagaggaggagttaggagaaccacaagtggatcttctcatgttaactctgatgacgaagatgccgagacagaagcagggcaatctgaaatgactaatgatcccaatgatctgaaacgtattagaaggtatgttaggtaccaataaaaaagttagatgtaaaacactgagatagagaatcaccaattcttcttaatctttttctgtgatgtgaattcaggatgaactcaaacagggaatcagcaaagaggtcgaggagaaggaagcaagagtacttggtagatcttgagactcaggtaaggttaacaaatagcttgttggatgatttgtatcagagagtaatgttttaatggtgaccttgtgttttcttcaaggttgattctttgaaaggcgataactcaacactgtacaagcagctcatagacgcaacacaacagtttcgtagcgctggaacaaataacagagttctcaaatcagatgttgaaactctgagagtcaaggtatcatctatcacttgctctttttaatttgggaaagtaataaccggaatgtgctaagttaagtaaattctatataggtgaaactagcagaagatttggtagcgagagggtcactcactagcagcttgaatcaacttctacaaactcatctaagtccaccatcacactccatcagcagtctgcactacacgggaaatacctcgcccgccattacagtccacagtgaccaatctttgttccctggaatgacactttctggacagaactcaagccctggacttggtaatgtatccagtgaagctgttagctgcgtctcagacatctggccatgactctctttcttcagaacatgtaatgatcactcagcgaatttcctgtatgtgtttcactatagaactagacacatataatgaaagcagcatgttcgttaaataaactcaagtttcgtcaacatatactttattgctccaaatcctgcagatggtaatctggaaactgaagcatgtataggccaataaattacattccccaaggaaattgcttaaatgtgttcgcttaagtaagtatacagacaaacaaacaaaaacactgatccattacactttactttccagcaatttctattagctatttaaggcgacagctatgcatgttgtaacatgagcagacaaaacttacgtcgaaaaccaacctcagttgattagaggcgtacccatctgcgaatctgcacctatatcagttgtgaagtccttaggcaatgggatatttaattccgagcaaacaagcttcacaatattagccgttacacctcccatagacatcttgttcagtgttactgcaatggaaaatctgttgttgatgtcacagaagcctgttgatcctcctaaccctgaatgtccaaagccaaccagagacccatcttgagaaatggcgcgcttaaaaccaagcccaaactttccatcaggcactactaagccactgtagtctccagcacccatgaaagcatcatggatcctcgggttgctaaacatattatgaatatcatgttgatgatcatcgctattgatctcagttttgccagcagaactgttagtatcaactagcctggctaaactttctgtatttgactctctgctgctactagcactcataaactgtttctcatcataaagcttcctctcttgatgatcttttgatttacgcttttctgtagctgccatctccttaccctttttcttttttgttgtgtctttcaacgacgtgaatttcggaacatgggtgtggctacctagtggtggctgggataaagaggaatgtggaggtggcactaggccaccatctgctagggttgcatagtaccttgcaagtgcacgagcagagcaatgtccattagccgcagggattatggctctgcgcacattcaatgtgttaaataagactggcaagttggttgccatttgtatgatcttgtcaggctgaaatgtggaaggaagctcaggttggctggcaatggacgaaagcttgctcatttcatcagtgtcgaacgtcaatgtggcaagcctagattcaacacctataattaagatgttagataattattaataacgctcatagcgtaatttactaattcacaatgtctgtgactgttactatttacctgggggaattccaatgtacagttctccatcaatatttaggggtttaacaatggactcttcaaggatctcctggagtttctttccagaagcatactgttcaagattgatgaaagcaagattggcattaacgtagtagaggtaagagaaaaaattacaacttgacgacttgcatagtttttatgcttaaacaatgaatgatataattagtttacctcgaggattccaccacatagccatccaaacgtgagatagtgataggactgctgactgccaggctctgtttcaggtgatgaattagcaatccgtttcaaacattcatcccagtcacaaataagcagaggattttctcctacagggtcaaaggaattttgcatcccagatgtatggttaagcacatgatggacctgaaatacaaaaccgaggtattaaaatgaagggcaatagattgcgaaatggttaagtgacagtgtagctccttatacctttatggtatcttttccatttgatccgaaccctggccacatatttgccacagtctggtcgagttggagtttcctgtatcattgaataaatattactcaatatgactaagcatgtgttctgcaaatgggatcatggaattaacaatgagaccaatatgtaagattggagccgattcaaagtatcagggtgtgtgaaatgaatacatgaaattttttgaaagcttaaaatgttgttactcaccttttgtcaacaagccaatgtatcattccagcagtgacaccctttgtcacagagaaaacaggaaataaactatcgggttgaactggacgagggtcatatcttccaagcactccagcagcagtgtcaattatgactttcccatctttatatgcacacacctaaacgaacatggccatgttaaaccaaatgtaaaatgaaacgaaagctgactgcaagccaaacaataaaaaaagtgttgcccacctgaattccaagtattttctggatactcccaagttcagcgagcagcttcctcactttggactctacatcagaatggattggcgagtcatgtatccaatgagcatccacagttggtcctcgactaatactcctgaaaacccacattatggtcgtacgtgatatatcacaaagagataataaaatgagctgccaaattccaagggtgcttaccctaacagaacagattcggcaaatggtctcatgatgtccagataaacaatccgaacattcatagtagatgaaagtcctaaatagtcgacaaaataaataagtaaagaaaaagtaaagtactatgattgagcaaatcctttgacataatgaggtaaagtagtatgattcataaattatacctctgagtaaattaatgaccctcgcaaaaataacaatatcaccaggaaatgcatctatctgcatcaaatgttttcattgagatataaatggtcactgagaaggctatatttgaaagaaatttgtgcttaccggattgaagcgtttaacttctttctggttgagctgcatcttctcctgtataactttcatattttgcactctttgatcgttcagggttttaaacgttttctattaaagagaggaatctgtaagagcggatccattatagttaccccagtagagaaagcgaggcatgaaagaaagaattaaatttacttaccatagcctcgcttgatggagttgaagatcgaaagaagagacctgccacactcattgcttgatctggcatgtctagccgcagcttcagtcccatttctgcaaaggcagacaaaagcgccacttgatctccctgtaacattaaacagttaaaaatccaagctatggccaatgattctacaaacatataatatgcacatgatcagagcgcgttgggtttttttttcnnnnnnnnnnnnnnnnnnnnnnnnnnnnncaattctgttaatgaacaaactcatcattctaacatcttacaaaatgattaaatgatcgactaatggcttaggtaacacatctcaatatatggttgcataaactgtcaaaaaactctgccgatgctagaaacatcctggctagtgc

SEQ ID NO: 30939 - DNA, 1879 bp, Arabidopsis thaliana landsberg
ccaaatctaaacctaagatccgaatcattcacatattcgcaccggagatcattaagaccgatgtcgccaacttccgggaaatcgtccagaatctcaccgggaaacaagatcatcatcaccacgatctcccccaccaaaagggtctcaaaagaaaccctagatctagaagaagtcatgatcatcatgaagtccatgacatgaacaagagccatggattttgcataaactcagatgaagaggaagaagggatggtgtcgatgacgtggaacggaaatggtgacgagagctccggtgggttcttgaacgggttaggagatctcgacggcttcattcaggagctaggtgaatttccttatttacccttcaccattgaccctgccgttgcttcttcctcccacttacatggcaacgttttcgcagaacctcaccattacgcctaaaacgtctcaagcggaagaatcttttaaacattttatttctttaaaataggttaaaacttttaataattttttggtttcttcttttatatactttctagaagctaatttttgtttttttcgataattgaaatgtttgactttctagacaatattcttgtggaatcgtgggaggttcgggtttacgattattacgagttctatttctgcataattttttccctctggttttgtattttttatatgattacactataatctagtaagtaggtatgaaattttataaatctatataattcaaatccacattataataatgataaatcacaaatagaatttcgcaaactttttaccaagaaaatccttattaaatatgtaaggattatgaaaatctataacaaaatatcattgggattggctatagcgtaattaactaacactatctgaatataatggacgtttagaaattctatgtatacttttttcctcacttgcgatgtgtttttctcgcttatccaaatggactgagaaatagacttattgatcgattgactgatacttaacataagataagtacaaatgggaccataattaatcaagataacaaatataatattttaaaattaaagatatgagccgacaagtaaccacaattacaaacgtgtatatatgcatgtgtgtcacggtggtgatggtgatgatgcatgatgatgatggaactacacatgacacatcaaaagataacccgcatcatgtattcatatttgatcaagttggcattataaatcaactaagaaaaatattaaatctgagctgcctcttacatagaaagagtttattaagatgatcaaaacagagaatctgcaagtacttggataacttgagaagatttgccgagcgaacacaaaagaaggaaggggttttgatgtatggagatgaccctcaagttattaacgtcatacatttacagacaccaacttggtggttggttcttgtaatataacacacagagaacataggaacaagaacaagaacaatggctagtcacatctaactatcatattcgatagtttctacaacggtcgatgatggtgtttctatcctcgttagaacttcaggcactccttcggtatctcttactatctacgagaaaaaacaaccaaaagcggataaaactcggttagtgcaacgatctcagtctctctcaccattcttaacaaaatattcaacaaacttacaagaatctcttcatctagataagatatcatgaaaaatctttcaaaggatccacctgaagcaaacatcactagttggttcagtgcagatttgagcggaaaatggttaaatgtataaaaaatggataaagtagcttactaaggggaattctcagaccactggctagagtatccttgataagagcaggaagctgctgcaacgttgtg

SEQ ID NO: 30940 - DNA, 3362 bp, Arabidopsis thaliana landsberg
taataatggatgggttcatatttaggaatttctgcagttcttttcgtaatatctttgctgggattttcagccaatgctgaggtgttcaacgttggtggttctccaggttctgatattactcaggttagttctatgacttttcatttcttgtttcccaagacatcacaacctttggctaactcgttgaagtttcattgcaggcacttctgaaagcattcacatcagcatgccaagctccgacagcgagcaaggtggtgatcccaaagggtgagttcaagcttggtgagatcgagatgacgggcccatgcatagctccagtcgagatcaacctccaaggtactctcaaagctgatggaaaagctatccaggggaaggaaagatgggtcgtcttcctaagaattaatggctttaagttaaacggaggtggaatcttcgacggtgaaggtaacgcagcttggagagtcaataactgtcacaagactttcgagtgcaagaaacttcccatcgtaagtttttctttaagttagcatttgtttctaagttaggccacacaaaatatagcaattgtaattttcttttgttctatttttacagagtataaggtttgatttcgtgacgaacgctgagatcagagacatatcctcaatcgatgccaagaactttcacatcaacgtgattggcgccaagaacatgacctttgacaacgtcaagatcatggctccagcagagagccccaacactgacgggatccacttgggaagaagtgtcggggtctccattatcaactctaggatctccaccggagatgactgtgtctctgtcggggacgggatggtgaatcttctagttaagaacgtcgtgtgtggtcctggacacgggatcagtgttggaagccttggaaggtacggacatgaacaggacgtcagcggcattagggtcatcaattgcaccctccaggagactgacaatggcctcaggatcaagacttggccctctgcagcttgctccaccactgcctccaatattcattttgagaatatcatccttagaaacgttagtaacccaatcctcatcgaccaagagtactgtccttggaaccagtgcaacaagcaggtatatatatatccttatcatgaatattggatacagagtctcgcttaatttagccactttcaccatatgattagtatatgaaaaatatgattaaaacttcgtaacgtgtgtttcaattcacagaaatcatcatccattaagctggcaaacataagcttcaggaggattagagggacatcaggaaacaaagacgcagtgaagctattgtgcagcaagggatatccgtgtgagaacgttcaggttggagacattaatattcagtacactggagccgatggtccagccaccttcatgtgctcaaacgtaaggcctaagctagttggaactcagttcccaaaggcttgtaacacaccacccgtgctgacccaacctaagtaaaatgtagaaagttctcataacatttaggaatttctcatccattttttcttcaatcttagtttttcccaatgtcacacaagggagatttcttttatttaaaaactgtaaaagaattttgtttcactttttatttgtttgatgccaacacaaatacatagatgtgtgtgcgcatatatgaatgcaataaaactaaaaagatgcaggttattttattttatttgtagtttaatatcgtttgttatcaaaatcctttttttttctttttccaatcaatttcttgaaataacttgattagaaaaaaaattaacttcaaaaatataaatcacgtgtaattcaagttattatatgctttgagatttgcgtgttcatggaccatccgtttttcgtgctaaaaaggtagtgagtctgacacaacgaacaaaaaaggacgagtgcctccgagaaaacgttttcaaagctcgagcataggacgctagacgtgtgacgataaagaattaaagactaaaggacaaagttaccgtagacggtagaagttataaaaaaaaaaaccttaaactgggggcatcacttgaatctagcagccatgttgttgtactttcagactgaaagtttcagtggataaacacatcaccatgcatgtatgggtttaatgaaaaaaataaaataaaattaaagtggtattattgtgtaacatcagtgatcactgatcagtacgtgaaccggtggaatataatatactccagctagtagcatatatgcttcgattaattaaaaaaaaaaaaatcaaattaccttatttgactaaaaataataatcaatttgtttggttttcaattaaaagtgtaaatatgcacgaatgacttccattttcatgtaaacaaaaatatatgtgtataatgaaatgaatggtataattaacgaacaaacttaagagttttacgttttgattttaccaaagaatattcaacacctaaatttttaaaaaatatatacttctaatttttataaagataaatataaagacgggatggtgaaaaaatttaacaagggattccaggccaatagtcgaattttatactatcgttgttttgtgtaccgaccaaactattaacatgaccatatttaggcaaaattagactttatatatatagaaattctctttgaatgaaaatgtcccttttagatactttttagttttcatccttagttcaagatacaaaattagacatcagacttcctgatgggtcaaacgacctaaaaaatgagaggtggtgagaaattttcaaaaaatagacttcaacatctctcctccatccaacgcactatataaaggtaaacctgagcttaatcaaattccagaaaacaaaaaatagaataacaaatagtaatattagtagtaatttttttattttttttgggataaaatgggtggatattttggagtttctacaatttttattatctgtttgttgggaatttcagccaatgctgaggtattcaccattggttcttcatcaggttctgatattactcaggttagttctctttcttgctttccaagaaatctacaaaaccattttttggccttaactcgttaattagggtttcacactgcactgatgatatgcaggcacttctgaaagcattcacatcggcatgccaatcttcgtcaccaagcaaagtggtgatcccaaaaggagagttcaagcttggtgagatcgagatgaggggtccatgcaaagctcccattgaggtcacccttcaaggtactgtcaaagctgacggtaacgctatccaagggaaggaaaaatgggtcgtcttcggcaaacattgatggctttaagttgaaggggggaggagccttcgacggt

SEQ ID NO: 30941 - DNA, 2501 bp, Arabidopsis thaliana landsberg
  unsure (1)..(2501): unsure at all n locations
tagtttaaagatctaaagagttctcctttcgattgagtttgagcttaaatttgatcacatactgctttgtttaaagttgtttgcttttgattctataggctgatggatggaaagtagagaagattagtttactggcaaatccaaatcaagttcatccgactaggttctggggtgtttatacannnnnnnnnnnnnnnnnnnnnnnnnnnnnnnnnaaaggtaggagatttcagcagtttttttcgttggattccggtttgagaacttaaatctcaaaagctttgtctttttttttgtgtagttgtgtatcttgatgctgatactattgtggtaaagaacattgaggatctgtttaagtgttctaagttttgcgcaaacttgaagcattctgagaggctaaactctggtgtgatggttgttgaaccatctgaagctctttttaatgacatgatgcggaaagtgaagactttgtcttcttatactggaggagatcaagggttcttgaattcgtattatccggatttcccgaatgctcgtgttttcgatcctagtgtaactcctgaagtcttgaaaaccagaccagttcctgctatggagaggctttcgacattatacaatgcggatgttggtctttatatgcttgctaataaggtatttagttaggaaacaaagttgtagttagtctcgtggtgtctatttggttctgtttttcatttttgctgttaaagtctatggctttctatgaagtcgaagtgatcttggaatacgtagtggttaatttgggattggttttgattggtttaaaagtataactgtctttttcttcagctgtttgaatctttgtgttttctcattatttctgcagtggatggttgatgacagtaaacttcacgtcattcactacactctaggccctcttaagccttgggactggtggacagcatggctcgtgaaacctgttgatgcttggcatgtaggtcttcttcttcactatgatttttaggtttctattgagtgaatttctctaagtctgatttcaccgtgaacaattgcagagcattagggtaaagcttgaggaaactcttcctggaactggaggtggcagtaaccaacatgatgaactcgtcgtcaagttccttttcttgttacctctttgtgcacttttgttctgcatttaccgatccattcaggttaagacttctttggtaccttcacctcgactacattcatcgttcttggattgtaatttgattttatgttttctgatttctcgcagggccgtgagggttcattgtgctggagctcgttcagcaatcagattagatatctttattacaaagttagatctaatggaacacttggttatggcggtgtatctaccatgagtcccagctatcaagtgagtttctacatcaaatcgttatggttaacttttaaatttttttgatctaatctgaacaatgttactattgcttctgtctgcagccccacagtggcaacgcacagtccaaggttcctcaacacttaggcgcagtttcagttgtcgtctgttttactgctgttctgttatctcttggaatttcctttgcgattgtgcctaggcaaatcatgccatggactggcttggtcttggtgtatgaatggacttttacaatcttctttcttttgtttggtgtcttcttgctttttgtgcatcaacatggaaagagaatagcgatacaatcagaatcatcttccttggatgattccgcaaaaggtatggacatgagaagaaaacaacaaattgtgataatcggtaatcgtaccattctctacaaagttgggaactaagaccatttttcttgtctcaatagttcatcagcgagcaggtgggtcttgtgacgttactacattgtattatggattagggatggcttttctggctattgctgcagtttctttaccttacattttggggatcactgctttattcacgaggtaaattttcttaatcannnnnnnnnnnnnnnnnncttgttattgattcaacacattcttgtccttatagttgctggtttatcacatattgaacaggttgggtctaatggtgggtctagccataattctagctgccttcatgacttatgcttcagagcacctcgcggtgagatggttcttgaaaggtctagaagaccgtcgtgacacgacgagatcaaattccctatgtttcctctgttgacaacaaaatatgtaaaagtgtcaccaatcaccattgtaactttcagaaacaacagagcctataattctgtcttgaaatggttacacctttgttctttctttgtcattatgtctcataacaacaacacaagatcctatcagaattcaacaagaaccagaagagacacatttttaaaccaaaccgtgggtttaaccatttgtaatccaaaccgtacggaccgggatttaattttgaattaaccgaaccggatttccaccatcgtcttcactcaaccatctaattt

SEQ ID NO: 30942 - DNA, 5287 bp, Arabidopsis thaliana landsberg
acctttgcgcaacctatcagaggggcatttaagagcatcttcaagaagtgaaacaacagtagaagaactcgatggatcaaggctagattctgctaaggcataagcttggaggaaataagcttcaaatgatctctttattccaatggattccttagccttttgaagcccttcttcgcagtgacctgtatcatacaagatccatccttcgtaaactagacgctcgtggtcacttgaggcatgctcgcgggctaactgtaaactgcgcatcgctgcttctggacaattcaacctgaacaaaacaaaggtatgacaatgagatgcttaaataatggtaaagaacacctttatttagaaaaattaccttaggagaagcaaagattgcctgaagtagagaacacctttgcaagcatcggattcgagcatctgatagattacagaaagagaacctatatcatcaacattagaccacttctcatatagctgcatccaacaatctgcggttgtccaattctcgacatgctcatacacaagcgtctggagctgcctcccagctactttcccatcgaacattctataatcaggacacagcgtaagagcagcctgaatatcacgaagagccgcttcatagtcatccataccaagataaagacaaaaccgaatttctaagcattctaaagcaagtttaaaccccaagatccgattgatttcttcaagagcagccttagcattttgtttcgacattcgtgtgacagctctatacatgtaaggatatgtcaaagtcggatccaattcggttgccttctcgagatcttccaatttcttgtcaccctcacaatagaaagacctttcctgatacatccacccgagaggcggcgaaacagaggagattaccgagcttagcttctcataagcccaaagccgatgcccttggatgtatcctagtcttgctaaaccagtagcggaatacacatggcctaagttaaaagctgtttcaaaagcttcttcagcctcccggtattgtttcgtcaatagcctcatacaacctaaccgatggaaccccaatacttgttgccggtcattttctgcaaagtcaactaatttctccaagaaaccgagtgttctgtcagaccgaggatctatacacatcgagacttcacttaaacaagaatataaggagaatggagcttttcctgccatggttgagacttgagatctattaactcgagtcaaaacctcaacaacacgctcatcattcaaactatcaggcatctcataaagaaaaacttgcagacacgatgaagctaggatgggggaattctcttcaagtgcaaagtccataagctcaatggcacattccatagaagaaatcaaagatgccaattctctatcgcatgcatctttaagtcgctcgcagcaaaacttgtttgcgaaaactaaaacttccaaaagaaggttcttggaaactccgattagtacaccaacaacgctgaaatctctaacaacccgcatagctgatgaggatacatggttttctgacatatctatctcatcaagaagcgattccgtgaaattaccataaagcatagcatgaaatggagctgaaagactcgcaattttccgcctttggcaagctatcttctcttctcctatcttaaacacaacatttttagatacactgcggttcgtcttcacagatgctgcctcaggggaagaagcagtagtagctgggaaataagatgcaatatctagtggcacaaattcttcagaatatttaccacaagaggaaagcaaatctgtgataacttcttctccttgtttctcatacctcaaccaagatccaaacacaactttctcatggacagtagtagcctcttgccaagctgattgaaggcttctccgtctaagtttggtctctccaagacctctaaacacttgatactgcaacaaatacagaatcgatctctcctgcaaagggcaagtgtcgagttcttcatgaatctgagctagaacttctacatagtcgagaggcttataatgcggcagtatctgaggctcgggaactttgataaatgattctctacacagtggactacaaaaagaccaaatattattactccatatccaaaacatctcaaagttcaagaaaaataaatgaaacttacgcagatgaagaagcagaggaagatagcttccctctctcaacttgaagccatgactgtggattcaaggaatcgagttgtgattctttacaagaatcagaagggtaaaaagtcctcatctgacataacagatgaaacaaatcccagatctccaggatagccagaggatagtcaaaacactattttcttgtcggttacacactacccagaccagaaactaagtggagatgggctacttaatggaatcctatacaaaaaaatctgaactttggtattatgagatcttacaacacctaaagctaaagcatttctctatgaaaccaaccacttatgtacagctgacggaacaattactaaatacataagtgagaataacaaaactcactcgcaattgccattgaaaagataaccctttgcgaaattaagaggataaatcaccaaaattagagctttctcgaccaaaccctaatcttctagcagtataacataatctagtggctaaacccagaaaaattaaagagagtctaacaaatctaagatgtcttagacatcaaaaagtaagaatctttgaaccagcgagacaaggaagaaagcaccagtgaagagaaaaccctaaaacagagagagaggtgtgctatggacagattcggacaagttgtcaagtttgagcaaaagtgaatcgaagtgagagagagagtgggaaatgttatacaaattgacacttttctaattatctgagagctcttttgtttcattggtaaaagggaaagtttttctccttttcaattgtttttgctcatatgctatatctcaacacaaacagtaaccaccactatcggattcttaggccactcttcaagagattgtgaaaaattctattttttgaactaaattattattttttctattaattataattttttatattctacaataatgtatacaaaaatgatcaagcataacagccttttgtgtctcaattacgattaaaaatataaactatgattagtcaagaatctacattataattatattttcatttaacaagttaaactatcaactcaatcatttaacaccaccgaaaccaaaaaaaaagtttataaaaactagcgttaaaatttaaaactgcatcattttaagtaatttcagtttcaatgttatttatcaacgatgaaaatatatcccaaattaatttctttaaaattttatttttgtttactttttatccaaatttcaaatcaatttttacttttaattatttcagtttaaataattgattaaaaatatcctacatatattgattgaaaaccctctatattaaatgcaagaatgatgctattgatcaactaatttcttttagttaagtttcaattggaaaaatgcaaattaattatagataaaatattgtacggtttaaatagtaataaaaatatatatatatgtaaaaaattttgttactattttgtgaagtttggttaagcaagtattgtgttgagccaaaaaaaagaacactttccctttggacacatcaaatccttgtcaccgcttatgcgacatctccagttgccacgcgtcatctacggtttagccgagagctttcatgaactttcttcttcctcttggcatcaccgcttctcccaggaaaatccgaagaagctcaagcaaagcaccgcatcaacttttctctctcgcttgtggttctctctctgtagatcgtgatacagtagtaatcgaaaggattcgaattttcccgcgcgttccttcactttataaagactctgctatcgtaaataatgtatcagtggaacttaccgtaccggaaagatgacgtggaaacaggcgttagctcaagaaggcctttactatacccagcgatgcatgaaaatcccgagctccggtggggatttatacgcaaggtctactctataatcgcctttcagcttctagccaccgtcgctgtcgctgccacggtggtcaccgtccgtccaatcgctctgttcttcgccaccaccggacttggattagctctttacatagtcatcatcatcacacctctcataggtacaatcatcacgcacacttgttttacaaatcaaaaggttcaatctttttcgaagtttggtaataatctcaaaagctgaaacttggatttgtgtttctctccgatgtatagtgttgtgtccgttgtactattaccatcagaaacatccggtgaattacttgctcttggggattttcactttggctctggcttttgttgttggattaacatgtgccttcaccaatggtatgacttgatcaaccacgtttggttacctgttaaggatccattaggcaacaaagttctgtttttgctattggggaactagctcttagcaaatttcatctctcagttttttctttgattctgattgtgtatatgtttaaagcttattctgtgttggacacagggaaagtgattctcgagtcagtgatcttgacatcggtagtggtgctttcgctcacattatatactttttgggctgctaggaaaggatatgactttaatttccttggacccttcttgtttggcgctctcaccgtgcttattttcttcgccttaatacaagtaaagctacttattccaatttccattggagagagtgagagttgtagtctttagcttatgaaatgtggtagttttggtatcattctttaggctaaacagttaacaacttcattttatattagacattagagagcacaagatttaagcgtatcggatatggtagcatttttacgagactaagaagtgagatttcacattagacattacagataagggatttagcctatgaaatgtgttagttttggcagcattgttttacacttagaaattagaaagacttgatttgtcactgctaaaggcagtacagagaatagagcttttaactttttgaatgtggtgctctttatagtattctttaggctagaatttgacacttgatatcactataagcattgcataaaatgagaaacttgaaacttgattttaaatgtggtcgctttctcattgcataaccaggtttcgtaaaataataaagggtatgttgtgcagattttgttcccattagggagggtatcagtat

SEQ ID NO: 30943 - DNA, 2809 bp, Arabidopsis thaliana landsberg
gatgctcgccgttgcttcatcctgcgaccatatgatccagcagatctcggtctttgcaccggttgccatccatcttcactaccatcagggtgttgtggctcggttgaaacgtcgctagatgtaattggattactgttatccatagtagcgtcctcaattactggaggagaaggtggttcttcaactggtgcaagaattgtctcgtgattctcttcgcttgatttaccttcttctgatccagtttcttccgtatcctcttcagacatctccttttgcttttctctcggaatttccaccaagtgttcagaaacattgctttgcttggatttttcctttagctacacaacataggtccaaccatttaagcacttctaaccattaaagtggagaaatatcaaagaaataaaaatcataccttcagaatatagttcttcctctttgctgccacgctctctttgccttttgcgttatgacttgggttgatatagtcgagtagatcggaaacactgcaaaacattatcaacttaaggatctggccaaggagtacacttaattgacacattcaaacaaaataaaaaacttataaacaacaaataaggagatatcagaaagttgtttgaccttaggtggcctttgctggctatagacgcgtctggcttaggagtaccatttcgcgcagcttcttgttgttcaaaagccttggactcaaagtattctagccaagcagcagcatcctgaaccatataataaattgtcaaacttaaagaatgcatacagttgtcagaaagatgactaatttggctgataggatatcatgataatatatacctgagtacgtaaatcatctggccccagctttgctcgaaggattcttaaggttgtttgctcatgctgaacacttaaatggtatgcctccatcaaggagagcgcaattgctatggcatggtagcttgcagcagtctgaaatttgacataattagcaaaatcaaatcaagtttcttacatatttatgttcccaaaacaaaaaacgagcatcgggaaaagaacctggatatggtccggaccaagcaacctttgattacacttgagagctttgtgaagatacctcaaggcaacatgcacatttcctagaccttcctccatcatggctacattgatgtatgtagcagcagtatttggatgagatggaccgcatgtgagatgtaagagatacaacgcacgcttaacatacctaacaaaaacaatcatatccaggtttagatgatggaaagagacatcaaacatttaaaccatctaacctcgcaattcttttaaaatcaagagtgctaaacttacttgagagccagctctgtatgctgaagcctataatagaagacagcaagatcaccataactcttcattgtatctggatgatcaagtccaagttccctctcattgatgtctaaagccttttgctgatatattgtagcctgttttaacaaaatcttttagtttcacaattgtcatataaaggaaagatatcacaatctaaccatataatatatacagacctggttaaagtcaccagtgtgatatagaaccacagcaagtaaactgtaagctccggctgtcattctgtgatagggaccgcaaactgctacgagtttagcaagagcctaatggaggaaaaaaagaaagagacaaaacaacaaaacaaaatcatgacgctgtataaaaaacaagtaatatgaagaaatagctgaggagtagacatggaccttcgttccatatgtaactgcatcttcaagctttcctttgtctaaagctgttttagatgactccagaagttgccttccatcagcagatgaacatgctgcttgctgcatagatttaaaatagaaagtctgaataactatggctgactaacatattagaaagaatcctgattcagatagaacatttttcctaatatctattgtcttgtccgttaccttatgcactgggacaagactaaccacatctgttttccggaaaaggtgcaggagaatccatgtcaaaagtcccttgggaatcaactcaataccaacctgacaaataaaatttaaatcacaatttcattagtcaatatagtaattagcaacaactttataactcaatcaaattttcgggttagagcattcataaattaccttatggcataagcctcggagaatggcaaacttccgtagatccttgtaactgaaggcattaagatcataatcataccgtttcttcaagaatttctccaaccatcggaagatcagaggatgtacattccaagggttatgtggtgttgctgcaacattttcaggaatcccaagcatcatgttcaaagcagcagctacttttatagctattttgtcagtgtcagtagcaacagcagaaatcaccgcctggaggatatgcttaagggctcttactatcatctcatgaacacacagcgattgtacatgtgacaatttatctgaaagcttcacctattgtcaccataaaaaagatatggatgatcaaaattcatcttgaatagtttctaagaaacacgaggttaagaaagccaacttacaacatattctaaagaacgcatccgaagacctcttgtgtgcataaaatcagttagagtccggccatcgactggggagagctccaatgaaccaaaatctgcatccctgcattccgtgataaaagaaaaatcgcatgatttggtactattttaatactaccaatagacaacactccaacataatttgactcatttaccagtttctgaattccactttagtttaatattctg

SEQ ID NO: 30944 - DNA, 2447 bp, Arabidopsis thaliana landsberg
cttgtgtggtagtctgaaagcaagattgacataatctaatagctatttgtaacaggattgcagtatttgcataacgcatgtagacctcttatggtacatagagatgtgaaaccaaccaacattttattaaatgagcggtctcaagcaaaactagccgactttgggctatcgagatcttttcctgttgatggtgaatctcatgtcatgacagtcgttgcaggaacacctggttacttagatcctgagtgagtgaatcaatctgtttcttgtactgaaataagttatgaagaattgggaactgtaacctctctttatgatactcttcttttcaggtattacagaacaaactggctaagcgagaagagtgatgtgtacagctttggtgtagtgcttttagagatagtcacaaaccagcctgtgatgaataaaaaccgagagagacctcatatcaatgaatgggttatgttcatgctcaccaatggggatatcaagagtattgtcgacccgaaactgaatgaagactatgacacaaacggtgtgtggaaggttgtagagttggctttagcttgtgtaaacccgtcttcaagccgtagaccgacaatgccacacgtggtgatggagctaaacgaatgtcttgctttggaaatagaaaggaaacaaggtagtcaagcgacgtacataaaggaatctgttgagtttagtccatcttctgcttctgatttttcccctttagctaggtaaaagtctttgtgttatcaagctttgttgtttattataatcgattgttcatattgaaatgtttaagatagttctgtgaattttcttcaaaatgtattagcctttattatgtgtaacattcttggattccaagaaatttatatctttaatattagtttatgtatgtgtcatcaacgcatggtcttggatgctcttttttgattactctgttctcatgattttgaagtaaaagtttgcaagaaattcggactcatacaaattcaaagtgaacgcatgaaagcgttgttggagtcaaatgtgacatggtccgtgtataattcactagagttcatatcacatacaaaaataaacgtgcctccataaaaattaaaatttactatctgatttaaattgactgattcatttaaaatctgctaaagttttttaacctataaataatgtaacaattgatttcacatctttttttagaagtctacctaataatatacatttgaaaattctccaacgcctgaaagcggaaagaatgtcgtagacacgtaatgtgttactataataatcacctgaataaaataaaagaatctaatgttgaagacttagcacacagcttacacaagctatgaatgccaaatcaattgaccaatataatgttatctcaatacttgccagtcaagaacaatgatcaatgaataatcataacctccctgaatcagagcactcactgcaaaaaaagaagaagatgaagtctattcatgggtttttgctcttcttgatcacagcttatgtcattttggaatcagttcaagctcaagatcaattaggttcttactttttgtttcttcgattactctatagattaagaaacccttttggaatttgtttctttaaatttgttattttggtgttgatcgtcaacaggattcatcagtttggattgtgggttagtccctaagaacgcaacttatacggagaagacgacaaatataacatacaaatcagatgcaaattacatcgatagtggattggtcgggaggatcagtgctgagtacaaagcggcgcttcagcaacaaacttggaccgtaagaagcttccctgagggtgaaagaaactgttacaacttcaaccttaccgctaaaagcagatatctcatcagagcaacctttacgtatgggaattacgatggtttgagacaagtccccaagtttgatattcacattggtcctagcaaatggacttctgttaagttggatggagtaggaaatggtgcagtcctcgagatgattcatgtcttaacacaagaccgtcttcaaatttgtcttgttaagacaggaaaagggataccatttatttcgtcgctggaacttcgtccgttgaacaataatacttacctcacgcaaagtggatcgttgattgggttcgcaagagttttcttttcagccactccaacattcataaggtaaagaggttttttttttttttttttttttttttgtattttttctggttcgtttctgcgtgtagatgcaaatcatgcaatatcttgatgtaaagtgcaccagatatggctagctagtttgaaaaatttggtatttgcattcggattttcggatgcaaaacgttttatccaaatgcaacatgcatatggaaaaagcgattttagaaacgaacaacattaacggctagatctggatgttgcatttaacgacgggact

SEQ ID NO: 30945 - DNA, 2309 bp, Arabidopsis thaliana landsberg
cttcttacttttgcgtaatatgtaccacctcacttctcaaccgcgggttctttaatccttcattatttcgggattaccttctctttttgtttttgttttcgttttcaatttctcatagattcatttacaaactaaatatcataggaaggtgttatctctagttaatttcttatcctactttaacaaaatttaattgtcaaaagattatttttacgtttatagacaaaagatactgacacatcaattccacgaaccaaatggttgagaaaaacaaaacgactatctttgtcttgcaaataaattaatggcagtgagtaagattctcagctgaaaattcatacaagagtaaatgatcaaataaccatttatgagagaaatttaatccttcagaaaccaatgaggatctgatcaagtaattgcaaaccacatgagtccatgataaaggattgtttgacttacgcaatccacatagtttatggctgcttgatatgtaaggtttatctgctttgacagtctatagaatcttgctaatcaatacgtcatatccggtgaatactgaaacttttttaattaagaaaacacaaatcatcttttctccggaggatttcgaatttagttccggcaatgctgaaataacatatgttgaacttataacattccaagacatcaaattttactaatatataaataattacatattcttcttctacatgatcaaaaccttttcaactttaattaaagggttacgtcgcggcgttttgtgtggcttactctttttttacactataactatagaacactcgtggatccaatgccgtttaggacaagattttatcagacgagaaaaaaaaaaacaataccacatttttaaatatatatggattatggactgcaacaacaatatagaaaagaagagaaaaaaataaaaataatgattgaaaggaaatatcatcacgcaaaaccttaaaagtactatcggtatcgtgtcctcctctcctcatcaaatagttcccacagttttcacatcaatttaaccattttcaatttttttcactctctgtctctctcctttgtataatactatattagtaccattacccatctctctttcaccaccaaaccaacacctgcaaatcctctctctctctctcactccaagaaaccaaaaaaaaagatgtcagtcaaccattaccacaacactctctcgttgcatcatcaccaccaaaacgacgtagctatagcacaacgagagtctttgttcgagaaatcactcacaccaagcgacgtcggaaagctaaaccgcttagtcataccaaaacaacacgccgagaaatacttccctctcaataataataataataataataatggcggcagcggagatgacgtggcgacgacggagaaagggatgcttcttagcttcgaggatgagtcaggcaagtgttggaaattcagatactcttattggaacagtagccaaagctacgtgttgaccaaaggatggagcaggtacgtcaaagacaaacacctcgacgcaggcgacgttgttttctttcaacgtcaccgttttgatctccatagactcttcattggctggcggagacgcggtgaagcttcttcctctcccgctgtctccgttgtgtctcaagaagctctagttaatacgacggcgtattggagcggcttgactacaccttatcgtcaagtacacgcgtcaactacttaccctaatattcaccaagagtattcacactatggtaaattcaaaccctttatttcctcttttgttttttctttctctcttatctatatgtcagatttatactcctctctgttctcttttaagatttgtctttttcataaaaatagatgattcgtaatttgtattgcatatttacatgttctcttaaaaaaagtaatagagattaatattttatgcatggtattttagattatctgcctactttatatggtagtaaacaagaacattcatctttatttggttttataaacaaaatatgagaatttttaaaggttagggcaagcacttggaaagctcaacgattttagttagctggtggaatatctttcttataaaaagcaaatgagttatctaaaactatatgacaattattttagttgcgtgtgtaatgtatataaaataacaacatgaaataacattttgtcttttatttttgtcattcttattatttaattttggacagcgcaatttcaaataatcttctcgaagttgtaactatcggttacatgcgcgtgaggagacctggtcaatcacttagactaccgtg

SEQ ID NO: 30946 - DNA, 2398 bp, Arabidopsis thaliana landsberg
  unsure (1)..(2398): unsure at all n locations
agcggagttgcctggaagaggagacatcacatcatcttttctttggctgccaacatgttcaagctatatggagaggtacacatatattccactgtgctttctttgaccccaacctcaccttagaggataaaatcaacgtgatcctgcaaagttgcaacaacaaaagacaagattctttaacaagacaaattctcctatggactttgtggagaatatggaaaagtcgtaaccttcttttctatcagcaaagaagtagtgaatggaggaaagaggcgcaacaagctgtaacggatgcatatgaatgggctgaccaaggaacaattgaaaacctgacctccaataacagaactgaggagcccatccacggctggatgaaaccggacccgggctacataaaatgtaactatggctacagttacaaccagaatggtaatattgttaaggcaagctggattctcagagacagcaatgaatattacaaggaagcaactcaaagtacaggacataactgtgtcaacacgttagaagcggaacttcaagccttactgatggcaatgcaacgtgtttcggggaaagggtacactcatgtaatctttgaaggagacaataaacaagccgtttcactaagcaacggcaaatcacacaacttccaagttcataatctgatcagagaaatccaagtataggagaagcgcttcannnnnnnnnnnnnnnnnnnnnnnnnnnnnnnnnnnnnnnnnnnnnnnnnntctttagcaaaagcgactctacctctcaattcaatttttgtaaatcattcttatgttcctcaattccttgtacaaatccccaatgaggatcacatttcatctcattaataaagatatcttgatgttaaaaaaataaaaatctataataacatatttcttagatatatttgtagggactaaaaactaaatagatgaaagagttaatttaaatattcaatgcaaattaacgatttgtaagttcttaggaataaaatatttagttgagatagaatatgtaagggcttgtatgttattagtaaatagtattaggttttttgaccaaaacatctaccacaaatgtacatgtagataaaatataatacttaatcactctttatgtttgacaaaaaaaaatcacttttataaaacgaaaacaatcatttaaccatatttaattgtaaaatataaagactaaccactttttattaaacctaaataaatatataatctcggttaattgtaaaatctaaagtttaatcctcctttataaactcaatctgaaatattactttgtttaattgtaaaatctaaaccctaatcatgtgacatataaccttgtttaattgtaaaatctaaattattccttaataccacaaaccaacatttaacctcatttaattgtaaaaatctaaactctaacatttgcttattaacattaaattgtttataattgtaacattaaatcgtaacctcgttttaataaactcaaaccaacatataagcactaataatatattatcataaattttattttaataatcactttaatgtttttttcatagataatattagtattttatttttattaggtacatattctttagggtttaaccttaaaccgacatttaatctcgtttaattgtaaaaacgaaactaataaggcccaatacgagcccaaccatttgcatcgcttaagaaaaagattggatcgaaataaaagatctcaagacacgacatcgataacgcgtggaacatgaggagacaaaagatttccgtcatcctctttcgccgttgaagccatcgattccaccggagcttgaaactaacatcgaatgaatcgagtataaattcttctgtaattctccgataactacaaaacagaagtaaagatctaatatggaaccattaatctcaatcacttgcttgaatcatcattttttttttttgagattcatcgcaaaacaacgtaaaagagataagatatccaactattctacttctgttaactaaaccaatcgaagctttaataaaacgaaacagctaaaagcaatagtaataagttgagaaattgcattgaatcttcaactaaattgcaaatcgcctaattattttccataaaccgtaaacccaaggataggtaagacccttttgagtggagaattgccacaaacaccaccactactacacatatccgatgaggtttaacccgcaacttttattcaaaaaaaactaatttataaaaaaacaaaaagcagccaagaaacgccaacagcaaaaaccgatctcatcactttgaaagtcgaatgatgccagacaagacctggccaacaccggaaagagctgggtagttgccagaagataatccctaatggcaggccaagccacaaaaa

SEQ ID NO: 30947 - DNA, 1390 bp, Arabidopsis thaliana landsberg
aacatcaaggcaatttgacggatactgaacacaaaaccattgggaaagagagaaagagagagagaatgccaagcagaaacaaggtgaatagctgatgtttacatgcatgatgcatgctcaaagatggaaccaaatgatagctttctgaatttgaccaattgcaagagcatcacatgatttcgttcaaacaaaagttcctaaacaagctttcaacttttaccgcaataattagaccataactggcaaagaaaaaataacgcagtaggcactagggtagcctttgtaatgttcacaagacggccactagaaagccataaagagaattaaaggaagaagctttattaatgagaattatccaatgaaagatcctccatttacttccttatataaacaataatataagcaaatccagctaaaatcactcttaaaccataagaattcttcttgtctatttttttgtttccatttctagcaaaacattcttcattacccataagacaaatcaagcttagcagcataagataaagactcaataaaccctaaccacaaactgagtttcttcctgacgactcataccccaatcacaaaccacattgttcttctactcttctcattatctttgcttggggtatgcaaaacttatggaaaaatgtcaggaaaaactacgaaaaatcgaaaaacaagaaagacgaaaatggtagaaacactaagaggcagaaggaagaggacgaggcggcggcaacatttgacggagattaggaccaccggtagctttaagtatgaaaggatgctgcaaaagctgttgagctgaccatctcttaggaggatcactctgtaaacaacaagaaacaaagtgacgaaactcctgagacgccgtagccggagcttcaggtggctgagacatacaaatagcacacataagactagcccaatcaccttgtctgctcacagcaaaaggaaacctccccaagtaaaactccaagatactaacacctaaactccaaacatctccagcataaccatcgtaacgaccatgattcaaatcagtattaatcctctcaggactcatataagcaatagtaccaacagatgaattacaaggatccattgtttgtgccaagatcctactcacaccaaaatcagcaattttcacattcttagctgagtttataagaagattcgaaggtttgatatcacgatgaacgatatgacgacgatgaagataagctaatccactaagaatctgacgagagagatcagctaattcctgttcttgccatatatgagctccttcaagagatccttgatccataaactcaaagcaaacctggatctcaccgttatgatcaaacatatcgtgacatttcacaacgtttggatgatcaacact

SEQ ID NO: 30948 - DNA, 2987 bp, Arabidopsis thaliana landsberg
agaacacgtgagaatagcataaaactaagcacatacgtggagaatcaatacactgtcagaagttgagagaagaccatacttaatattaaacatgagaatatacaaactgattttctgaatcatgtattttgaatcgcagtacgcatatttgcaggttagaccatctccaatgtcacttttacgcgtttgtttgatttaaattcgatttcctcttcttggtttatatcacaaaaccaacaaaatgacaccgcgtaaagtctgaaaaaaacttaacagagccagaagtgcccagttaaccaaccacacaaagtcacaaatggtttccgtgcttgaaagtgatctcacgcgctttacacatcgcgtagatacctttttctcgattttaacaattttgctatttatttccttttaattaattttctcaaaataaaaattaacgttcccttttcagtgtcctttcaatttctttcgacgaaacttcatttctcaatttcttttgattttgatcgcttcgaagaacgaatcaatttaagcctgccacaaacaaaccctagaatacgacaacgcacgacgacgaagaagtcgaagaagactactactataaacgacgaagatcattacttcaatcttcaatcgagcttttaaattttcagatcgtagaagaaaatcgaacttttgattccaaaagcgatgagaccgattcaatcgcctccaggagtttccgttccggtgaaaagccgtccccgtcgccgtcctgatcttaccttaccgcttcctcaacgcgatgtttctctcgctgtacctcttcctctcccacctacttccggtggttccggtggctctagtggatctgcgccgtcttctggtggttcggcgtcttcaacgaacaccaacagctccatagaagcgaagaactattcggatttagtgagaggtaaccgtatcggaagcggagcaggtggaacggtatacaaagtgattcaccgtccgagttctcgtctatatgcacttaaggtgatatacggtaaccacgaggagactgtgagacgtcagatctgtagagagatcgagattttacgagatgtgaatcatccaaacgttgtgaaatgtcacgagatgtttgatcagaacggtgagatccaggttttgcttgagtttatggataaaggttctttagaaggtgctcatgtgtggaaagagcaacaattagctgatctatctcgtcagattcttagtggtttagcttatctccatagccgtcacatagttcatcgtgatatcaaaccatcgaatcttttgataaactctgctaaaaacgttaagattgctgattttggagttagtaggatcttggctcagactatggatccgtgtaattcatctgttggaaccattgcttatatgagtcctgagaggattaacactgatttgaatcagggaaagtatgatggttatgctggagatatttggagcttaggtgttagcattttggagttttacttggggaggtttcctttccctgtgagtagacaaggtgattgggctagtcttatgtgtgccatttgtatgtctcagcctccagaagctccagcgactgcgtcgccggagtttcggcattttatctcgtgttgcttgcagagagaaccggggaaaaggaggagtgctatgcagctattgcagcatcctttcatattaagagcaagtccgagccagaacaggtctcctcagaatctacatcaactcttgcctcctcctcgtcctctgtcctcgtcttcttctccaaccacatagcgttttctctcttcttcccttcatcaactcatattttttgtgttactactgttcttgagtctgttgtccaattttttgctaatcatggagggtctctgaattttacatttattagggagtaaaaaactcgagagagggtttttgggattattgttttctagaaaggtaaaagagaacaatgataatattcttatgcttatgatggtgcatgtatccccaatgtagctttgttgaatttcataaaagtttttgccttggtttttcttttgtcatttatgctcgtcaattttgcatcttgaagacgaaaaggaccgtttcgtttccattctcggtgtttagttttgtcattgataaaatgtctccttgtaaagcttattaccatcatgaaaaagcaaaatatacggatcgtagaatcgtttctcaaacctaatcaggttgatgtcccagtttagaacatccttggaagagtttaagacaattcctcaatccgagagagcaaaacgactgtgtttagcaaagtgggtctaattgaagaaaagaggaacttgggccagctaaagataaagcccaatgttgaaaagacgtcgtctaaggcacaacaacggtcaaacggtcatctccaaagttggaaaacgacaagaaacaaaaacacagagcagtggtgatgaattgaaagcttgtacggagaaagtagcgattctcgcagccattgatacgatttgatgacagaggatggtgacatctgtcctatctctagggtttttcgagtcaccccattctctctcacgtctcgtgtataaatactaaatgttctgtttcctttagcttccttcctttgctttgttgttactaattctgctcgttatattgtaagtgtgattagtgttaaatttttagcgtattttttctttctaagttgggatttgtttagcttgttgcgttgcctttttcagtgtgattaattagtgaacaatgaggttagctagcttttagttagggtttaatcctccttttagctttctcattctttcttcgatttagccacaaaacctcatccacatacacgtacataactggtcctgagcacaataaagtgaaacatgttagaaaacatgaatgattatccatctttaaagtatatcatataacctataaatatccattatataaaagttttactcacgaagttactttat

SEQ ID NO: 30949 - DNA, 2331 bp, Arabidopsis thaliana landsberg
  unsure (1)..(2331): unsure at all n locations
gcattttatgctggaacccaagagaaatgctttttttatttttttatgatgtcaacctcggtttgacagcttacctcattggaaatatgaccaacctcgtcgttcattggactagccgaaccagaacctttgtaagtttgatcactttcttttagtctaggcatgttcatttcggataaaggttcgggtaatagcgtggggtttacgtacttttgagtattttaagttgactaaaataatattgagtattactaatctgtaatgctttattgctttgtgttaaacagagggattcagtgagagctgcttcagagtttgcttcaagaaatcaactcccacatgacatacaagatcaaatgttatcacacatttgcttaaagttcaaaacagagggcttgaaacaacaagagaccttgaacaatctgccaaaagcaatccggtcaagcattgcaaactatttattcttccccattgttcacaacatttacctctttcaaggagtttctcgtaacttcctctttcaattggtaaaattctattctctaaccttttttcttaacgtttaatatgtaagaggtgaccaactccatgtaccttttcatgttcaaggtttcagatatagacgctgagtatttcccaccaaaagaagatataattctacaannnnnnnnnnnnnnnnnnnnnnnnnnnnnnnnntcaggagcagtggtgagtgaaatatatcggttatatgtaaatatgtgaataaaagttaggaatcttgtaacattgtgtattgtacaggacttcactgtctacgttgatggacatgatcagtttcaagggaaagcagtaattggagaaacatttggagaggttggagttttatactataaaccacaaccattcacagtaagaacaaccgagctgtctcaaatactacagataagcagaacatcgctgatgagtgcgatgcatgctcatgctgacgatggacgagtcatcatgaacaatctattcatggtatgtgagttattatagaaatgtttctatagttaaaacaaactctaaactcatttttggctataaaactttcagaaacttatagggcaacagtcaatagcaatagatgattcgaatactagtggtcacgaaaacagagatttcaaaagcatgggatgggaagagtggagagattcaagaaaagatggctatggtttagatgttacgaatccgacttccgacactgctctaatggatgcgatttacaattaagatactgaaatggttaagaagaggcttaaggaacaaaagatagagagagccaaagaggaaagatctagtagtgaaagcgctggaagaagttacgctaacgattcatcgaaaaaagatccatattgcagctcaagcaaccaaatcatcaagccatgcaaacgagaagaaaagagagttaccatccacatgatgtctgagagcaagaacgggaagttgatactcgtaccatcatccatagaagagcttctaagacttgcaagtgagaagtttggaggctgcaacttcacaaagatcaccaatgnnnnnnnnnnnnnnnnngatgatttaaatgtcatttgggatggtgatcatttgtatttttcatcaaattgagtttgaaaactcgacttcatttatagagcatgtatatctgcagacaatgtatttttacccggtttcatagaaaagtctagattatcaaaagcagagtatacaaaacttacattaattgacacaaaaacacaatcttatttcacagcttgactatgatacattgataccgttctgtttgaacacaaaaacattatccaacacgagtcttctgctttgaacttgttcaacatgataaatcaagaaaatatatttttctatctcttatcgataaagattttaagagatttacctattaaaaagacaaaaaataattttcaatcatttgatttattttaaatttacacacttcaacatgtttgtaataaagaaaaaaaaataaaaataagaaattctcgaatgtattttatattcattcaacgaataaataaattattccacgaacatgaactgcatgcgtcccacctacgcagtacgcacatcggatttcttaaccttctcattttatacgaattttccattttaccctctctaatactattctccttcctcttccacagacccaatttcgtcattcaattccaaaactcccacctctatataaagccagcaaaaagtccccaaaaagtcaccaccacaaatctcatcgaaatgtcgtctcaagaaacgaaatcagatcaaagagaaggagcagagatctgcaatggc

SEQ ID NO: 30950 - DNA, 3447 bp, Arabidopsis thaliana landsberg
  unsure (1)..(3447): unsure at all n locations
ctgcgtcgaagaatacaatatggatacattcaaacatagcagttttttctctgctgatctcttaccatctcttggagctagaataaaccaatcaactaagctccgtaaacacatcatctctcctttcgatccacgtttcaggtgttgtatatatctttcttgcacattttcctcgttctgttctgttctgtttttgtgtttgttgtcttcttgagttatggcttaatgttgaattcaggggatgggagatgtggctggtcattcttgtgatttactcagcttggatttgtccatttgagtttgccttcatcacctacaagaaagacgcacttttcatcattgacaacattgtcaatggattctttgccattgacatcattctcaccttcttcgttgcttatctagacagccactcatatcttctagtcgacaaacctaagaaaatagctataaggtgaacaacaacaagtacataataaagacaatggtacggtttttacgtatttaaaggaagcataatttctcacttttattaatgaatatgttcttaggtacctttctacttggttcgcctttgatgtctgctcgacagctccgttccagtcactgagtcttctgttcaaatacaatggaagtgaaataggattcagagttcttagtatgctaaggctctggcgtctcagacgagttagctcgctgtttgcaaggttcatttttaaatactaaaccattttctttcaagtttagaagacttaccatatgaagaatcaacataaagcttaatctctcattattcctttgcttcaggcttgagaaagatatccgcttcaactatttctggacacgatgcacaaaactcatttcagtaagtctcaaaaacagaggaattctcatttcttttcatctataaatgctactagctaatgaactagaacttccaagttacaagttacaacgtatacttttatatatcaggtgacactgtttgcagtacattgtgctggatgcttcgcgtacctcattgcagatcaatatcatgatccaacaaaaacatggattggagctgtctacccaaatttcaaggagacaagcgtatggagtagatatgttactgctctttactggtctattacgacattaacaacaacaggttatggagacttacatgctgagaacccaagagaaatgttgttctttgtgtttttcatgctcttcaacctcggtttcacatcttacctcattggaaatatgaccaaccttgtggttcactggactagccgcaccagaaactttgtaagttcaataactttcttttgacttcacgtcaatctcttaaaactataacctgcaaaaaaaaaagagattcataggttttgaactaaacagagagatactgttagagctgcttcagagtttgcatcaagaaaccaactcccaccaaatatacaagaccaaatgttatcacacatttgcttaaagtttaaaacagagggtctgaaacaacaagaagctttaaatggtttgccgaaagcaattcgatcaagcattgcaaactatctcttcttcccaatcgttcagaacgtctacctatttcacggagtttctcgcaacttcctatttcagttggtaaaacactcatttgattaactctttctttgtccatttcttcctgttatattgttccataactttaccaactcgatataccttttgcaaccaaggtttcagatatagatgccgaatatttcccaccaagagaagatgtaatactacagaacgaagctcctactgacctatacatcctagtctcaggggcagtggtgagtgaatgaaatttaaaataaataattgtataggaatgttgaagttaccttctaacatatttactcgctcatgtaatgattgtgcaggattttactgtctacgttggcgaagaagatcaggtatgtgaacaatatatatcaccaaaataacttcactgtagaactcttagctgaaaaaagagaaatgactgtaatcctcacattcatgtaggttcaaggcaaggcggttgttggcgatgcatttggagagattggtgtgttatgctatacaccacaacctttcacagttaggacaacagaactatctcagatactacggataagcaaaaaatctctaatgagtgctatgcgagctcatgtggaagatggacgtgtcataatgaacaacctcttcatggtaagtaagaatgatataatatctggaaactaatattatttcaaagatgttttcacaatgatgtcaatcaatactaactcatttcatgatgaaatatgtagaaacttagagggcaacaatcaatatcaattgatgatccaaattcagaaccagagtcacttctccaggagtggcttggtggtggttcaaagacaggagaaggaaacgctagtgatcaaggacatggacacaaatatttacaactgcatggttcagaaaatattgatatggggtcaactgaatggagagattcaagaagatctggttatggcgaaacgaaaagagttcgagaacatacgatagagatagaagaaggagaaaaaccaaataaagagtttgatggaaaaggttgctctgatgcagatcttacctcatttgaatttcattcacaggaagcatatccatattgcagatcaaacatccaaatcaaacaacatgaagctgcaaaaccaaaagataaaagagttaccatccacttgaagtcccgggacaaagatttgtcgaagctgataatccttcctgcttccatagaagagctgctaagacttgcaggtaagctcttttacttcttaattctctaagatactactgaacataagaaggaagtaaagtaaactaagaaattatggtgcaggtgaaaaatttggatacatcttcacaaaggtcacgaatgcggaaaacgcagaaatagatgatgaagatgtgattagagatggtgatcatttgtattttctcatcaatgaaaactcttaacaagacattagtaaccactgttttctttccatagagtgtatatgtatatctgcaggcaatgtaatgttttttactagaaaaacatttgatcatcaaagaagatcctagagaacttataactggacaatgttactccatcagaattctgaatttaacagagcatttcccgcgtaaacgtttacattcgagtttatatatattgggccttattgggcttagatgagtttaattactaataaatgagattaggcctagttaattataaaataaacatttttttcccttaaaaaattgtatcaaagattttctcatgcgaggatttgattttgaagtctgtcgtgaatttttcatttcaatcgaatttgatcggagatatgggtgctcagaagaaaacccgcgcggctaanggtcgtgaggattcagaggatctaagtc

SEQ ID NO: 30951 - DNA, 4539 bp, Arabidopsis thaliana landsberg
atgacgcagatttccaacctttttcctttaacagtttactcaaaggaaatatctatttaattttactttcatgcagtgtatccggcgatacaatacttatttgtcaatttttttctgcagtgaactatcttataaccacctaactggatctataccacaaagtttctcagatttgaactctcttcaattactgtatgtaaacattcattgatcagtgaaatgaactttcccattcataagtactttataactttttttgtgtcatctataacaggtcacttgagaacaacagtttatctggttctgtcccaacagaaatttggcaggacaagtctttcgagaataacaagctgcaagtgtatgacctctagtatttgtttttctttacttattagtttcctagttttatacttcattctcagaggctgaaacttcttttggatgcatgcacagtgatctcaggaacaacaacttctctgatgccacaggaaacctgagaacaccagacaatgttaccctatagtaagtttctttgttcctgtttggtagcaacttaatgcacatcaaacattttggactgaaactgcattctcttgtcttggcattatagtctaattcagtttaagtttttgtacttgttctgcgcgctttaaaaccaaaagtcaacaactcataggtttctctagtttctactattcttttgctatctactaaagctcttttcgtatccttctgtatgaaagtcttcgtggcaacccaatatgcaagagtacaagcattcccatggttacacaattcttcgaatacatctgcggcgaaaaaaagcagacatctacaaactcaaacacaccctgcagtaatgtgtcatgtccctttgagaatgtgaaagtatccccaggaatctgcttgtgcacagcacctctttcgattgattataggctaaagagccctagcttctttttctttactccatatattgaacgccaattcagggagtatattacctcgtccctccaactggagactcatcaactagcgattgatagacttgtcgatgagaacaggctgcgtccaagaatttacttaaagctagtccccaaaggcagaataacatttaacaagagtgaagtcatacgtatacgggacaggtttatgtcatggagttttaataaaactgacttttttggaccatatgagctgctggacttccctcttcaaggaccgtatggtacagtttttggatctaatctttaacaaataaggatatgtgtatatatatagtaatatgcatttaattctttggatgcagctgatttgttagctcaaacgagtggaattagaacgattgtatggatgatgatagtagcaggctctgtcgtcgctgccactgttttatcagtgactgcaacacttctatatgttaggaaacgtcgtgaaaactcacatacgctcaccaaacgtgtttgtaagaaactcagcaatggctctttttgtcagtatttcatcttgttgtgtcctataaccatgaaattgaggactctttcttatgtcttccagtcagaacaatatctcgggaaatcaaaggggtgaagaagttcagttttgtagaactgtcggatgcaactaatggttttgacagctccacactgattggtagaggtagctatggaaaggtctacaaaggcattttgtcaaataaaaccgaagttgccatcaaacgaggagaagaaacttctctgcagagcgaaaaagagtttctgaatgagatcgatctactttcgaggttacatcaccggaatcttgtgtcgcttattggctacagtagtgacatcggggaacaggtatgtccttttgcatgtgcagttgtcagttagctttatatctatgctcttcgactaatccacataggtgttctgtttggttcatgcacagatgctggtatatgagtatatgcctaatggaaatgtgcgtgattggctttcaggtaagaaatattcctcccaagttcttttctatacatgtaagatcagaaactagcttaaaatttttgaggcgccaatctgcttccacatggatgctaatgtatcagtggttttacattgtcacgcagctaatgctgcagacacattgagctttagcatgaggtcacatgtggcgttaggttcagctaaagggattctttaccttcacactgaagcaaatccgccagttattcaccgcgatatcaaaaccagcaacatactcttggactgtcagcttcatgctaaggttgctgattttggattgtcacggttggctcctgcttttggggagggagatggtgagcccgcccatgtatcaacagtagtaagaggaacaccggtgagttctaaactaggacacaagtcgatatgtgatactatgtaacctgtggcttttgacaaaaccaaacatggtttccctctcagctatgacattttgataattatacatgcacagggatatctggatccagagtatttcatgactcagcaattgacggtgagaagtgatgtgtacagctttggagtagtgttgcttgagcttttgactggaatgcacccattctttgagggtacacatattatccgcgaggtacttttcttgactgagctcccacgtagatctgataatggagtagctaaatctgtgaggtttatgtttttttgaatatatctacaaatttcctaagagttttttctgtacaatgtgatacaggtgaggaccgcgaatgaatgtggaacggttttgtcagtggcggatagtcggatgggacaatgttcgcccgataaagtgaagaagttggcggaattagctttatggtgttgtgaagatagaccagagacgagaccaccaatgtcaaaagtggtgaaagaacttgaaggtatttgccaatctgtgcgagaacccgaaatgttctcagaaacaacgaaattactctgctccaaaacatcgccgtcatcttcttctgtaccctcgccattgtctttacttcctggaagtaacttggacagtggctttttccacgctgtaaaacctcgttgacaaatatttgtgtgagataggctaacatcagactaatgagagttgtgttattatacttaggagatattatgataccagttatgttgtcctgattcctaaccatataagctaatatctatgcagatatggaagctaaccaatcttatcatgtacatatgcggttttgtattctctcaagtttcatttctcttgtcattatgtgcaaccacggccattgacaatgtctggtctggtggagaatcagtgtagaagagagctatattccgaggaaaagaagatttaaattatgaacatagatgcagcaacaaatcaaaaggtttggatactctgaaaacaataaaagtacataaacaaaatccatgaaacacaatctagcaggacaggtaagagcttcacacgtttgaattagaacacacagaccccaaaagaacaacaacagagagaggagaagtcatcgactgtgaaggcccattagagcagcgctgatccatagaaaacagcttctgcaggacccgtcatgtagatatggttgtcttcctgtttccactctatctccaatggtccgcccggtagatccaccgtgcatttctgttccaccataaaccaatacatatatgaggaactcaaggtcaccacatgcagctaatctcagctcatgacaatctttaagctccaatgaatatccaagaaacatttgtgtgagagtgaagaaccaaaaaaaacgaatacaagattctcccacaagagacgaagcgaacgaaaagtacttagtaaaatcataatctcatcaatcgtctaccaatcaaatcatccaaccattcaatgcaacattcaggtttcataaaaaatgcttaaaaactgctaatccagtgtaccattttgcaaactgttatctagttttttaagttctgaaattccaaacttaccctgtcggctcgaccttcaaggactgctgcaacaaccagagcacaagctccagttccacaggccaaagttgctcctgcagttttaagtatgcgtaagcattaagcatataaggatacagagactgtttataatcaactgagaattatattcgaagattggggggaatttgcggacctgctccgcgctcccacacacgcattttcaaatgagaacgtgataagacctcaacaaattctgcggatacacagaaagaactgtaagacaactaaagggatataaatccaaatataagcgagaagtcttgctgtatcagtcaatggaaatctggatacatctgccgatgaatctccactaacctgtgttagttcgagctgggaacatttcatgatgctcgaactttggaccaatctctggtaagttcaaatcatcaactttcagattctggttgacacaaaccaaaattacaaatgataagaaattcacgtgtagacaaataatatgattagaagtctagtaacgaaacacgcaccggtccaccctttttccaaa

SEQ ID NO: 30952 - DNA, 5538 bp, Arabidopsis thaliana landsberg
cacatttttccatgtttttttccataggttttaaagactcctgtttctttggatatgcttggtcgcatcttcaatggttcaggaaagcccattgacaacggtccacctatattgcctgaggcgtacttggatatttctggtgagctgctttagcctcttgtcacataattactatctcataataaaacacacagatataattctagacttttgtttctccaggaagttctatcaatcccagtgagagaacctatcctgaagagatgattcagacgggtatatccaccattgatgtcatgaactctatcgccagaggacagaagattcccctcttttctgccgcaggtcttccccacaatgaaattgctgctcagatttgccgtcaggctggtttggttaagcgtttagagaagtcagataatcttctcgaggtatcacgatttatacattactggtccgtgtctacagctggaaattggtttgttacaattataacagtgatcccttagacagttagacatacccattacaagataaattaagagggttaagttaagctaggatattctctcttgaatctttctttttttatgagagcattgcatgcgctctgtcgaccaaatcctacttggggagatttgttagtattacttttttgtgacttaacgccccttgtccttctcctttgatttggtaaaatctacaatgagttggtagttgtgtaatgccataatgtattataaaacagtatcacattggtccatttatgtgaatttgcagcatcaggaggatgataacttcgccattgtgttcgcagcaatgggtgtgaacatggagactgcacaattttttaaacgtgatttcgaggagaatggatcgatggagagagtgactcttttccttaacttggcaagtctcgcaatcacactacagacatcttgaagcaaattttagttccaatgtttttctgaaggtttctcattctgttttccgcacaggcaaacgaccccactattgagcgtatcatcactcctcgtatcgcacttacaactgctgagtacttggcatatgaatgtggcaagcatgtccttgtcattctcacagacatgagttcctacgccgatgctcttcgtgaggtgataaccgatatttgcatgctctgttcacaattcttgaactttgagatgataggaagcctgaaatagtgtttaacgttgactaatacccttaggtctctgctgcccgtgaagaagtgcctggaaggcgtggttacccaggttacatgtacaccgacttggctaccatatacgagagagcagggcgaattgaagggaggaaaggttccatcactcaaattcccattttaaccatgccaaacgatggtaattcttagtgctattttcatggtgttttgttttagcattattgcctttaattcgaatgatttttgtttgaagtaaacaataggtgataggaaagcttgaccgacaccgagatagttgaaagtaaacatggaatagaactcacccggaaactggcttagaggaatagacaaaccatgctataataagtcgttgcccgatctaggtctagctgtttgggactctaacagactgagtggctgatatactagtgttagtgtagtacacctatgcagttaatctgatcataaagccttcttacagaggaatatttgttggtcctatataaaaggtttgtcggtcaggtggataattttgttcgaaatgtcttttttttttttgccccctttatctgtccagatatcacgcatcccacaccagatctgacaggatacattacagaggggcaaatctatattgaccgacaacttcacaatagacaggtacactctttcagaagatagttggttcaaagttcttatcataatcgatgttattacaacgtgaaaaattaacctgtatgagaaacctatatacctagtaacaatcctattattggacttttgatttattctgttaaatccagaatcaccccctttagtttttagatatagagagcatgtggatgaaaagaaatattcttgaaaactgaaacattttgttcatgacttcaaaacactgacatttgaatgtaataataatctatgtacgcccaagctaaaggctagaagcctataagtgaacagtacttatacatttattatgttgtgtttatattctgtaatacccgaaatgtcagaaattttgaaagttgtttcactttagtttgtgtgtaagtgtaaggcgttggttctagttttatgtaatagctggttcaccaattttcgttgtgattcacagatctacccttcgatcaatgtcttggatctctgctcgattatgatgaagtgtggcggattcaaaaataatagatgaagccaaatgatcgattgtaaacgtaacaatgactttgtattgcagagtgccattggtgaggggatgactcgcagagaccactctgatgtttctaatcagctgtatgcgaactatgcaattggaaaggacgtacaagcaatgaaagccgtggttggagaagaagcactctcgtccgaggatctggtctctctatctctgtctttctaaatgccatgttaaataatgaataaactctaagcgtttctttgtcactcacactgacaataaaaacttggggatgcatgcatgcaacagctgtatctggagttcttggacaaattcgagaggaagtttgtggcacaaggagcttatgatacacgtaacatcttccagtcgctagacctggcctggacactcctcaggatcttcccccgtgagttgcttcaccgcataccggcaaaaaccctcgaccagttctatagccgagactccaccaactgatcgatcatcccatgcttcttctccaaattgcatctctttttgttttgctcctttgcgctttggtttgcacctctctgtcctttcccaataaaaggtgactgacccaatcgccggctattcttttgaacattcttgtatcctttatttatcaaataaactaaaataaaaagaaccttggagacttgagctgttgctgatcctcgactgcttcaattgcgatgatatatctatctaataataataataataattccagagataagtaattccaagcacatacataacatcgacatgcttattattaaactgatgatggtcaattgtgaagaggacaagataataagaaatgtaaattggtcgtcactgatgactatttgttcttttgagaaaattgccttcaaaattttctgaatatttttaatttataatataattttgaattattatctaaatattttagtcgatgtgaaatgttaaacacacattttcgttaattaggtaatattaggtaatatgtgtgttttctaaaattcgaattacaatataaagtaaaagatttttttttttttttgttactttatgtattatataattattcaaaacagttttaaaatcaaacaaatatgataagagaatcataattttaaatcttctaacaataaatattattaatttattaataaatatagaatattccgtgtatgagtcggaaacaatttgaactgaccttttaaattttctatgaacaataaatacaaacggatggagcatccatagaatccgacagcattttaccccacccgccaaaaaattattgctataaattctttattgctctgttttaccatactcacgttttcattggctatgtttgaccgccttctctacaagtgctataaaaaatttaacagcctcgtttaaacgtgattaccaatgagacggccataatcttaaaaatcactcaaaatctgccaaccattcatgaccttgatatcaaaatacattcaaatgtatagaaatacaaaattcaatagcacctagtaaatttaaaagtaaagctaaacattcataaccactataattttggatcaaacaatgcaaacgcagcacatgaccgagtccgcgtcagaaaaaggggccaactgctccgtagccgccaagaatctcgcaggtgtggaactttcctcctttattcgatgaatctctttcttcattcttcttcttcgaattgtacgtttattgaaagacaagtatattttcttatttactatataaagtaatttcactttctcagatcccgattcctcttgatcatcgtcttcttctaccaaaattgttgcgcgacaatggagaaatacaacagtttatcagattttctcaaggagttctacatccctacgtacgtcctctcggcggaaacagaagaggaggaggaggaggagagtcgtcctacacctgcgagccccgtccttgtcttcatcaactccaaaagcggtggtcagttgggtggcgaactcattctcacctaccgatctcttctcaatcacaatcaggtctttgatctcgaccaggagaccccagataaagtgctccgcagaatctatcttaacctggagaggctcaaagatgatgatttcgctcgtcagattggggagaaattaaaaatcattgtaagagaatgttgttttctttgtttctttctctccaattgaatgaaacatcatctaatgccatccattattattaggttgcaggaggtgatggcactgctgggtggctccttggagttgtatgtgaccttaaattgtcacatcctcctccaattgccactgtacctttgggtacaggaaacaaccttccctttgcttttggatgggtgtgtgtcttacttactactacactcctcctctcaatacacttgcctgcatatgttttattattattattaagtgtatgtatctctctacagggaaagaagaatccaggaacagataggactgcagtggagtcgtttttggaacaagtgttgaaggcaaaagtgatgaagattgacaagtaatgttttacatatctgtctccacagtagtttttattagtctttacttttggtgaataactaacagacgactatctatctgctgcttcaagttggcacatacttatgaggatgaaaactcccaaagaaggtggttcttgtgatcctgttgctcctcttgagttaccacattctctacatgcatttcaccgtgtttctccaactgatgaactaaacaaggtgatttaccttcttcttcccattattattatatagctgtgtctcttccttttttttctgtcttatcttatatagaaacacaccctttatgtttttcaggaaggctgccacacttttcgaggagggttctggaattactttagcctcggtgagatattttagcttcaatctaactttggatttcccacaagtcattagcaaagttagatttccccttaggagttggttgatgagctaacttattgagtttcaatctagttattgcattgtttgtattgaaattaaataaacgaaaccagctgatatccttgaaagacaaatctccttgaaagttcttctttctattgtgcttatgaaggaatggatgctcagatttcttatgcgttt

SEQ ID NO: 30953 - DNA, 5235 bp, Arabidopsis thaliana landsberg
  unsure (1)..(5235): unsure at all n locations
ctgctatcttaaaagagaaattaaggcagccgtaccagtttaagactatgtatatgtttctctcaatgcgagttacaaacgcagaattttttttggacaagtttgatgattttcagcaacataaatacctttcaggggaaaataagaatgtgccctcaacatcgtcaagtaaatcacggttagaaagcttgctcgcgataagtcctgcttctgccaaccctgaaaagagtaaacagaatttagcttcattgtttatcttcttttcgggtagaatcaaaattcaaagttcactctcaccttgaatggaagaaaaatcagggtcttcgggagtaatatcatcaaaagcaagctcagtaacattctcaatatacatagcaggatacacttttgaggttgtgtttctgcaaagagttaaagaacacacataaatgcatgaatttcactttctaatacatacgaaggatattttgaccccaccagaaacactaacaaaatcatgaaagtataccttgataacgcgctgctggcagaaatcagccacctggcatattctctgcgagtacatagatcactaggttgtgtatcagtttcaatgacctgaaagatggaacaaactgaactataagctgcaaggtatacaagtgccagaacaatcacaagtgcaagatatacatagtgagggtctatacaacataaaaaaataatattaccttcagaacttgcagagctgcaaatgcttgacactggatctgatccgcagctacggggacaagaatcttcccaggattaactataacagacataaaaggtgcaggaattccagcagaagaaaatgcacttccaccactgggtatttccaaaagcattctgttgtcgtcaagctcatcttgactatatatgtttagttcatcttttgacccatctgttgattctggcacaggagattttgaagattcaagttctttcgttgtatctatgtctgatattgatgaccaatctgaggtttcgaagtactccggtgttccgttaacctcagaaagctcttcagcagtggcaaatgctgtttccgtgtcatttagtggcacaatctgaggttttgaagtcgaatccaattgtgaagaaacctcaggaagctcagttacagtccccgaggctgcataagcatcgatgcctgataaagaagataaggaatcttccttctgactgttaacatgattttctaaatcagacacattggttggttcagtgttcaggagactctctggatcttcagaatttgtattttccacgcccacaagattactactttctgcatctagaagaataggctcagtggatgagtctaacagagacttagattcagatattattttctcactttctgctgtctcaggatcagtttccgcattgaccatcaaatctgcttcaggagtattttgggggatactttcagtggcatccgcttcatcagtcatgacaccatcaaatgacgatgtctccttaccaagtagtttatcttcgccagacccttcatcacttttctgagctacatcattgctttctatactcttatcctcgtccttaagattgctttcctcactgttagctaccttaatctcatcactagaaatttcatcagatgattgaatcatgctttcctgctgagaagtcaacgaatgcatttcctgtttttttgttcctgcgctcaaaagatgattcccctacaataaatcagtacaaacaattctgaaagaggcacttgaaacgagcttgaatagctttaagagaaggagtattacgcttgctaaaagatgctgctgcatagcttagcccaagaaacaaaatgattccagccactccagccccaactacacctgaaagcaaactagttccagattgttattagtccacaagaaaaccggtaaactaaacagcttcagaacagagaaatcaaaatgctaaagagacttaaccaaactccaacgtaacatgcaatgtaccatttgagtatgtgcgctgtttagcgaacctctcaataacaattgaccacaaaaacaaatcggcgtatacggttcatcaactcaatctaaagattatgtgtagtacatccataagaaaacaacactcatggctcctaccaaattacacttgtaaactatgcagccatatagttttagcttcattgtgtaatcaaacatttcaccagctggttcttacgaaacctcgaaaactccgaatcacactgaaaaaaaaatcagaatccaaaaacagatgttcatccgcatataccttcaatcaaactcttcttcttaactctggaagacttcttatcatcgttatcggaatcatcccacccagccaaattatcagccgacgactttgacgaatccgatccggtccacgcatcaacttcaggcttctgcgaaacacagacaattccataacccgatttcctagccaatcgcgatggtcgtaagtaaacggcgggagatttccgacgcacgccggagctcaaagcgagacgaagctggagggaggtaggtgtccacgtggcggtcgcagaagccatggtttgattgtagagagagtaagagaggataagaaaatatgaagagaatcgtcagtagaagaatggtagaggaggattagggtttagaattggaattaaagtaattgtatcaaatgtattctgtgtttttggttggtttcgttacagaatattgcacaaagggagagcgttggacagtgatcagcctcacactaacacacctaaccacctaataactttgaaattgcttttatttatctttccatgtttaacacatatggttggtttaattcacaagtgaaaaaaaaaagctagatgccacgtcagcacgaagccaagaccaggtgttgaaagctcttgaatggaaagtgttttcgcttttattttaaacttttgagagaacatacaaggaacaaagaagagagtttatcacgttttactgttttagtttaccgctttaccgaaataggagtggaatatatccaatgacaacttaagcttctactaagatgacaagtacaaaaaagttacaaaaaactattgccatttttaacacattaatctataagatttgagggttataagcaaggcaataaactatacgagattacatgttgagtggttgaaaaatgttgagaaaatgagaagaagcttcattttttttctatatcatgctcagaggaggtagaactgagaatagagataatccctgattttgtaatagtcttcacacaacggtccttctatcagaatttgctgtggacccgatgctcctccctgaacaatccccaacatatataagtcattctctgatttgttgtaagaaatgcagtatttgctttgaattaccttttgacccgtcggtccaacctttcgtagagtgacatattcaccacaacgtaaagctcctccacctgcaaattctacctgaacacccttgctcgacagaaactgcttgaagtctgcgattttcagatcacctactagaacaggtttgtgtggcgaagcagcacctggcatcggtagtagagacctcatgtccctctctgtcttccctacttcggaatccacccaagctacttctgaatctcccagctgatattatttcatcattcttcagagacattggttgcaaatcggaaaagaagaaaaaaatagtcacggaaataaaaggtaccttcttgaagatcacattgctcatcagcttttcagaaagttggacctgatgtatcaccatacagggttaattcaatcacacaactcannnnnnnnnnnnnnnnnnnnnnnnnnnnnnnnnnnnnnnnnttctaccttgtaagcacataaatcagaagtcacatcgaccgtttcctctatttgaggagcatacacgtgtggacagatgttgttcaagcagtgttgcttcaaatgctctgtagcctcagctatcgcgtgcaccaaaaccttcacatgatatatagtattagatcaccgcaagtttccagttcagtgcttaacactatatatatataagacgagagagaaacgtacaagttttagaggagaaacatgcgcaatcattgacttgattgagcggccatctgaccgaccttcatagtccattttaacaagtgaacaactaacagtcacctgtgcaaaagcataagaacaaactaaatcatttatcagggaaattagacagcagttaggtatagacagaagaagactaaagagccatattgttttgtttagcaggcaaggcctacgttctgagaataaccttctgaaacttctacatgacataagatcaagtgggtaaaagtaagaacacaaaagttgttcaataacaagaagaaaattagaccgattaatccaaacaacaaaatatctgtaagttgaattatcgtgctaaagatctgattagcaaggtctcccgtgataactaattagaagatcaattaataaatttcttgtatgcatatcatcagatgaagataaatttgacaggcacaacgccatgtcaatgagaattcctatctctctatttctaagtgagaagactactccttgtgcctatcattgataagcagtctataacaataatcagagattctagaaagggagaacaaatgaggacattaactgagacaaaatctctatcaatgtactgttctttggatataattagagtctacttacaatgagctcattggacatgactttcgaaggtcttgtatcaagcatgagactagcagttgcctcatcaagccttccgtccacatcacctccgttctgaaatggaaaattatatcacaaatttaataagcaacacaagacttctacatagaatgaccctaaacctttactagtaagcaatcagttgttaaggaaaatataaagatggaactgtagaaccagtgcactcatttgaagaactgcactcataccaaatcaagagcctaagcaactttatggcaaaagatttcctatctgtatcccaaatcctcagagcatatcatgcagatttcttacatctttgttcttcttgatacaaaaatcgtaaaaggaaccaccactatgcaaacatcatggaaattaagaggtctaatttgcaaatataacaagagctaagaaagaccaagaccaagaccagaattcaaggaacgtacatgcattgctcctcggtccatgtcttcatccttgatcac

SEQ ID NO: 30954 - DNA, 932 bp, Arabidopsis thaliana landsberg
catcacgtttgtaaatggaaacacaatgaacacgattacacgttttttaagttaataacaacaaaggaaacatgatgtgtttgatgaactttgtggttgtggccatattttgagaagaaacaaatctatttggtattttctatttaatatgtttgaaacattttatttatactgatatccgaaagcttaatataacaataataagtaatgtaattgtaaaataaaattttaattcatcactttaataaagaaaatatttaattaatcatttttaatttacctatttttacattatattaactaataattaattataaaatagtaatatttatcaaaatgatcaaataaaataaaaatattaaataaatagtttagtaatagagaattgtatttttagtatgcctctgttcctttctgtttgatcttttaggaaaaatacaaatattaagaaaacgtattaaatgttgttttaattgtattattctttgtgatttacaatttttaagaactctaaagcaatgatatttaataatttgtattgaagtttacaagttatcaattataactaataattattgcattgaaaacctaaaaactcaattttttttgaaataatttgtttttcttaaaaaaaaaaaaaggaacaaagggagtattaggtaaaaatttgagctaaaactatactcaaatggtgtatgctgtattggcaatggttcatggttgcctggttggtagcaaaaaaacacagatataattacgttaaggctatcattaaacaaagagggtctcgcaattttagaggaaaaagtgaaactacactaattcattgtttacaagaaaagaaattgttacttctttggaaattggccattgttaattggaaacataaaaaattgggatcgtgaattcaaccaacaagacatttctctgac

SEQ ID NO: 30955 - DNA, 4623 bp, Arabidopsis thaliana landsberg
  unsure (1)..(4623): unsure at all n locations
actggccttaaggataaaactcaggagattaatactcttgttccatgaaaccagctgagaagaaacaaaacctgtcctgtgtcagcgacattatcgtctctgttcatctcatatgtattgttctgttcttcatgtattggaagatcttgaggtgtacccgattctgactcttcaacattttggatcaagtcactcgtgttctcacactttcttaaagcttcattcagcacactaatcacggcgttatagctttcctcagataaagatgcttcctcactcagtttcaaagaacggagacaaagatccgtgtaccgttgagccttagttgattctacatcaatctgatcagattccatgacttctctggtttttgcatcctttgtccaacgcttcaacacatactgagaaggaatactaagttcccctgacatctgcagaacaatcatcgcgtgcctacaaagaaaacctttgaactcaaacaatcgacaagaacagacaacttcagatgattcagagttccagaccacaacgaaagaacgggtctgttcataatcttgaaccctgaaagtcctcttgttaaccccatcttcttcactttctttcttcggatgacaagcaactcctcccaacacctccacctgaaacttcttgaacatctcacgagtgtatacctcagccatttgcttcccaaaaggtgaaggtgacttaagtccgggttgtttatacaatgtctcaatctccgatttctcttcctcttcgtacctctcttgtagcatcttcttgtactgcccaagaaatgctttacatgtagttattctttgaatgtatttatctaaaccagagttcacactgtccgacctctgagctgttcacattcccgctagagatacatctatcatatatacaggaacccaatatcccctatcttcatacaacgactgattccacacgttgtctctcatatgaaacctatcaactacctcccaccaattcttttcaaattccccgctcttgcaagacccgtaaatagcatcgtttatctcatccacaaattttttctcttgtctaataacatgaccaagcttttctggcatctgaccaagagtatcccacatataaaagcaatgtctagaagatgggaacacctccaagacagcttccttgagcatttggtcatgtttagtaagtataactctaggtcggcatccgtgcaccgcttttaaccatgcccggaaaagccaaacaaatccagatttagactcatccgttagtaataatccaaaaccaagcaacaggaactgtccatggtggttcacgccagtaaaagcaacaagaggcagtttatactcattcttgatgaatgtagtgtcaatagatacaacatcagagaaacaagtataatcaaatctaccttttgcatcaacccaaaagatgtttcttaaactctgctcctcactgagatcaatggaataaaagaagaaaggattctcaacttgcatatcagtaaagaagtttaaaagtctttcaacatccccatcctcaagcttcctgcttttcacctctttaacaatagcaccgtttagtttctcgagttttctactcccactcaattctcttaaggaatcagcttgaccagtgaagacttcatggttatgttcttttaccaaactacgaacaacccacctcccatcttgccttctcttaacatgtaaacaagctttacaatcggttttcgacgatgaccggttaattctaccgcgttttcttgcttgaggaatgttaaatccatcagtacctaaaccagtatctatgtcttctttcttgcttccatatcgcgtacaaacaaacttggcatcgataaatttaccagtcattcttgaacgacgactagctttaataatggtagtaaaaccaacagagttagcatattctttgtagaactcaaaagcttcctcttttgattcaaattctctcccttcatcaatctctaagttattcttcctatgatcatctaactgcacattgctacactctcctgacgacatttcgaaatcaatacctgattagtaaaactcttcacccctcaaatccaaagcttgtttgatcaaattatacctgttgaaacaccatgatcagtttccaagttgcaaactttcatgaagataaacatttatttatgtatcaatggaccaaatgaacttagaatcagcaaaatcagaatactaaaacctcaaaatgtaagcaaaaacatcttcaaatacataaatgaatcaactttaacatgaaaagtcaaccattcaaaaccaacaaagtcagctcgaatcatcattacttaaaatagaaataaatttaggaaccaaagcaaaaacccagagatgatatttaagcaaactcaaaatgaagatcgagagactagttacggtatgaaatagacaaaatcagaaactaaaatttactaaagtgtaaagatgatataatttggagggcaaaaaaagaaagatacataacatgatgaagaagactgagacgaagagtaacgaccggaagcgagtacagaatcagatcttagggtaaagagtcttcgtcgtcaccgtcgtactcgccttttttatactcgcggttatgttggtttcctcttctctcacctcttactccggttctcgtttacttaaacctgtttatatttttgataaccggattcatttcgtcgagaaccggataatttttcctgcacgagcaaatcttgagccacacatttttttggtgttcttcttcttcacctctgctgatggaaaaatcgtgagtttagaagcaaaaatggttgattttcttcgagaaatttgacagaactttccccaggtttcatatttttatcattaatcagataattcatagagatttacgcttatggtagttagtattctcatgaaattttgagtcttggaatgttgattgagctcgatttctgagaaatttgcaatcttttgttcattgtaaacgtaaaaattgaatctttgagtagaatgtgtattttgtttagtctatagtttctcttcaagaaataactctttgatagatttctgtaaggtttggtaattggtactgtgagttttgattatcatgtcatgtttcctgattagatggtgcattattgtgtgaccaagattgcttaaggaaatgggtttggtgggttgtgttggtaagtcttctcttgtatctatggagttgaggtgggcaaggaggagaaaatctgataatgctgcatcggcattgcctcgatcgatacctatatatatatctacgttgaagaaagacataaatctagaggaattgaggaatttgtattcactttgtaaccattcttgcaaccgtttgtctgagaaagacaacaacgttgaaaagattgttgacatgaaaaagctgagaaagncaaactctcgcagtgatgttattgtatctgtgttttgcaaaccacaacacgtggatgttgatgatgcggttttgtattcagaagaagaaagtttatcttcttctttgtatacttcagaatttgggagacaaaataaggatgatagttttctgggagacttgtttcagaatgcggtgcctctcactccttccaatggacagcttgttggattcggtcgtgcttattctgattatggcttgaccgcttctatccatgatctaatggtacttttacctatagcacaagtttaacaggttatatagtggaattcgcttcattacctggtctagtcgagctgtaatagcttctgtttggtgctaagatatgtgatttggtctcagtgttttccaggttttaccttcactacaaaggatggggattggtaaactgatagtaaacagaattgtcaggtctgatggtattttccactatgattttgctttacttaaaacccttaaacttctcttaaaggttagatcctcattcatcaaaaactgttacaataggctactcacaagcagagacatatacgacatagcagctctctgcttcaaggatgaaaggtaccgcttttgcctctgagataactaaacccatatttagtagcttgtcagttctttgttgtatcctttcacactaggtttagaatcgaaggatatagtaatgtgatctattctgaccaagaatttggtgatagtagcttactaattatatctacaatatgtgtgggattgattttagtgaatgcagaatccttatgcatttgtactgatgagaaagaaacatttttgtcaggccattcttcaaagcatgtgggtttggagatgacaggatgggttccacaacaatgatgttcacaaagagcttggaggcataaaagcaaagcgagaatgctgatggatcttcagaaactgcaggtcaaagcaagttatactgatctcaatatgatgaccaacgagaaaggccaaagattcagagtctttcttgcatttggatttgatatctagtggtttactctctctttttcttatctctttccatgtaaggcaaagctacttaatcccatgtttgacttttattcacttgtcactctcttattcccccgtatatttatcttttgaggaaatttgcagaattgttctaaacaaagggat

SEQ ID NO: 30956 - DNA, 1154 bp, Arabidopsis thaliana landsberg
tactaagaaaacacatattataaccgtaaacctaaatacataatctattattcaactatacgaattttactcaatatataaattttattaaaaaaatagcctcgcgggtcaaaatctagtagttgacatttgtgagtttatattggtatcacgtctacttcgaactcttttaaaaattgccaacaagggatagtgcttatagaatattatgagacgatataacctgttcaaatataaaagacatacatccacaaagtcaagtgtctaaggcttttgcaatttgaaaggttgatacaaaaaacaaaacatagtttcaatcttactcatatttttagatccttcaactcgatcttgtggcaatggtagatgcgatcacagagtttgttgtgggaaagatcgacaactatctcatcgaagaagcgccaatgttgataggagtcaaagacgatctagaggagctgaagacagagttgacgtgcatccaagtttatctcaaaaatgttgaagtttgtgacaaagaagatgaggtctcaaaagagtggacaaaactggttttagacattgcttatgacgtcgaagatgttttggacacctattttctgaaactagaaaaaagactacacagactaggcttgatgagattgaccaacataataagcgataagaaggatgcgtacaacatacttgatgatatcaaaaccctcaaaagaagaactttggatgttactcgcaaacttgagatgtatgggataggaaactttaatgagcatcgagtagtagcgagtacttcaagggtgagggaagttcggcgtgctcgatctgatgatcaggaagagcgtgtagttggtttggcagatgatgctaaggttcttttgacaaagcttcttgatgatgatggggataacaagacatatatgatctccatattcggcatggaaggtctcgggaagacttctcttgcaagaaagctttttaactctagcgatgtgaaggaaagctttgaatatcgagtatggactaatgtttctggagaatgtaatacaagagatatacttatgagaatcataagctctttggaagaaacatctgagggagagcttgaaaagatggctcagcaggagttagaagtttaccttcatgatattctacaagag

SEQ ID NO: 30957 - DNA, 3243 bp, Arabidopsis thaliana landsberg
  unsure (1)..(3243): unsure at all n locations
tgctagtctggagcaattcgaccaacgctcatgggagtgatgttgacgttatcatctgctaacatgctagcaactttaccgatcatcccaggctgatctacttgcctgcacagaatcacactcccttctaaactcacatccactccaaatnnnnnnnnnnnnnnnnnnnnnnnnnccccttgtttcactctgccttctactttgatctcaccggactctgataaagcgctggcaaatcttgattccacgtttgctatccgaacagttatgtattcaattggattctcaggtgagccgtctagaaccatacgttcttctgagattttgactccacgttgtttggcaatataatcggagttaaccagatttatgaatacgctggaaatgggttcgatgatcccctttataaccatggctcggagaagtctagtgtcgagatcatcaggagctctggaagaagcataagtcactttcacagcattcacaccgcttccaccagttaccaattgtacagccagcctcccaagcttctcagcaagtacaacatacggcttcagctccctcaatacctgaaaacagatagcaactgaacagtgtcagagaatttgcaggacaaatcatcatcactacttgcaatatcaccaagaactagaagaatgaaacttgatcctgaattaaggactctgtagtgaagtctgaaattacctctagtggaaccattggtgcattgaccgcggtagcagcaagttctcctctcaaagctccaataacagcttctgcgacttcgatagacactccttcctaggcgtcaagtaaaggtttcaggagagcagaacaaaatgcactaaaggcaaaacgaatatacggtggaaatgggggagccttcatagtactagcaccaagatgaggtgtggcagtgacactctcatgtaacaccaacttattatctttaacaggtggctctactgtaaaaacatcaagagctgcctgagcaacaatacccgagtcaagcgctctcaaaagagcttcctcatcaataactccaccacgagcaacattaacaatacggactcctttcttcatcatcgcaaaggtcacatcattcatcatcttcgaagtagcagcagtaagaggcagatgcaaagagatgaagtcagcagttgaaatagctacttcaaaactaacaagctccacaccaatagctcgtgcacgatccgctggtgcataaggatcatgtgtaatgacatgcataccaagtcccctggctcgtctagcaacctctgatccaactttaccaaaaccaagaacagcaagagtcttccccacaagtgaaacacctacatacttgtttctcgtccatttgcctacaaacaaccacatttctacatttcacatcgcaatttctcaaatcgctattcaaattcaacaaccgtttaaaatactcaccagctttgatagaagcatcagcttgagcaatgtttctagccatggcggtcaaaagcgcaattccgtgttcagcagcagccacagtgttcgcagtcggagcattaacaaccaaacacccatactcagtcgccgccgccaaatcgacgttatcaatcccaacaccagcgcgtccaacaaccttaagcctcccacgcgacgattcaaacacatctctcccaaccttggtaccactcctgacgatgagcgcatcacaaagagagatcttcgtacaaagctcctcgagactcagatcataagagcaatccacattagcgtacttcttaagcagatcgatccccgcttggcctagcttctccgttacgagaatcgtcggttttcctccagctccggaagaagaagacgtaacgaggatgatccgtcgcctctgacggatgggaaaaacagaggagggagtggtgacgagccttgaggaggaggagaagatcgatgatagattcagagacgtcgccatcgcgatggcgggaatataatgtaagtaaaggtgtatgtatcgtcagcaacagagtagagagatatgggttcatctttcgggtgggttttgtgaggtttaaatatgttgtgctagattacgctacatcctttgttcacttatatcttcacttcttaagtggattttgaaactttatatagaagaaaaaaaagttacaaatttaataatggttttgctaataaaatacaaatatactacattcttaaaacaaaataataatatatcaaatattatactattaggttatgtggtttaaaaattgaaaaaacacatttttttatattaattttaaattaaattgtaatataaatagagatacatttatatatctattagataaggcgcgtttaagtaagtcggattgtaaaaaataatgtaagagttatcgatgacatatgaattctatatagtaatatgtatttttttttaatatttttattttttcatgcctgttcttgatagttagcaagtatataatattgaaagaattgtatctctgtttctttagatttagacatctttcatatcgtcaaatgcgtgaaaatttgtctaacgttccaaaactctggaaactaaactcttccagtcaaactttagttttatttattgtttgatgtagtaagaatcttctggtgaagggtttattaattgatttggcaactggcaaggtcaaaatactaggcagatgtcgttggaggatatcaccaagtattggaaacgccttgtggaacacaagagaaatagtagtagcgtaaagcctcatgattcatcggtcagtagccgctaaatttaaggtaatcatatgagacatactaaccactattattttgtgatattcgttgaaagatagcagaatgagtggacagaccacaaggacaagcgcttgtcaccacattcaggaagggagtaaacctgtggcacacgaaaaatcgttctacaagtccctgcttcaaaatcattctactccatgctagacaattaggatagaacaataactaacatgataaaaggattatgctataacttaaattggtaagaaaaactaaatatatcaagaggtattttagcagcatgtcaagatctatatcacttttgcagaagacgctgaacaaagaggaagaagatatgagcacattttatctgaaatatgaaacacctgaaatatgaagttgatatagtacagggccatagtgaaagcttttgtgagatatctcagatagctagctatctattaaccttagccttgt

SEQ ID NO: 30958 - DNA, 2132 bp, Arabidopsis thaliana landsberg
aaaaaaagtcgttacgtccttattacatctaatataatttgttgtcgttataacgttttttgtttgtttttgcatgttttttgctcttgtcagggaaacctgctttcagtaaagtatttgttctggagagggacagggaaaaaaattgctcgcttgttaaggttttcttctgttccatcttatttccaaatgtcatatgtcacacaaggtttacccagaaagtaaatgagatagtaaaaccaaaacgaaagttagccacaatcatcttgtttttatgcaaaacaggtagagatacaatctggaagaccacatcaaatccggattcatcttgcatacatgggacatcccttggtaggtaaaaacttctgtttccttcgggtctgtcacacgttttgagctggtattatgcgtggtttgtgcatttatagtccttcattattagtatagaataaaaaaagttggatacgtagctttgtaagacaagatagacaaatgtttttttcccagataactaagcaataatggaacaaccaaactgctcggcggtgttaggaaaactttagtaaaacattgaatacaaattgatgaaaccatgttttgatggatgaaaagatcttactcccacttgatgattcaactagttataattgtatgagccatatacaatatagttgcaatctaggacatgagttgcttatggcatagtctaggaagctttttgctacacataagttttcttttggcagtggtctatgatagagatgacgatgtttactggatctgagtgcttacgtgctgatcaaagtgcaggggaccctctttatgtttcgggcggccatccaaagtgctttgatcccgatcttgtagatgatgccgcagcctttgccgaagatgggtacaaaattagatcatcattcttcatacttatagtttctgtataccttgagatgaacagtccttggaaattgaacaatatttgagctaaccaatgttgtacgatgcaatctagtacgtagtttcatgtggagtaaattggtctgttaactagatgctatcacctgttatggcatgtgtcgtcattatgactgaatatattgcagaggttacagaaggccaaatcaggctgttcctggggattgtggatatcatctgcatgctcatcaagtagagctaccaaacctgctgaacactcataaggtaactcacgtagatcatacctaagcctcagtggtcaggctctttacgagatctctcagtccttatctaaacaatccaattgttcatgtccttaccattctgcaggtagtaaaaattgtagcaccgctgccaccaattctccaaacaagatgtgagacgtaagaaaaaggtttatcctcctgcaagtgaagttgcataagtctttcactgtacaacattagacatgcttgttcatcaagtgttatcctttttgaaaaacatacagagagctaagcttagctcttagatctctctgttattatcagtaacattacaaatacaaacatcagctatgaattttctgcaggcacctaactttagctgaaccaaaaaaaaaaaaaatgcctatattaattgacattctaaattaaaaaaaaaagatgttaaaagagatataatacagataggttgacaagcaaagaatatgccaatcctccaaaacaaactaatcatgaccctaagaagctttttcattcacgtggctgcctctgctacaccatttacccctcctatgttaccttcatccttagcgcttgaggactcagctctatcttcgttatgcttaccaaagctcaaaattccaccattaacatccaccagaatctctttgctgttaccaacttgctgctttagatgcgtggaaaatgcttcagggcaacttgcaagcaacttggccgactctggcaaagatgtgagcccggtttgaattctgttgccatgccaaaaaccgtagctcgtaatgggaacgttctgaaggtgttgctgattaatgtaatgatgtcttgtatcatggtccctgctcaaggttgatgatgacctgacaattacacatggattgagcatccgttctattccattctcatcagaagagagtactgtaccaaacagggtcacat

SEQ ID NO: 30959 - DNA, 2796 bp, Arabidopsis thaliana landsberg
  unsure (1)..(2796): unsure at all n locations
atctattaagcttgtcgtggtttgtcgctgtctgggatgaagtttggcttttatgatgtgttagttgtagagacttgaattatgtgatttttcaagggcgtgaggtgttgagagaaacatatacaactcttgagaactattgttacagagctgtacatagtggtcataattcattatttgcaagctaagttcagagtcattccatgctaacgtgtttgttggatgttgataacgctattttaattttatgttagatgttggttttattctagtattatatccactgtaatattcattttaacatctagcttgtttaacgaggaggtatagtttaagcagatgcttatttcttgtctatcttttatgttgtcgtaggtaaatatttgtcttagatgctaactagaaagtatatcaatacgcaggagatgattgcggtgtaaaaatttgggataatgatcacagatgaattgaagccttttttcatcgaatttaaagttaataactgttttacactacctgtgcagctccaagaagggatagtgtagtccccacaacagagctcgtaagttatatggaaaagctacttccgggtacccatctaaagccttttagagacattttgaaaatgcctgctatgattttggatgagaaagagagggtgatgtcgaggtttatttctagcaatggactgattgaagatccatgtgacgttgagaaggaaagaacaatgattaatccttggacctcagaggagaaagaaatctttctgaatttgctagcaatgcatgggaaggatttcaagaagattgcttcatctcttacccaaaagacaactgcggactgtattgattactactacaaaaaccacaagtctgattgttttgggaaaataaagaagcagcgtgcttatggtaaggaagggaagcacacctacatgttggctccacgaaaaaagtggaaacgtgagatgggggctgcctctcttgatattttaggggatgtctccattatagcagcaaacgctggaaaggttgcatcaaccaggccgatctcttccaaaaagatcacccttagaggttgcagcagtgctaattcattgcagcacgatggaaataactctgaagggtgctcctacagttttgatttcccacgtaagagaactgctggtgcagatgttttagctgttggtcctttgtcaccagagcagataaattcttgcttaaggacttctgtgagctctagagagaggtgtatggatcatctgaagtttaatcatgtcgtaaagaaacctcggatatctcatactctacataatgagaacagcaatactctacacaatgagaacagcaacgaagaagatgactcatgttcggaagagagctgtggggaaacaggtcctattcactggacagatgatgagagatctgcctttatacagggtttttcgctttttggcaagaattttgcttcaatatcaaggtacgtcgggacaagatctccagatcagtgtaaggttttcttcagcaaagttcggaaatgtcttgggttggaatctataaagtttggatctggaaatgtaagcacatccgtaagtgttgataatggcaatgagggtggtgggagcgacttggaagatccttgtcctatggagagtaactctggcatagtgaataatggagtttgtgccaagatgggtatgaattctcctacctcaccttttaatatgaatcaggatggtgttaatcaatcaggctctgcaaatgtgaaagccgaccttagtagatcagaagaagagaatgggcagaaatatttgtgtctgaaagatgataataatctcgtgaacaatgcatatgtcaatggcggtttcccgagtctagtttcagaatcttgtagagatttggtagatattaatactgttgagagccagtctcaggctgccggaaaaagcaagagcaatgatctcatgtcaatggaaatcgatgaaggtgtcttaacatctgtcactatatcttccgagccattgtattgtggcctaagtgttctttccaatgttattgtggaaacccctacagaaatctcacgaaagggctcaggagatcaaggtgctacaatgcctaaatttagttcaaagaatcaagatggagtgatgcaagctgcaaacagaaccagaaattctggccttgaacctgaaagtgcaccttcaggtttcaggtaccctgagtgtcttcaccatgttccgattgaggtgtgtacggaaaaccctataggcgtcagtgcaccacgaggaaatccaaattgccatgcagagtccgagtcaggaaattctcttgttggacaagttgacgaaacacatgacttgggttggcccaagaacaatctggaattggatgggaggcttcaggttttaggccatgtaaaccctgagcagattggtctactaaaagcgaccaatacagaatcttgtcaaaatccccagagatcagtcacccaagatctgagcaggataagtagatcaaaatctgatttgatcgtaaaaacccaacgtacaggtgaaggcttctcactcaccaagtgtactagttcagctcctaagcctctggcagtatcccataaagagggcagatctggtcatagcaggagccattcgtttagtttgtnnnnnnnnnnnnnnnnnnacaagaatggagatgtgaaactgtttggtacagtacttactactgatgagaatggaataaaacaaaaacacaatccatgtggaattgtcaggtcatcatcaaccttgagcagggaccatga

SEQ ID NO: 30960 - DNA, 1862 bp, Arabidopsis thaliana landsberg
tgtttccaatttcttcagcctcaagtaaaaaaattagggatagcctcattaaaaaaatcgcggttttttgttgttgtcttatccatttatccatcttatctgaaatttgaaccagaaagacagaggaaaccaatccaaagatctttctcaatctattatcttcatacaaatatagtgatttacatatattccaggggatatgtatatgtgtagaagaaagagaaaaaactcttggggtcatagcaattcctttttttgtacattgtaaaatcaaacttcttgggtcgtaacaattattttcttcacaaattacaactacacttgtattaatggagatgccttttggcctggtatcaacatacccaaacctaagcccacaaacagagagccaaaaaaaaaatcaaaacaatttctcaaaaattaagttaaatccagcctaataatgtatcttatgcttctttctattttttcttcttcttgagactggagaaattgaatccaaaaagaccagatttcttgggagatggtgttattttaacaggttccggatgagtaactggagtaacaacctgtgaagtaggcgaagcagttgttcttccttctggtctggaggaaacttcttcttcttcttctttgtcggaatctacttctacaagagctctaagtaattctgatgcactcacctttacttcctctgttccattgttggatatcaagattagagatgagtaaatatcagttgcttctctcacgacaagacagcaatactctatcttctgcacacagagctgaaggaggatggagattgcgttctcttgctcctcgggaacatttgactcgagtaattcagctatggaagctaaacaatccggggtttcggtgatacaaccccgacctttctcggtgctgcagaggtttttcagaatgataatcgagtgtttgcagaaaactttttgttgcaagaaagatgtgagcttctggatgaaatcgagagataccatttccagacaaatctccatgcttgatgaaagattcttgagtgtgatcatagcctgttcttggagatgttctgcttgggactctacgatcttcaaaagggaagaaagagatcctgatgaagttatcttggacggaccgtgcggatggtttgacagaacgtcaagtatgtttagagcttcttcagctactacctcagactcaagaaagactgagaacattttgaaaacctcttcttccaaagattctatagctctcctatttccgctaaggaaagccagcaacaaatccaatccaccctttattatctctccagcggtgccatttctttcgagagcattcttcaaatatgtgataagtggctcaagaaatttactcggtgacatagaccgaaaagcacgagtactgtgctcaaaacgacttcttacatcttcgacgactttgatctgcgcatcccatggaaggtttgtgagtccacacaagggatctatctcaatctcgctgtgactagaatctgtgtcaccagcgcctgaagcagaatctatcctctgcattggagtgaagtaaccaccctttgacatcttagagtaggatgacgaatcaatggaatagctcgagttgaaatccgtaatcgaaatgccgctgtgatcagggatgttgtacagagaacttccgaaactagcgatggaaacagagaagtcgatactgttggaagcctttacgtgcttcctcgctggatcttgaacatcaagaccgttcttcgcgcaccattctgatatctgactcttaagctctacattaggcttcaatgtgaagtcatccagtttccttttagatataggacaagaatcattaccttcatcgaa

SEQ ID NO: 30961 - DNA, 1716 bp, Arabidopsis thaliana landsberg
gaaaagtaaccctctaaatacgcattgcctcttctattgctacaaatgtcagtcatcatcgtcacctctaggcttatcgttccgagtccttcaacctttaaagcaaggaatgatctctgctcaagtcttggtataactttcaaataccgcattcactatctcttattgcgaaaatataccttttgaaacattttcttgtttgtgtatgtgtagactggtgttgttttaggaccgtctttcttaggacataatgtgatttacatgaacatgtttcttcccgctggaggcaagatcataatacaaacgctttcaaacgtcggtttcgtcatccatctcttcctcctcggactcaaaatcgatgggagtattatcagaaaagctggttctaaagccattcttatcggtacagcctcttacgccttcccgttctctcttgggaacctcacgattatgttcattagtaaaactatgggacttcccagcgacgtgattagctgtacaagcagcgcaatctccttgagctctatgacttcattcccggttacaaccacggtcttagcggaacttaacatccttaactccgagctaggtcgtttagccacccactgctcaatggtctgcgaagtttgtagctggtttgtcgctctcgcttttaatctctacacacgtgaccggacgatgactagtctttacgcgctttccatgatcataggtcttcttctggtgatttatttcgtctttagacctataatagtatggctcacccagaggaaaagcaaaacgatggataagaaagatgttgtcccgttctttcccgtactcttgcttttatctatagctagccttagtggagaggccatgggggtccatgctgcgtttggagcgttttggttaggtgtttcgctccctgatggtccacctttaggcacggaacttgctgcgaaactcgagatgtttgcttcgaatttgttcctcccttgtttcatcgccattagtgggttgcaaactaatttctttgagatcacagagagccatgagcatcatgtggtaatgattgagatcattctcttgatcacttatggatgcaagttccttggaacagcggctgcgtctgcttactgccaaacgcagattggagacgcgctttgtttggccttcttgatgtgttgccaaggtatcattgaagtctacactactatcgtgtggaaagacgctcaggtaaaaataaatagaggttgcttaatttgtttttttttagttaggttttggttcacaattagcaaatattatagaaagatttttccttcctattcacgtaaatttttctcttaacttaaggtaaaaaaaaaattgaatttggtttacaggttgttgatacagaatgctttaatctggtgatcatcacgattttgttcgtaactggtatttcgcggttcctcgtggtgtacctctacgacccttcaaaacgttacaaaagcaaaagcaaacgaacaatcctcaacacgagacaacataatcttcagctacgtcttctccttggtctctacaatgttgaaaacgttccttccatggttaatcttctagaagctacttacccgacacggtttaacccgatctcattctttacgttgcacctcgtcgagcttaaaggccgagctcatgcactccttacaccacaccatcagatgaacaaacttgaccctaacacggcccagt

SEQ ID NO: 30962 - DNA, 1120 bp, Arabidopsis thaliana landsberg
ttacgagtttgtcttaagtcaattgaattttggtttcttttgcttcccccaattcttattcttccttgttgtaaatcacttctctccttgccttttctggttttgtttcaggatgatacccctcctattcctgatagtctttctcctgatattacagacttcctaagactgtgcttcaagaaggtatattctggtgcaataatgtttatcactctactacctctataccagaaactaggcattttgatttatttaatatatgatgtatatgtacatttgatttgtatcttgcactttacaggattccaggcagaggcctgatgcgaagacacttctctctcacccttggatacgtaactcgagacgagcattgcggtcatcgcttcggcatagtggaaccatcaggcgagaacctgcgtctttacgttaacttttggaagaatatttcaaatattattatttatcttatcttagagtttagtacaagtgttccttgcttgcacttacatgtaatactgtctgttggcacttcatcctttgcagatatatgaaggaaaccgattcaagttcagagaaggatgctgaaggtagcaaagaagtagttgaaagcgttcagcagaaaaagtagaggtgacaaaacttgtaagtatcattatctctgttatcaattaatcttttggagatgccgataacgaatttagagatgagtagtataatgcattaaaggtagagatgacctttgttaaagctactgatccaatttttttatttgtccagaactcgaaaagcaaattacctgttataggtggggcgagttttaggtctgagaaagatcaatcttcacccagtgatcttggtgaagaaggaacggattcagaagatgatatcaattcagatcaaggtcctacattgtctatgcacgataagtcttctcgtcaatccggtacttgcagtatttcttcggatgcaaaggggacatctcaagatgtattagagaaccatgagaaatatgatcgtgatgaaatacctggaaatcttgaaacggaagcttctgaaggtagaaggaatactttagcaacaaaactggttggaaaagaatattctatccagtcatccagag

SEQ ID NO: 30963 - DNA, 1097 bp, Arabidopsis thaliana landsberg
tgaaaatttgcaattagatgttgaaaaaggaaccgttgctttttaactcagttttaattgttttcattgtcttggtcgaatttaaatcttagtaattaattggttaagtttttataggcagtcgagttcagcagattggtgagctccttaaggccagatgaatcagaagatgcaatagtaacttcctctttgaaacttgttgccatgtttcgtcagagacctgggcagaaagcagtatttgtgacacagaatggtttcctccctctaatggatctactcgatattcctaaatctcgagtatgttttagttgtaatcaggcaggattttttgttgtccttcatcatcagtagttggcttatgcttgtgaatatttttggtgttttcaggtaatatgtgccgtgctgcagctgataaatgaaattgtaaaagataataccgacttcctggaaaatgcttgtcttgttggtcttgtaagtcctactctgcatttggttgctgactttatgaatcaccagttgttcgttggaatctgcatatttgtttttacaaagactcgtatcttcatttctatattaaatgtcaaacatccaattcaacagctaatacctttttgggaaaatccgtagataatatacccatgatgttgttatattatcacctaagttttcatgatgtctcaagtagataacaaaaatcccataaaaattgattatttccttgtgacatggcagattcctttggtaatgagttttgctggttttgagagggatcgatcacgagaaattcgtaaggaagcagcctacttcttgcagcagctttgtcagtcaaggtcacgactcatcaaatatacataattttgcttctctcttttttttttttttttttttcttttctgcaagtcatatagttgataatggtagcatctttacagctccttgacgttgcaaatgttcatatcttgccgtggaatacccgctttggtgggatttcttgaagcagactatgccaaacacaggtgcgtagagtttacaatcttcttacaatgtatggactacttttatgtattaagtgctgaaactaatgtaagatatatcaa

SEQ ID NO: 30964 - DNA, 1086 bp, Arabidopsis thaliana landsberg
taaatctattagaaagttatatttagagatctatctaactatattaattatatcttataaatattaatgttatatatatatagttagggttataaatacttgttttttacaaaaaaaacgaggacgatatatattttaggagtagtagtttttatcggtgcatgagaagaaagtaggcgtacgtgacaacagtcaagaagatacgtgcagagatttcgaggaagcttctgcctgcattggaaccgtgccatgcagaaaccggggggaaattccaaaagttgcgtgtgtagtgccctgatcggtgttaggctatccgcaaccgttacccctaaactttccccctatatcactttttccctctatttcccccctattttttcatctcccgcagcggttccccctaaatactccctatacccactacaactataaaatatcattttctatatcaactatcaattttttatctactaacaattactcgtggacccacagcacagtgtttagggtgatgaacagtgacacactagatctggggggagagagaaggggactgacacgtagggagcgctgtaaggggcacgctgcggcggtagagtgccccctacaggccacatgcataggggagggggctgcgtaggagcagccgttgcagttagtctgaaactattggaactgtacttcagggaaaacagtgtaggtactggtgctggttgatgcaccaggaggcgattccttcttcacatcatctccggtgcacgttgttaaaaaattacatgggttaatatcaaacaggtgtactacttttttatataataaatttatggaaaaaattatgcgcgaaccggccgcaacaagcagcgtgcggacccaatcaggattgttacgcgtggcaatcgtatcggccggctggataggcgcatgcagacccacgcacaatgctgctttgcactcggccccaagcgcagcttggcttggctccgttcacagctccatatttctcacgtttagaaacgactccgccgccatcgtctatcagactggagactcttcgatctcgcgccgctgctcgggcatcatgataga

SEQ ID NO: 30965 - DNA, 319 bp, Arabidopsis thaliana landsberg
accgctccgccccttggcttacttggcttcccttgctttcctaccattcccaactaacctactttcctagttctttgattctgatattcctattcctgggattactagttctcacattcctcttttctttctggtttcccggatttctcttcttcctactttctttgctctcctggctttctggatgtgagggttagcttaaaaagaactatctctagctctcccagctaagatgtacgatgtctgataccgattcaagctcactcagagatatatgatttatgtgttctatgggtttgaaaacagggatggtaggggc

SEQ ID NO: 30966 - DNA, 1128 bp, Arabidopsis thaliana landsberg
cataattgggaagaggtggagcagcagattctctcattggcagtgtcaaagtgttaaatattttctgcaacaaaaaatgttattttgccagtgcagaattatagtattgtacaaacttgatgggagaaataagtagcaaacatgagatggaattagctttaattgtccctttttagcatcatttcaatctattttttttttataatttagttttgttgcaaatacatttgatctgatgtatataaattaaataaagtttttatttcaaattcattttggttttcaagtcagttattctcataggaaagaataaacagttatattttcatattttgttggttatatttggatcgattagttactaggaaatttcaaatttgatataattacctctgcaaaatgtataaatttacagatgttcaaactaactactaagtcgtatatttactaggaaagtgaccaagatagattattgtttgcttaatagaagtagtcttaactcttaagagatactcggagtaactcaacgtatgtaaaagtcaaaaagaagcagaagacaaatcataaaaagagataattatcatttatttaaagataacgattattcgtaggagcataaacaaacaagtgtttatgtctttaagcacaactaaaacactcttttcacttatttgccttctccttggcatgaagattgtcaaaataagccttagagttggcctcaaaagcagctctagggatctgcgcagaacctccagaaccgggcgcaaccatattgcctgcaccaggagcagtgccactgcttgaaccgctactctgagctaccgaactagcttttgcgctgacattcttgtccattttacgttttaactcttgaaaatgtgagcttgtttagagtgagtttaagactagattattttttgattggtagtgagaacaaatgtggtggagaggtgggatgattttatagatgagatttgttcaaatgagtcaaattaacaattcccaaggtatcaccattttggtataatatcatatcgtgaagagcaatttagttaattgcaagggaaattggaaaagggcaagtgactgtcttggaaagctacttggaataacgtttagtaatta

SEQ ID NO: 30967 - DNA, 1813 bp, Arabidopsis thaliana landsberg
tgtttgtccttcaccttaagacttaacccaaggtaaagtaactcaaccttggttagtctacttttgggaccacaacaaagcaaacggctatgaaggagcttgcctcgcaatggcatcggtttgctttaaggacaatttgtccatttgtgtgtgcaaagagaggaggttaaagaaggagacagcaatcgctttcaagctggcagttttggcgttttaaggagcgtaggctgcggcttgttatttgctgaggtgaagccctaatctactttgaagtataaataggtgcttaagtcattgagagagtgtgcgagacattttagagagtttgggaggtgttaagagagaaagctattcatagtataaacttgtattagctgttctttgtgggataacagagtagtgcagagcaatcctaagtactagtgaagggtattaggtgtattgcttgtagactcttgttgtaaacactatcagattctagtggattccgaggagagtctcggcccagacgtacctaccctatgggagtgaactgggttaccaaattctcgtgtgtgttctctattttgtttctctatttcttgcaaagtcttgttcttcttacaaacactcttgaacgagtttctgaagtacatcactcatctctgaagtagttctgttctaggatctgttttgagtcactgagtaaagtaaagtcgacgtctttagttctgtcgtttcttaacagattggtatcagagcaccatgttggtgttctttgtggttctgaaaagggtttaagatcttgaaccatgtctacagctagaatagaagttgagaagtttgatggtcgttgtgattacacgatgtggaaggagaactgttggctcatatggatatattgggtctgagtactgctctcaaagaatcagagagcaagggtgaggagttatcatgtccagacgaatttgatgaagactataaagagaagctcgaaaagttcaaagctttagaagaaaagaagagaaaggctaggagcgccatagttcttagtgtcattgatagagtcctaaggaagataaagaaggaatcgacagccgctgcaatgttgttagccttggataggctatacatgtcgaaagcccttccaaataggatctatctgaagcagaagctttacagctacaagatgtctgaaaatctgtcagtagaaggtaatatcgatgaattcctttatattattacagacttagaggacatgaatgttaatatctctgatgaggatcaagctattctgctgttaacatcgcttccaaaagcttttgatgtgcttaaggatactcagaaatatagctcgggtaagtctatattaaccttagatgaggttgttgcagccatctattctaaagagttggagttagggtctgtaaagaagagtatcaaggttcaggctgaaggtctttttgttaaagacaagaatgaggctaaaggaaagggtgaacaaaagggaaagggtaaaggaaagaagggcaaatccaagaagaaacccgggtgctggatttgtggtgaagaagcacacttcagagcttcctatccaaaccagagcaagccacagttcaagcagagtcaagtagcaaagggagaatccttaggaggaaaaggaaacatagctgaagcagctggttattatgtatctgaggcgttgtcatcaactgatatccgtttagaagatgaatggatactagatacaggctgtagctatcagatgacctacaagagggaatggtttgaagagttcgatgaagaagcaggaggttgtgtcagtatgggcaac

SEQ ID NO: 30968 - DNA, 3272 bp, Arabidopsis thaliana landsberg
agctggagacgagctttctggctttccttaagtcttgctcgggaaattccttcaacctcgtgccaatttcacggtattcttcaatctttctctcctcttcttcttcttcctcccgctgcatccgccgcagttctttggtcttctctctctgtcgagcttgccattcctggtatcaaaaaaccaaccgacttagaaaaaatcagactgagagacaaaaaaaggatgaggagacgaacatcatcgtaatactccggtggcattccttctagaagcacttcatcattgtttcccgagcatcttcttcggaatttagctgagacatcggcagaggatcattttagatgaaacaaactaattttggatttcacaaattaaaccccgcgaaactgacctgtagaaatcgacaactctgtagtcagcttcttcgtagcagaaataacccgagggctgctgaatagaggggatgcgcacgtcagaaccagcgacgtcgccgccatagtcgagcttcgcagtgagtgggagtgattttgttgcagccccgaatcccttaggctatctatatctattcggatttagtctccctagtttcggatttcacaaattaaaccccgtggtgtagcttagtactagtagctcaattgaaaaatgtctcaaagaaatctgaaaaatgttggcttcatttcctttcataatctaatgttgtttccccagtcagtgtctgtgacacatagcgaatcatgttgctctaaataataaatataatatacaatatagacaaacaaaaaaaaaaaaagagagagctaatctcaggaacaaaagtgatcatgatcacagtttagattagtcgagaaaagaaagttgaaagacgtcaagctaatgttgatggcaagtctccacaatgagttctgtagctgcacccattgtcccaaggccgccggcacaaagcagagccagagccaagtcttgctcgttccactgcctcagacttttgcttagtctctttattacttcaacatccacctctagcacccaagccggcgtgcattgcaccatcaggctcacaaagcctgtcacgtaagcttgccatgtcgcccaatcacagcccagtgatatcttcccttccaaggcactcaccataaactccaaatgcagccacagaacccttggccgacgttttgatgcaggatatgaggagtccactccccaggcaaatgcactgctcaggattgcaaagtaggctaaagcatagcctcttagcatcggaaccatacctcccaactcatcttcttctccgtgaaccgagatgaaccaagacggtaatgtctccttgatcagtgcctgaaccaggtttaggccaccggagatccacaccagagaggctcccagggaagctgccagcttgacacgtctcattgctaaagaaagtgaaacctgcccaatcccgtacctcgacccatctttcgttttcttcaatttctctgcttgccctgctggtagctccctcgtggcaatgctcttcacagagaacatcagaagagacaggatttcttctgtcaggaacatgacatctctgatcgatctgtgcacttttatgtacaagattcctggggcagctgtggaaattcctccagagtaacgggacccaaagccatggccaaggagtgcacccactcccccatagctgcagagttgggaagtaggtgttagaccaagggtgcaagtgaagcagcttctgaggagctgaataacagcatctctgttgtggtggaacacagttctggaggctgaaaagataagaaagtcgctccagcgcttcactttctgggtccacagcgatgtcacaataggcatgcagggccaggggcaagcagcagcaagggagtctaaggccggtcctacaagtacaaggaagcgctctgttgctttgtcaagcttgtaggttatagtaaggctcactagtgcagcgagaggcaagggaagtgtagccgcagagattccatctgcaaagacagacgtgtgtaaactatgagagttttttcagcataatcattgtattcgtttcttccagcatgttcttttcacactttctccgcagtttcagttttatagatatcacaattgtttacaaatctaagcaagaccctccagggacatgttatccgggactgccatgactgcatctaaggttctaatctttcatgacaaaacccctggacacctgagaatatccattatccttagagaagaaaagcattacctgctggaagccttggtacgtcaacgccagtagctgctaagatcttctctatctgttgctcaacgcttgctaaatttgcagcaggactaggccagtcagttccgttcatggaaacgggcttccacagacctcgtgttacttccgaagaaaagtagctaaccatggttccaagtgttgccggcagaaaatcagccaagattttaagacctgaaacaaatcaagggacagattaagatctcgcccacccaactattagctaccttctgaagtagcgtttatgatgcatccagacagtaagacaataaaatagcttatgatcgtcagatgtaggtaagtatccccttgtcattaagcagataacactttctatagtttcagggaatggacaaacctgttgctagttcccggggagagagtgatccatgagcacaagcagttagagcagcatcaagcacaaacggggccgcttccaagatatcccatgcaggtaacttgagttgatcagacgagtcatcacctccagaagtagataaactactgctccctgaagatggggtcagtgactgactaccacctttgtttgccttcttgaacatcatgctaaggagggaatcgacaatgtgatgcactgggcttcctgtctttagttcagagagaattgaagccatacattcctgatgctgccggtaccactgtttcagtctggggaatgaatccatgaagatgggatccacagagatatctatcactttcgaaaatcttcgacgtgccatgcgatcctttggggactttccaaaacattccagacggcaatttcttactaacaacagatactcagggctgggttgagggcccaccgggggaacatctcccaagacgtaatctagtggtgggtgatcaaatctccatagcctcagaagaagtgtaaacgcagtggagaaaacagcataagaggagattaattcgccagtcgggagagtccacgtaatgttggaacgccggagccaagcgctcg

SEQ ID NO: 30969 - DNA, 1227 bp, Arabidopsis thaliana landsberg
ggaaaagtgagtatatggttagcctttagagcaagtatcattatgtattttggtctgtcactctatctgagagtggcctctgtatcaagaagttaaaagaaagatgtattgtggacctgcacatggaatcggtatatcatcaaattcgtagataatatccttttcaaggcaaatcataatgctctgttcgcaaaatgtttggaatgatcgcagcattgaaagtcttgggaaggataacacgacaggcattgtaacacaagttgtcttggacactgcgttgttgagagagacaactaatggactcagaatcaaaacataccaggtaaacaactaaaagcttgatcaaatctttaataaaacttcgatttggtttgatccgcatcaattttttctcttacgagcagggaggttctggttacgttcagggtattcgattcacaaacgtagagatgcaagatgttgcaaaccctatactcatcgatcagttctactgtgattcttcaactacatgttaaaaccaggtttccttataatatacaatacaaacttgtgattgtgattcttatatcgaaccaatactcagttatgttctcttcctttttttggtataaatgcagacctccccggttaaaatcagccatataatgtaccggaacataaccaagagtgcgaaagccatcaaatttgcgtgcagcgacacagtcccttgcagccacattgtcctcaacaatgtgaatcttgaaggcaaagacgctcaagtcgaagcgtactgtaattcagctgaaggatttgggtatggagtctactcgcacgacgacaaaggcttggaccagactcacaagtcagaggaagccgagactggccacgatgagctttgatggtgatgttcaaagtgttgttgtagtgagggatgataggtaaaatagtttaatgaagcatatggtacagtaaaatgatcttatgtttgtgttcataatcaaccataactaaggttgttgttaacagcatttgtccaccttttgtgtcaaatatttgtctttacccatacaaattcatgtgcaagtattttttcaacataaatttttgaacttggaagtttattgtttatgaaactgaaataccttttgatatcggaaactaagttatatagtagatgtttagataagttagttaaattgcttagactttgggattagaggaacaagaacaacccatcctatgggggac

SEQ ID NO: 30970 - DNA, 1015 bp, Arabidopsis thaliana landsberg
tagtaattatttctgtactttaatagcagctattaagttccagttttttttaaaaaaatttaaatccaaaattgcttaaggttgtgtttgcacaaatggattgttactttaaaactttaaacaagaacataaacccatcattatacaaatgggctgaactaattgattagtaagcccattctatttctcacgtaactcagttattgcgttattggcccaaaccgaaatggacttttcatagacaactggtactctcgtcgtctagctgtgcaattaaagataccagaccaaaatacccttcacgtgatacaaacaacgagaaaaggaaattaataccaacacgagaaaaaatggaaattcagatttcgttttgtgatatatcgaaaagcttttagttatatagtttccaaaattttgaatctattcactcaattaataatccagtacgttattaatatcctatagagattaaaaaaaaaaactcacaagaaaagccactctcgtaattaataaggcgtgatttaggttaatagtgtccttttctaacattcaatttaatcatgctaagtaccccaacattggacccgcacttcatagctcatactggaaattcctaattacccttcattcccaaagcgtaaaagcccacaaggataaggatacaaacgtcattacacgaaatgattaaagaataaagtaaaaaagaaaagtcgtactactacttaaaccatcttttaaaataaaataaaaatctaaaagtaagaggtcgaatctatctgaacgcgcaatcttcgccgtcaaatttggtagagctagtgaaaagtggtcccacgtctccgatgatctatgcttaaccaatcgtaacgtaccacgtatagcgattactttggtaattgtagcgtttagtgaaatcgttttggcgggcgtaattaataaattcaaaatcagagcccaaattaaaaacaaatcaaaaccctagcgcctctttttttggtccatttctctctctctcact

SEQ ID NO: 30971 - DNA, 3769 bp, Arabidopsis thaliana landsberg
  unsure (1)..(3769): unsure at all n locations
acaaaacaaactagagagtctacgtcgtgaaaaccgagaaactcagcttattcattttatgtttgattgcgttggaggcaagaggagtgagcaacagtatggtgcaagggaccttcaagatctaagtctttttactgatcaatatcttaatcagcttaatgccaggaagaagttccttacagaatatggtgagtcttcttcttctgttcctcctctgtttgatgttgcgggtgccaatcctcctgttgttgcagatcaagctgcggtaagcgttcctcctctgtttgctgttgcgggtgccaatcttcctgttgttgcatatcaagctgcggtaactgttcctgctatgtttgctgttgcgggtgccaatcttcctgttgttacagatcaagctgctgtaactgttcctactggatttcataacatgaatgtgaaccagaatcagtatgagccggttcagccctatatccatactgtttttagtgataatgttcaatatcagcatatgaatttgtatcaaaatcaacaagagccggttcactaccaagctcttggtgttgcaggtgccggtcttcctatgaaccagaatcagtatgagccggttcactaccagagtctgtctgtcgcgggtggtggtcttcctatgagtcagaatcagtatgagccggttcagccctatatccctactgtttttagtgataatgttcaatatcagcatatgaatttgtatcaaaatcaacaagagccggttcactaccaagctcttggtgttgcaggtgccggtcttcctatgaaccagaatcagtatgagccggttcagccctatgtccctactggttttagtgatcattttcagtttgagaatatgaatttgaatcaaaatcaacaggagccggttcaataccaagcccctgttgattttaatcatcagattcaacatggaaactatgatatgaatttgaaccagaatatgagtttggatccaaatcagtatccgtttcaaaatgatccattcatgaatatgttgacagaatatccttatgaacaagcgggttatgttggagagcatgcacacatccctttcatggacggaaactactacaactaccaccagccaccaaccgttggtcttacttccaccggtcacatgccttccaccaccaccaccaccaccaccaacaacaacaacaacaacaacaacaacaacaacaacaatgtgtgatgtgtttcagtagtgtgcattttgtgttttgtttgttttaaaagaccagtatttaattatgcttttccttttcaattagttgttgtaagagttgaaggttttacctttaagtcagttctatttcaatgaagtcatttctgtttggtcacaaattattttttacgagctttttgttcttaaaatgcataactaaatagatctgccaaaatcagatatatttggttcaaagaaaatcttacttttgatacattattggcaaaaacatcaatactctgtatatctctttctcaatccatagtttatttacttcccacacctacctatataacgagcaaatgaacacactaaagaagtaaaaacatgaacataaataatgaacacacgtctcagcaaacccaaaagattaacaatacaaactgtagcttgtttagtgttgaaaaattgaaaaattaaaggggtatctttaatgtgtatccatacttcaccatctcccaatgttcataagatgaccactagatatcatacctttttctcttcaaggataatgctttgtattgatcatcaataggatcgtatcccacgaaagcagtggtagcaggtaacttaacgaatttctccgtgctagggttacacattaaccacttagagtctgcttgaacagcgagaatgccatgtaaagaagccaaagagtgtgataattaagccagtaaagctgcatttgggaattgccatctcgaagttgggaagcaaagaagaagacccctatccctcgtcgtgtgaaaacgagaagaagaaggtaagtttctcagaagcgactatttaactgcgattgctccgaggacatagagaagaagaaatcaatgaaccctcggcttcggatgatggaagaccagtagaccacatctttgacacgaatcgaaacttcataagagacttggcagacaatctagctagtataaccatatttagatcaagagggagcgaatctaattttaacttacttgcgtttgtgtcttctttctcatcttcctcctcgttatcgttattacactctcgctccttacgcttgatgacgcctcccaaccaaaccctagattcgattccgcaaatgactttattttttgtggctctttattacagacttcgcacgcattctagtcactgtagcgatatcagacctaacttacttcggctgctacaaaacctgtacgtccttgcgtttcatggaggttcctgacgaatccctagatgttcttttctcaaatttctaattttttttttttaatatattagtcagcccatgtgaacgtcaaatgggcctaatgaggcccataacacaactaaacgccgtcgttttttcattgaacctaacggcgaagatacgatcggagaaactttctccgagaaagtgtacagtctattattccgagaatnnnnnnnnnnnnnnnnnnnnnnnnnnnnnnnnnatcgccatcttccaatttcggagaaccaaattcatcaaatctgtacgtcgcgaattgtggaccggcggttggactatcacacgacgcaatcgcggcggtgttcgctgagttcggtgaagtaaacggcgtctacgcggcggacgatagcggcgttcgtgttatcgtctctttcgctgatcccttctccgcgaaagcagctctagaagctttgagtggtcgaccatgccctgaccttcaaggacgttctttgcatattcgatattcagttcttcaattaccttccgaggtacttccaattaatgggtcttatcatattatgattagattcctccatggatctcaaagttttgatctttatgtaatgtttcaaagttttgatctttatgtaatgttagatctctatgtttcaaagttttgatctttaccaaaagacagaaactttatgtttgttgggtatctgcttgcaatgagcctttttatgtttttgcttagacgcaggtgaatgattgtgttccagtgtctttgattgattcacatgttgaatattccagggcttttcttgttacatgattttgtcactgtggaagaagaacaggtacatggtattttgtaatgtgcttatgttgtggtagcctacctcttgtgttacttactgttcatgtctttatcagcaattgcttgcagctgttgatactcgacattggattggtcttgctaaacggcgtgttcaacactatgatatgagttttgttatgggactagaaatgttgataccaaaaagcgtctcggcgagcttccatcgtttgtttctcctatacttgaaagaatctctttgttcccgaaccttgacatcgacccgtcatgcttgaatttggaccagttaacggtatatcatcagactctcatatatagattaagattctgttaaaattgttcttaactacattgaaggctgaggaattcttgtgaatattaggtaaatgagtacccatctggtgtgggattatcgcctcatattgatacacattcagcatttccagattgcatattcagcctttcaaaagctaaaccttgtattatg

SEQ ID NO: 30972 - DNA, 1862 bp, Arabidopsis thaliana landsberg
gaggtagaaaagctgagagattttctgggacttttttcttgttttgttttttttttaaatttcaaaggtcatgggacattattttgatcatgaacaagttgaccacaaaggttttgtgtagaggttttggagtaaagcaaagaagtgaaaaagcacatgacttgtgctttaagcatagatatatagaaaaacaaggccttatcttcatgtacttttaagccaagccaataaaccccacaaaccccattaattactctgcatataaattcaacccgaaaccttttatctctagcaaagaaataaggaatctcattagtaggcactggatttaataatcaaacagatatcttctcttggcgttttgattgaagcatatgatggataagctcttcattctttctcttctaggtctgttattggtaactgcttatggagctgcagggaagatggtgtacacagatcttgacgttcttgacgagcttgagaactttgatgtactgatagatgatgatgatgatacaaagctcttggattggccatcattcacaagccgacattctggaaaaaatctggtgaatgttgatacatttggtgcagctggagatggagtttctgatgatactcaggtttgcttattccataagaataacaggttatctagatacctaaaacgctatcacttctatgtctggaatgaaacatatccccaaacttgaaatcatggagaaaatttctaagcaaattgtttgcattgtagacttggcctatagatatttacggagatgtagttagatatttttctgcatctgatctgtgcaatgctcttcccaaatcaggcattcgtaagcgcatggagcaaagcctgcggtacatcaaaatctgtgtttctggttccagaaggacggcgatatttagtaaacgcaacaaagttcaatggtccatgtgaacaaaagttgatcattcaggtcaagttatcttcagtaggaaaacagaaactagacctaactgtatatacaagtatgtcttatacaattcagaaacttgtctttgtttacagattgacggaacaatagtggcaccagatgagcccagcaattgggactccaagtttcaaagaatttggctcgagttttcaaagctcaaaggggtcgtgtttcaagggaaaggagttatagatggttcaggcagcaaatggtgggctgcttcttgcaagaaaaacaagtctaatgtaaaatcttctatactaaaatctagctttctttatcacaaaagataagtgctcgagttttcgaatagaatcttacacatctttcttgctcttttacagccttgcaaaagcgcaccaactgtaagaaaccatcatttaccagttattattccttacaaatggctgcttatttggtttcattcaacaatctgtttttgttttcccctgcaggcactaactatagaatctagttcaggtgtgaaagtaagtggattgacaatccagaacagccagcagatgaatttcatcatagcaaggtcagattcagttcgagtctccaaggttatggtctcttctccaggagatagtcccaacactgatggaatccatatcactggatctaccaatgttatccttcaagactgtaaaatcggcacaggttttttttcttttgaccaaacctttatgcaaatgaaacattttacacttcaactacggttgtaataatcccttaagactggattaaacaggggatgattgtgtctcgattgtgaatgcaagctcaaatataaagatgaagaacatctattgtggacctgggacatggatcaggtacatcatcaaatttctagattacctcagttccaaatcaaat

SEQ ID NO: 30973 - DNA, 1431 bp, Arabidopsis thaliana landsberg
gtaaacgctggattcctattctgaataggtctagagcttcaggaacaagtttgtctgagcttgaaattcatggtaactagttattttggtgtgtcatgttcctgttttcactgctcatacttttctggcgattaatgttcttctccgataaatatctttcaacaggtattaaacctgaagaattcgatgaggatatacaagtatggagatcagcccttaaaaactattggtccttgcttacacctttgattttctcagaccacccaaaaagacctggcgatgaagatcctgtcccacctttttacatgatacgcaatgctatggacatgaatgcccgttatgggaatctgaatcaggccttacttaaccaagggaaatcagtttgggtgatgaatgttgtcccagtcaaagcacgtaatactcttcctataatacttgatcgaggttttaccggcgctctacatgactggtgagtgtgtttcccttagattccaaaaaagagttcgaaggtgttgtgcatcacatttatcttcatttcgcttaaaacatttgagctccaaaaaagaattgtttcttgtccattaattgatgtgcaggtgtgaaccattccctacctatcctcgaacatatgacatgcttcatgccaatgaacttctcacacatcttagctcagaacggtgcagcctaatggacttgttcttggaaatggaccggattctccgccctgaggttctttttttatacactccgaccatttgtcatatgatcctaattaggggtaaatcataagctgagagagacttagcgttttctggttgattgatagggatgggttgtgctaagtgataagcttggagtgatagagatggcgcgtacacttgctgctcgtgtacgctgggaagcaagagtcatcgatattcaagacggtagtgaccaacggctccttgtttgtcaaaaaccattattaaaaaaataactcaaaagaaaagaagcaaaattagcaaactgtcaacgagtttgcttctctgcaccatcgacactaagtacagtttttttaataggtaatctctcgctctctctctttctctttctcttttctctgagctttgaaaacttaaagaacacacaaatatcttaatctttatacattgagggtatctctgcgtaattcattagattgaatcagagtttcactttagtttacagatccaagtactgatgcttgcagattctggagagaaatcaagacgatgaaaatgggagacttctgcgactttcttagcagtgcaacggttattcaaattacgacattctttatattttttctgtttgcaaacaagaaattgttctcagttttatttttttggttcgtttcgtaattattcattaagaatcatctctctcgtatattcattcattcctctaatgaat

SEQ ID NO: 30974 - DNA, 5555 bp, Arabidopsis thaliana landsberg
  unsure (1)..(5555): unsure at all n locations
caactataaaataaaatctgcgtgacatttgttttattatctggaaaaaaggtttatgatttttgaaacattttttttttgtcgacattcttaaacccaaacagggctgaagttacaatggtgaaagaggaatccaacaacacaaaacatatctaaaggcccaacaacataaattataaagtaaatcagttggcctaaaatgaacatgtgtaaggccacatgttttgctcaagttggaggtggaagatgcgaagaaactcgccaccgaccagtcttcaccgccatcaccgccatagctgaccgccgatcaaattctgttttctgacatggatgttcacctatcagctatttcctctaaatcaccaccataatttcttttgcagaaatctcccgatgtgtagaacactagatccataaaccaacaaaattgaagcgccagaaaagatgaaaagggaagagattagatccagtcgcaaaacacgctcttctgaatccgtcttcaccagccatcaagtttccaaacatcacgatccacaaacaaagaagagggaccttcacacaaagccgattacggccttaataggagttgaaggatttatcctttcatgcaagggattgagcagttgatgatctctggaacttctgtttcccacactcggcgtttgtttcatgaaagagatttagttactgcaaaagaaaaggatcaaacaaaacaaaagataatagcccaattggctaaagagaactcgcacttaggcgatccagactaggctggaaaacatttacaacaaaaaaccagattaaaatcgaagaaaatccgattttaatcggaagaaaaaactttttctgtctgaaagatgcgagagagaaagttttttttttcgggcgttcttttagtcaactgtgaaaataatagagttagcgggaaacattagtttggtttgaaaataatagagttagcgggaaaaaaaaaaaaagttagtaacgaaaagaagtaaactagtagagagtgaggcggcccatatcataccaaataaaaaggcccaataactaatgacataaatactcttccgatgactcgtaaagaatctcttccaagaatcaaaccgttttcacgtcaccgagacctctctctctctcatcgcctcctcgcttcaccgccgtcgtcgtcgtcgtccctatttgcccccaccgccggttagttctcaatcttggtaatttcgtaccttcatgaaaatgaaattataagtgtaatggtagtgagattcataattttagtctcacacattgaagttcacttatcggcttatcgctaatgcaattgctacagaatctgggtatgtgcggatgaatcttttttcgtcatattcgtgtgatgagagatatgaactcccaagctgaagtagaccaatgggaagctcttgatctcggcgattctgaactcccgtcttttctccgcccttgtaaacgcaaatctccgacgaggtctctgcaaccgcatgcgcaacaacagaatccaaaggcgggttttaatagtaacactaatcaccgtcccactcttcggcgctgctcctcgccggataagtttcttgaggagagttattctcgctccttgattccaggacctgctggagttgttcaagttgcaatccgtagaaagatgaataaggatcctaaatcgtttaatgagcatggagaaccaattccaactcaagagttcttacgtaaggcagcagaagagcctgattgggaagacaaggatttctctgaggacccctgggtctctactgttgattacattcgaagtgaaggtagaccttttctcttagaattttacattgtcaaatctctaggggttgtggtttaccattttcaatttttgtttggcaggtttgttgagcaatggtggaaatgctatagggacaccagtgagcgagattaagagaagatgtgacagttggggtaaagttgatcaggtatgattaacctactcagtttagctgtatcctctagtccattcccattacaccaagatatctagtgaccatccagttagagtattaatggaaatctacaccctataatagtctgctggtattggctttcgctttgtgtttgtgaggagaaaggtggaatattctgaaagaatgtcttcacccaattttttgctatttggccacaagttatttgtatatgttgtagaataattggggtagtggaaagccaaatgctggatttttttgccaagccacgtgctgatgatctcataatgctccacatcttatctttgcagctaataagtgaaatgtagtgacatacttgaaatgtggctggtcatttgtaggtcgtggcaattgtcaaaacttgcactccgaatggtctaggtgatgtcatggtgactcttaaggtaaaaaaatgaacagtcaagaactcttaacaatgtgaatggtttccacttttttgtttttgtcacgcaccaattgtcatgagtctcaaatctgtgtattgctggtaggatcccactggaacaattgatgccagtgtgcacagaaaagttatctccgagagtgagtttggtagagatatacgagttggcgcagtggtgatacttaagcaggtttgctgtttttcattaaggagacaaaacaaatcgcatggttttgacattaccactttgtttctcagtcacttttggtaaatcatggactaagatatagtgtttttcaggttgcagtctgcgcaccctcacgttcatcaacctatcttaacataacactgaagaacatctccaaggtagtatttctctggcagtttttcttaggatatcaagttccaccttcttatattcattggaatatatgaaaatttcttaaggctagagagtnnnnnnnnnnnnnnnnnnnnnnnnnnnnntcctgttttaccaaaccagaacgattctgagatgagtgccaagaatcatgtttctgtgaatggtttaccaaagcagaacgattctgaaatgagtggcaagaatcttgttccggtgaatggtaagtgatcaaattttctttcgatttttttttcacagtttgatagagactcgaacctttgacttggtctaacagaaaacgaggaatatttgcgactgcaacccaatgtgtttagtgttgagcaaagcactactcaaggcatcatgaacaatctcagacaaaatgctaaaggaagcagtgaagcactgcatgacatagaaatggtagatattaatcctgcagagggaagcaaatcctctcctaaaaagggtgtgacaaagaatcactgtgaagttagaatggagcagactctcttgggaaaacatgattcaatcagccaaacagagcagcaactgtacgaagatgtagctactgagactgatatagctgattgcattagacccgcgaaacagatcagaagaagttctcaatcgcagattgatgagcaagagagtgtaatggggaaccctgatgaagtcacaactcgaactacaatccacaaatctcaatcgatggcgtcaacaatctcgttgccacaatggacggacgagcaacttgaagaactctttgcttttgactgaaatagacagtttggctttcttttgatataggaaggaatccacttttctagatagagagcaatgaaatagaatgtaaagccgtgacagagatgctgaaactactgacagaaattttcaaccaccaagggaatcaaatacccatcacgaccatacgtggaagtatggaagcgactctcctatttgaagttatttgttaggtagaccttaagctactaaccatttgtttagtttactagtgtgagagacataagctatgcatacaaccattaattaacagcattagtcagaacaatggttactagttattgagatgatgatgacatttcaccttcgggttcccactgttctctcttcaactactgaaccatgtttcttgggacatgattttgggctcggacttttgaggcttttcagaatcgtgactttgcaaccccttaatagctacaacattgccaaaccttgccacctctgtcccttaaacttggatgatgagcttcttagtccacatctcttgagtcttgattcaagcttaataaaagaatttctagtgagttgcaaaattgtaattttaaaactaaagggacaaaaaagaaaatgcttatataaataaaaggtcatattgcaaatagtcaaaacttgaaaagccttctcctttatccactcgttcgcctgccaaaaaccttactaaaacctcacttatagtcgtctctggtgaaatcttgccggagagatctcaataaaatgtcatcttccagaatattcctagtcggtaattccatattccgacctcacaaaccatcctttcctctctctttcaatcgttttccatctgtatctctccgcttccgatgcttctccagtgacgccgccgccgcagtagcaaccaccgtggattcggattcgccgtctctcactcctcatccatggccagagtggataactttcgtcgatcgcttaaagacgaaaggatatttcaccaaagacaccgaagatgatactgtttatcaggaaatgattctcgttaaagatgcttgtctcagcttcgctcgtgatcgttacgacgttctcaggtatacaattttctcaaattcatcaatcttcagtgttgaaactgatgattttgtgcctcttgatgcagatccttatcatcaggagatgtacaagctcttgtggagcgtggatgccctaatctcttcagaaaaactgtgaattcttccaaaaggattcgagctcatgttaagttaaacgaaggagatgtatgttgttgcattagctatggaattgtttaaaccttgataatagagagatctttaactcataagaaatgttttgtttttgaatcctaggtttgtggttcttgtgatcttcgtagctcgtgtgatagagcttatgtgatacttaaggatacagaagctgatgctcgaactgttgatgttatgcgtttactattgttcaatgcgcttgattctatagttatctctcgaggtgaagttccacctggtaaagaacttgttcatgagtctgcaagaagacttcttttagagttggttgagtttagtgagaagcctttaatccctgctttaccaaaaccttcnnnnnnnnnnnnnnnnnnnnnnnnnnnnnnnnnngcttttaagtcgaggaatgatgagccttctcagcgtgtggcttttaaatcgaggaatgatgatccttctcaacgtgtggcttttaaatcgaggaatgatgagccttctcaccgtgtggcttttaaatcgcggaacgatgagtcttctcaacgtgatcgacctctttacagtgcagattgggcttgtcctaagtaagtaatttctaagaacaattagctcgtatgccatgtctctagacattggtctggtcctttatagtttatacacagtgaatccaattttagtttcctaggctcttaccttttagatcatatcgtgtctgatgctgcgaaaat

SEQ ID NO: 30975 - DNA, 6783 bp, Arabidopsis thaliana landsberg
gctaagttacccaaagatccttacctatattcttaaccagattgccaaataaaatttcgaagattgatgctccactcaaagtgagtcacagctatgagattaaaagaataatcacttgtacggagaaaatctcagcccacatcataaattgccaaataaattagaagaagattgctcaaacacaatcttcaaaatagccaattgaaattcatcaaatcccttatgagtaaacctaatcttacacaaggaaggaaactaacagcttctaatcgagtagcagaaacaagcatgataatatcaaatttatgatatgatcgacggattagggtttctaaagttactttagagcatcgcaccgaccggtggggttccgagaagactcgcctgctcaaaatctatctcgcctaatcgatgatcttgctccaactctaagatcaaaggcacggcaaggatgagaaacgtcgtaccggcgatccacgccgccttcccggtgctctttaacagcttcttcgacacgtagacggcatcgcaagcggcgcgtcttccctgagaaacgatatcgtagtttgaaatcttcgccaagatgctcgaatcgcctttgccggctccgattttcttaggcgccattgattgaatgaaatcgagagagattgaaaaagttcagactagagacgacgacgaggggttcactttgaaaaataaaattgaagggggatcctcggctttaataatgtacgggtcagtaggcccattaagaaatctaatgacccatttacttaacgggccagattgagttccagtgtgcgccgaccaacacgatacgcgtcgcctttcgttttggttcgtcgtctctaaccctatacccccctctcttcgtgtgtaaacgaaacacaccaaaatcaaaagctgagagctctcttacattgaagctactttcgaagatagcattcactgattggtaaagagttctagaagcgacgagcatcttctttagttcccgaggtacatatccttttctcgtctctacgaattgggaacaaaactagggttttacattagctcatttttgtcgggtttctgcttttgtttcggttgtggtttagatttttgtcctattgtagaaacttcgtatcatgctttcctggttgtgattcataggaagatagagtgaattttgctttacgctaatcttatttgcttgcatttaatgaaatccttcgatgagtttagtatcagtcttctgtgtctttaaactgattctgttcttatgtgaatgtagttttctgcgtttgagaagtctgttctagaaagtaatgggtgacagcgaggccatggtttccgagggttatacttctgctccatatggagactataatgcttctgctgctactgtggaatcgaccgggcaagagactgcaccaattgttgatgcatcacactcggtcaacaatgattctttggtcaatggtactgcgccagttgagaacggaagtgcaacagataatgtggctgtgactgctccagcagcggagcatggagacaatactggtaatttcttcttctttttgaaagcttgtatgagcacatattgattctaagaggcgtcactagaacctgatcttaacttcgatgatgataatcctttacttattccttctctcttgttacaggctctacactctcaacggaagaggagcgcttgtggaatattgtaagggcaaattctttagagtttaatgcttggactgccttgattgatgagacggagaggatagcgcaggtatgtgtggagttacataatgaatcttatttttccggttttccctatgtactctgctctgagtcctctgaccttcgtggtgacgtaaatgtttgtcatctggattatgtttccaaaacttgtttgctatttgaatcttaagaatgagtattccgtttttatttgtacaccataagtcgctgtcatctttcggtatattttttctaacttttactgtcagctacttgattaatttgctctagattgttaatgttttccttgctgccctgattacaggacaatatagcaaaaatccggaaggtctatgatgctttcttagctgaatttcctctgtgttatggctattggaaaaagtttgccgatcatgaggctcgggtgggggcaatggacaaagtcgtggaggtttatgaaagagcagtgctgggagtgacatattcagtggatatctggttgcattattgcacttttgccatcaatacatatggagatccagaaacgatcagaaggtaatgaatgcttattcttctatttgtatgtgtattaacaacttggtgattttccaattacctagacaaaatggttttaccatctaaccctttttttagattgctacagcaagtcctctcgtttgtggcggaaagatctgatggaattaattttaaaatacttcgtttctctatgttcgacacactagcttttagcctccttccattgctatctgatatctttatctaaaactgttcccttttttggtgctcgttacttctctggtttaaaaattttgatgttaaaatatatctgttttaactgtcaccctcccccgaagttcaaaatgctgctggaaagatgtcaaccagttttgggcttaggtagcccttgactgctcgattttggccatagtatgcttttactaggaaggtaaatgcagtgtttggcagtatcatgcattcaaagagtgaatccttttctccatagaactcgtgtttgtctctattgattggatatgtctgtttctttcagctcatatgacattctttttactataatgctgttgcaggctttttgaacgagctttggtttacgttggaactgattttctttcctctccgttgtgggacaaatacattgagtatgagtacatgcagcaggactggagccgagttgccttgatttacaccagaatattggagaatccaattcaaaatctggatagatatttcagcaggtaatttttactgattgcattaatcattattgtctgtgctgaattggatagagtctatttatgtggattgtcatggttatggagagaaaacatcatttgatgcactatgttgatttagcacttaatcgagttcagctatctggcaggtgtgctgtatcatacatttgatatatgcttaatctaattttatatttcatctgtcatagcgagggtttttatgttttgctcataatctttagtttctttctgatgtgtatgttgcttcgtttttggtattttttctgttgttgataagttcttgtcttgctatagttttaaggagctagctgaaacacggcctctgtcggaactaaggagtgctgaggaatccgcagctgctgctgttgctgttgctggtgatgcttctgaaagtgcagcatctgagtccggtgaaaaggcagatgaaggacgatctcaagttgatggttccaccgaacaatcccctaaattggaaagtgctagttcaactgaacctgaggagttgaagaagtatgtaggcatcagggaagccatgtacataaaatcgaaagagtttgaatctaaaatcattggttatgaaatggctataaggaggccctatttccatgtgcgtcctctgaatgtcgcagaactggagaattggcacaactatctggatttcattgagagggatggagacttcaataaggtactggggtttaactctcttatacgtgaacgtacaagtgttttgtagattaagttgtacctctgtcatattattgacctacagttaagtagtatctggtgcatcatatgcttgattgggtttccattggatcaagcaacttttaaatgggaaataactgagaccaaagcatgtgcctcgatttggtaactttaaggctaagtatttcgaactctcaatttgtcaatggatattttaggcacatgaattatcctgttgttgaagttccaatgttattaatgcaggtgtcttcctaacattctgtctgtcaggcaaggagggtccctctgtatgtgagggcccctctgttggacttgtagagtatttcttgtggatttctccttttgtgttttctatgtttacatggtttttttccgtagtcatcatcatatatgttttacattcgattgtcttttccaataggtggtcaagctgtatgaaagatgtgtggttacctgtgcaaattacccagaatactggattcgttatgtgacaaacatggaagcaagtggaagtgcggaccttgcagaaaatgcccttgctcgagcaactcaagtctttgtcaaggtatgaattgtgtttctccaacctttctgggtagttaaatttcattattttcgagtggctttgcagaataattctaaatagtcagctttgagtctcatggttatttatctgctttcttttctttcatagaaacaaccagagattcacctatttgctgctcgattaaaagagcagaatggagatatagctggtgctagagctgcataccaattagtgcactctgaaatttctcctggacttcttgaagcagtaatcaagcatgcaaatatggaataccgactagtaagcttcaatggtgattaaagaactagtataagattattatcactggttgtttcccttacatgtctcctaatcttatctgtagggtaatctggatgatgctttctctttgtatgagcaagtgattgctgttgaaaaggggaaagaacattccacaatactgccactgctgtatgcgcagtattcaaggttttcatacttggtacgtcacatggtctctacactactaagactttatagtactgatttttgaactcgttttgttttgctttcgtgatggagtatgtagcgatactttatagtactgatttttgaactcattttgtttttgttttcgagatggagtatgtagtgatttggcttcttacttttcttaatattactttcaggtctccagggatgctgagaaagctaggaggattattgtcgaagcacttgaccatgtacaaccgtcaaaacctctcatggaagcactgattcattttgaggcgattcagccaccaccaagagagattgattaccttgagccacttgtagagaaagttataaagccagatgcagatgcccaaaacattgcaagttccactgagagggaagagctatccttaatatatatagaggtaatggaaaagaaagaagacaattcttgtttgaacatgatgtatctatattattggttttaacacccaaatgtgcatggcctttgcagttcctgggtatttttggagatgtgaagtccattaaaaaagcggaagatcaacatgttaaactgttttatcctcatcggagcacgtcggagctgaaaaagcgtagcgcagatgattttctcgcatcagataggacgaaaatggcaaaaacttacaacggcactccacctgctcagccagtatccaatgcatatccaaatgctcaggctcaatggtctggtggttatgctgcgcagcctcagacttggccaccagcacaagctgctcctgctcaaccacagcaatggaaccctgcctacggtcaacaggtaagataccaaagatagaaccatatccatttccttccttctatacttttactcttataatagtatcgaatatacctttgtaggctgcttatggtgcatatgggggatatcctgctggctataccgctccacaagcaccaacacctgtgccacaggccgcagcttatggagcgtatcctgctcaggtaaccaaaattcttaattagtgttaaactcaggagtatttaggaggattacagggattagccaccagtttgaattgggaatcactcttggagataagtctttgatcatctaacttggatcttatctttgtgaaattttttgcagacatacccaacgcagagttatgcacctccagttgcagcagcagcaccagcggctgcaccggtgcagcaaccggctgctgctgttgctcctcaagcgtactacaacacgtactactgagcctattactgctgctggtcgtttttgtagtgtaattgataaccatttgcttctatctactcaaatttagtgtctggatgtttacatgtctctcttttctcgatcagtgacaatagatatttacttttcttcagtttgtttgattcgtaaaagttcttggatttacgccggttatgatacagattgtaaccagagaagttgaattgatggagccgggtagtactgtttcaatgatctaactcagttaaactcctcagaagaaaaaaaggaaaagtaacgacgcttagagaacttaattttccaaaaagaaaagaatagacctcgaattcttacttaatgggaaaaatatacaattttaaaacttatggggtaaatatgcgaggatttttagatatattttgaaacaaaacatattttgtgcgactgtccaagtttttcgtgttcatcatcattttcttgtggcgtttcttcaaaaaccaaagttactttttccccaaggtattcgctgatgtgtggaattggataaaacagtttcatgactttttggttttctcaataagaggaaaatctttaatttattgcccgaaggaaatggtaaacaagtgatgagatgctacaaagctgacatatttccaccttcctgattaattagggtttcgcgcgatcagataagaatgttgggttacaaatgtctccactggaacaatcttatagatttaccg

SEQ ID NO: 30976 - DNA, 1027 bp, Arabidopsis thaliana landsberg
aagccaagatcatcaaaagatcacagtagtatcgttagtgtatcaagtataatctgcgatggcatgtgtatatgattggatgtacttaaaactgcaaaaactaagtcataaagaagagaacttgtggagaacgaagttttacactgagacaagggaggagtgattttcatgatgttgctattaagttcatcaacagcataaagttctccatcatcagaaactcgaatcttgtaaggaacaacaccaatatcgtttccttccacaacagtttcgaccaagtaaccattctcaaactgaagaacattagtgtctgcaccacaagtagcagttagagaaagaaacatcaaaaccaagtttatgaacaacaaacaatcaaggcgaccaaattcagtcgtactaattgagaatttacctgattgggataatttagaggatgatccagtagtccacttgagaaccgatgacatgtgcttaatcaaggaacctaaattcaatttacaacaattgacataaaaaaccagaaattgaagagtgaattcactaagaaagtgagtgaagcagatagatcaaagcaacgaagttaagtatggtaaagttaccagaaggagcagcttgagcttgaaatggaaaggagtgaagagtaaagaagatccataaagtgaagaaagtattgaaagaagaacaagtaaagctctcagcgtttagaagaatctgaaatttgcccatctctttctctgtatcttccaaaagtactattttatgttggaatcgaaccctagtaaaggagattcacatcttccaacacacctcaacaccagctgatagaatgaaaccaatttgcagatgacaacagatttttttcttttcttttttgaaagtaagaaaagaaattgtgtaacgaacataaagttaccttattgggttactcgtgttttttatgggccttataataggcccataaaggttattacctttcaatacgcccatttagtgagtgctaaatcctttatactcactgccactgggc

SEQ ID NO: 30977 - DNA, 2479 bp, Arabidopsis thaliana landsberg
gattgcgtatatgaagacacggagccacctcttacagttcttcgtgtgaggtactgaaaatgattcagtttcctcatgatctagaaggtttgcttctaagttctggtcacctgaaaaattaacactcgtggttattatatttcatcgaaagaggatcaaatgatctaacgtcatcaggtaccttttgcttaccattgcaatagtgtacttgagatatgcccatgagaaatgagaaaatttggaagaaagaatattgtgtttattgatttctttcgtttgatatgtcttttagatacagaagagacctttctttatacacaaaatgatatttattatagtaactaaataccccagatacaagttgcactaatcaaacttggcagacttttactaatttgtgtataataataaagatgggtcaggtgatagatgacagcagtatcataatttagtagtctcatgctgaccattgacctttcttatttgcttacacttgacttaaaattcttaaaacttttgaatggcggctctaagagaactctttttcctcagtgtctattgacgttaaatcagaagtcaacaaagatacaagaagccaagctcctagagtatacgtttttggtattttaaggagttttgttgcaagtcactacattgtttatctgttatgtcagtggcttccaagtaagtgggtattatatctgttcacttgttttttttttttgctcaaagctctgttttagcctatttgtctctctgacttcgttgtttgctcttgattcggtgtttcaaatgcattgcaaaattacaaagcagagtattgcatttgcatctttaagaaaacttattggtatatatagaagaaaaatattctgaaattattggtatcatatgtacaaaacttattagctattatgactgactagtttgcaaagtagcgttacacgttttttatgctcaaactgtacaaagatacattggctttggcctttgaggggaaaaaaagaaagatacattggctttatactggaaatatgctttgatcacacactttgtatgtttgtgtgaccttcctcaacaggtagatgaagatctcctacagcacttgtgtggctagtattcaacttcttttcgtcgaggtagtgctgatagacgaatgaaaggaagccgcagatagctaaaataatggagaagatttttgatgcgtccattctatcatggaaaactatcactgccgcaactggaactataggcaatcccacagctgttatggaattggagaacacagaggatgactcgaagatcaatcccacaagaccaagagtgtagacttgccaggaaatagctgccgaggctaaagtcaaaacatatgacactttcccgagtttgtagtttctcatctcacttggcaaagtttcccactctccacttgcaaaaagtcctatgagaactacacaactcgcaactagagactggtaaatggccaagtccgtgactgctgaggatgtatgcttcgtgaaaactttcctgaagagcatttgtatcagagatagtaacagtccaatcccagcggaagcaccgatggtacatatgaacccgatcacatactgtactctagatacattagttgagttttctgaatcagtgttgaccacaagaagagcagaggatacagtgaggagaagcaaagaactgactatcaaaggagtgaacttttgcgagttaaggaaatatgagaaaaaggcagtgaaggccaactgtgaggccaagatgagggagaaagtagagactggtaagtagagcaaccctactgcagacaaataagcataagcggacactagcagtccagtgcacaagtaaaccgatgcaagggtggtgaaggaaggggactgactgaaatttgtatctgttgatttgggttgcctgattcgagaaaagaagcggaacagaaccagtacagggaagccaatgagttgaagaagtgttaccacatatgtgctatttcctccattttcatagtacaatctacccagaattgtagctagtggctggcaaaagaggacaaagattacgtatatggagacacgaagccaccttttatagttctcggtttgaggcacagctgatgatgatgattcagttaccacctcatgatctataaggtttgcttctaagttctggtcacctgaaaaattaacactcatgtttattatatctcatgaaaaaatgaattcaaggatctaactttatcaggtgcttcttcttaccattggcatagtgttcttgagatctgtccatgagaaagaagattgtttcttgtttttattgattggttttgtttgagatgtcgtgcagatacacaagaggcctttctttaaacacatattgatggtattacaaaaaaacatctaaataccctacacaagttgcattatcaaacatggcaggcttttagtaaatcggattatatggaaggggc

SEQ ID NO: 30978 - DNA, 1886 bp, Arabidopsis thaliana landsberg
tcctcctcaaatgcaaggaacagttgcagcaatcgagagatctacagaaaaaaatgagtctaagacaatacagtacgcatgtacaagaagggaaatattcgataccatgtggaaggacagagcattcagctgctttggtctgtttagtgtcaagattctaacactcgatttctcttccaccaaaacctgtgatcatattattaattcagagagcgaagaattgatcgtcgtagattcggattaaagaagcaagaaagagacctgagactgagaggccatctcgactgccatctttcttactggtcagattcgcctttgtatctccggagagaggagcagcaatgggatcagaaattaccactaatggctaacaaaatcttcacccgcttagtttaggaagttgatattgggcttatagtaatctgttggttttaataatgggctttattttgttaatagagcaaatggaactttgcttttcaaactcaatttcaaagccctcttgcaacatgcttgatgaatgagaagattatatgtttttatcgagtacgttagacatgtgttttttttgttaggaagctagttttccaactaaccaacacctccctctagcataaaatgacacgtgggcaccagatcaatcattaaaaaagtcttcaaaaattctcaacaaccaacttctaaaagtcagacatgaaagccctcgcctctcgatatatagataatttgcatatacatgaaaactcaacaatctgacgcatatgcaacagagttgaaagatggaaagagcaaggaaacgatggccgagtggaagaggaattaggctgaggcagaagacaaagagactgcgtgcgagagtgagaagctttttcaggctactcaggagctggtgctgcagaaggcctccgctggtcagagaagacggtcttgattacacatctatacgtcgctctaactctttctacgccgatgcaattgcagactgcattgacttcatcaaccgctcctccgcttgaccgcttctcattctcttccaataattctttcttccattttgtaaaatccaatgtttctgtatatgcaaccaattcgaattctttgtattattttatttttttgacgagtcgatgcatctttaagaagtgggcttataatgggcctgatgatactacatccttagaaaccacattagtttaaatcagatctgacaactgcagtggttcatacccttaaagattaaaggtccgttgaaaacccattaagtatttcacatcatattctgggccagatgaacaatctgacagctatacaagtccattcccttatccaaaggcccgttaaaagcccacgtaaaatgaatgtgtcagatccttccttgctcgattcaacgcgtccgagtctcagacactccccggcgagatggaggaatacccggaagagctcaggacgccaccggtaagtctggtggctctcttcggatacgcggagctacacgcgtccattactaagtatctccactcccagcagcctcccatcaacgctctggccttccccgacttctctcaaatctctctcctccttgctcatgatgatcagatcagccgaacctcctccttcagagatcctctcagcgtctccgattctgcttctcccattccttccagatgcggcggtattttgaaacgggactggttgcttaagcatcgcaccaaggtccctgcacttgtcgccgccttctttccctcacatcacatcttcggcgatccaactcaatggctacaggtctgctccgatctcgacagcctcaagtatttcctcatctccctttatatttgtttccttgtttcccctcctttgtttcaaaccctcaaattaggggatcctct
